United States Patent Application Publication US 2017/0114356 A1 - sequence listing, part 37

SEQ ID NO: 49536 - DNA, 3014 bp, Zea Mays
atggcctcggatccaaccagggaaggaaggaatccaagccaccccagtccgctgcttccattccatctcccttctctcgccttctgcggcactgcagtgctctgctgcctcggcgtctccacctcctcccggcgacggcagggcatccgatacgacgccgcgcttccttccgaatcccaagccgcaccccgcaccctcccggtcgccattcccgatgctggtgttctcgagcgacgacgactgctgcggctcctcgtactaggggggcaggatcgatcggcaggtgacgtttcgttcgttctgctgttcggttcgaacgggagagtttgcttgggggttggtgcatcggtttcagaacgaccagttcattagttttggggattggggctatttcttgttttttttaaggcaggagagttgcttttcattctacgtattcgagagatgaaaaaaaagtgttttttgggctagttttgttccaatgatttggtagcaattaccatggcagttgcacgaaagggattcatgtactgggtctgaacggtttcatggcgatgcagtttccatcaccaaattcaccgtgagatgtctggtactcgttgtgactaactcagtaggcagtctgtcagttaagccagactcgcagaactataggatatcacagaacagttcttgaggtacttattgcagcctaatagtacatggagcgatattcagatatgagaccaaaggcagaagtttcatatctcggaaggggttccagattctcttctagaaatcaaagttcagaagagaggactaaccatagcagcgataaaccgggaagcagcacaagattcaatcctacgaaagcgagaattggcggtaatcaagggaggccaagatatgtatgcgattcatttaaatctccaagctcaaaggtgtcgcctgcaggctcttccaaatttccacttagcaagtttgaggagaggcgaagacagccttttgtgccagggtttgacattgctgaaagtagtagaagaaaggctgatgccaagcagctacagggtagtaagaaaattgctgcagagaacgacagttcagacaatctgcgaggtgaatcagaaggttttactactgaacaagtagtaaaaccagaaggctctcatgttgtcggtcattcaggtgtttctgcgtatacagtcgggtccctggtccaaactgcttcactaggttctaggacacacagacagaaacacaaagaagtgaatttgggtactccaggagcatcgtcttcaactctgactaacaggtctactatacctggaaattctaccatgggtgtgaggccagcttatggtcatgttaatggagggcagatacatggtcttaaaaaccttggttgttcttcggtacctgatgctcagccatcaggttgcccatctgagtctgttattagtaggaggaggtttgagttcatgagaaagagggcctttgaccaggaaagctcttccagatcagtgaacttaagcttaggtcattcaactcctacagatattcgcagaatcagaatgaatgaacaatcactttgtcaacaaataccacgaagcagcagcagaagccatcaggaatcggcaggttcagttaggacaagacgaccttctcctcatgccactaggatgagtgttcctgatggaagagcagatggcgtgctttctctgcacgagtcatccacaaaggatgtacagccagctcaggaacatctttcattggaagaagtctccactgagagttcaataaggccattctttgtggaatttgataataacattttctcgtctagtcatcttcgtcgctcgagtactcgagctgaaaggggaagaccaagctccctttttgaagaaagtcctcgacaaatgttccatagtctcatgggggagagggacagacatagacacataaccatggaaggaattacagaggttttggctgcattggagaggattgaacagcaagcagagctgacctatgatcaattgctaatgctggaggctaatctattttttggcgcctttgcctcctatgatcggcatagagacatgcggatggatattgatgatatgtcctatgaggaattattggccctggaggagagaataggctctgtgagcacagctctttcagaggagcagttcacaaaatgcctcaaaagaagcatatatagtcaggtcgctctagaagtgaacaaatcaaccgttgatgacatgaaatgcatcatctgtcaggaagagtacgcggagggcgaagaggttgggaggctgccatgcgagcaccggtaccatgtgtgctgcataggccagtggcttgggcagaagaactggtgtccagtatgcaaagcgtctgccgtgccttccaagggctgaagcattggggatgctggaaaccccgttccggattacaaaccatccttgcttttgtctacgtacattgttcttttccctatatgcattagatatagatcatgtctagatgtatgacgctagaacagcttgcgatttgggaggaagctaagagagtaatagttagctggttaataatagttcatagctaatatttgctagataactattacttggctacctattagctgtgcctttcacattgtggtacaggacaaatgcttgtcagatcgtgaacaaccttataacttgatgaatggcctaagtcaaagaggaatatgttgtgccaatctcaaccctatgctctcttcgtgtagtctgggtgtgtttggttgcgggacagtcaagaaagggacgttccctgacgttctctctcgtctttctgattttgagggataactggggataacactgtaatagttctgtttcaacccttgatcttgaactaaacaaccttatttgagggatcatctcatcttatctcgtcctgtcattacaaccaatcttgttagaaaataaaaaatgcggtagagatggtatcatagtagttgtacataagacagttcaatctattgt

SEQ ID NO: 49537 - DNA, 1922 bp, Zea Mays
cttggcctccaccagcagctgcaaacacagcgaaatcagcagctgttgagaatagaaaaaaaaaaacgctcctccccccccccccccccccaagaacacagcatcatgtcccagaaacttggaccttatcatcttgatttattaagagacattagcacaatgtttgttctaaattattttcatgttctttttaatctgcagtgtcattgttcagactgaaatacgtcaaaccagattgtcatattccattactatcatcccctgcttgtcaaacatgtggccaaacactatacaactgttgacttcagggcgtgagacttgaagctgttgaatgcagaattccccattggagcagccacgggcgctatatatgacacttgacacatcccttgtcttgttatggtccaaatttcagtgtcgtccaaaactgactgtgtaggtttcctatacaataataagttaaccgaaaggtaaaactatacttgaaaaaaaaaacaggatcaaagccacatgatcctccattccgggttcagtttgtcagggctctggctgtgaacaaccaaaaccaaccactacaactttttcttttcccaaacatgtaactactgttagttgaatggcccatgtgttgatggacggatgttccatggttcttctaccttaagattgactcctgtgctgtcttcacgtgcaagatcctccctcccagtcccagaccatttaattatgtgttaagctttcactaacaaactatcaaaacgacgctgactcctctgtccaggtgcaccaccaggaagacggctagaatcttcagagttggtcgatgatttgctcgcttcagaacatcacagtccaggcatgatgagacagtggacgggcgggcaggcaggcaggcttgtggatgcataaagaaatgttttgcgtggtaagagacgtctgtcttgcatcctaagcattggaagggaggtgtggtcgttggtcaatgcttggtgtcaggattaggaacgcagtccatttctacaagacctcccccaaacaatgtcatcagtctactctactacgcttcataaacaaatccccagtgttaggaaaacagtctgtttcttttgttggggaatattgcatgcttgccaccaagagcacatgagagggggggggggaaatgacaggaatagttggcaaaggacgggggaaccggtagagggaagatatgtgatcggattggtcatcataaacaattgacgagctaggtctcatacgatccccatggttatgagcggtgatcatcctctgcttaatgagctagattttattttgtccatgtgtgtatataggcttttgatgcctgcatggttggtttctgtcgaagaagatgtggatgtgtcaaattagcacacgcaaatctttcctcgtaaatgaaaataaatggctgaaatccgcttgtgtatatcgctttagggtttatttgagtccacatatgagtgtgtactgcacaatatgcattcctccacaaggtgaagttgttggatgtggagatgctgtgcatccaccaccggattcaaacacaagcaaaagcaatgggtgggcagggatatgcttgcaagatagacttaagcaaaagggaaggttgcaccaaacaggcttgcccttgatgctatgctatcttggaggagctgctgcttgcattgcagatgcaggcttccagttaaaacatctctccccatcaagcgtgggccatccaaaagggaatgttaaccacctactacacttggttggttcagatcacaccataaaaaggataacgctgtacgttatcaattaattaatttcatatactatatgaagattattcacattaatttcaaggtgtatcgggacgtgcgtacgtacctgggatgcgaggacctggaggccggcgtact

SEQ ID NO: 49538 - DNA, 1102 bp, Zea Mays
ggtgggtgtcggcgaattcgaacagctgctgcgcgtggtggagcagcaggtgcgcgtagtgcgcgtccccggcgcggcggaacacggcggacgcggcggccatggcggcggcggtctcggcggcgacctcggagcccgggtgctccgcgtccaccttgtacgcgcggcgcgacgtggtcatgtcctcgggccgctgccagcagtagtggtccgagtcgccgtccccgacctgcgcccacagctcggcgggcgccgtgtgcgccttcacgaagtagtcggtgccccacttgatggcctgcagcgcgtgcgccagctcccccgcgccggccacgccgccgccgtactccaggacgccccaggacagcagcgtcaccgtgaacgccatgggcaggccgaacttcacgtggtctccggcgtcgtagtacccgcccaccaggtccaccccttgctccagcccgtccgtcagccccgagtggccccgccaccgcacccgctggttgtacggcagccgccccgaccgctgcgcctcgaagtagagcaggctcttgcgcagcgcatcgccgtagtcgtgcgcggcggcggcggcggcggcgagcgagatggcggccagggccagggccacgaagcggacggacacgtcgctcattgcacgagccagccgccggcgacgacgacgtccgactaagcagccggccgatcaatcaatcatgcgcgtgcgtacgtgtccgaatcaaacggaaaccaccggcgccaaacaccgacagccaattcgccaagacgacgtacgcccggccggtttcgaagaacggccggcgcggcggcctggatgtgtggtgggctggtggctagctagcttctcctgcgatgatgtccggtcggcggcgaaatggaaatggaaacgcccctaactgcagtgggtgggtgttgagtgctgagtaatggctgcctgggtacggtgctgcctaacaatagtagtgcgctgccagatttaggatgtcttgcctgcctcgcggcggcggtgggatgcagaaggcgaagcgaggacggcacaaggggaagcgcctcctgcagcctccagcccaggggtggagatggatacggc

SEQ ID NO: 49539 - DNA, 77 bp, Zea Mays
tcgtccttaagcaaacgacgcggcgagcgacccgcgaccctaaccctagacagagagagaccagcagttgggccgac

SEQ ID NO: 49540 - DNA, 3311 bp, Zea Mays
cgcattcttgtttgtttactgttcttgtcaagagcagccgtcagccccgtcaccagcaagactcgccccccactactcttcctcctccaacctcccctcctgtctctccctccctccctggcagcgactactccccaacccgcacgcacgccgtgagcataaagccgtcgcgcgcccacacgcccgttttcatttccatcggttccctttccaaactcaacggccgcggcagggagcaggcacagtcacctccctgacccgttgagccgtcaattttatcccgccccgcgatttcctacagctgccgatcgaggaggaggcgcattgcccgcattcttctccgcttccaccgagagggcctcgcctgatcggcgccgccttggcccccatgacgtgtgtgcgcgccgaggacgccgtctcgcccgccgccgccgacgacgtggcggctgccctggtttccaggggcggcttgatccagaaggtggctgccggcggcgggcggagaccggcaggctcggcgcgctcgctgcagcgctcagcacatctggccaccggggacggcaacgctccggcgccggcggtggaggccagttgctcctggtccggggatgggataggtaagagcaacggtggtgggaagagagatgatagacacaggatgcggcagtacaggtcgcagctcgaacaggaggtcaagaaattgcagaggcagcttgaagaagaggttgatctgcacgtggcgttggcggatgctgttacacaaaatgttgcgcctatactgaagtcttctatgaagcttccacacaaggcacaggagctactgattaacatcgcctccttggagattaccgtttcaaaccttgaaaagaagctaaatgatctgtactaccagctttgtcacgaaaggaacgaaaggttacttgctgaaaataatcagggatgcttgccatctacatcctccgatgagcaccagtcattgtcaacttgcacgtgtacgtgggaagagcacatatcatcgttgagagatttgaagtttgggggatctgaatcaatgagatcaatgagacaggacttattccccgagcttgaagatgaccaggatatgggagaagatcctgagggtcaacagatagtttctttaaacaggctgctagaaaagcaccgagattcttctttgaatagacttcttgaaaagcatcgagatgaagaggtccctttcatgcttaccttacctctatagttttaagaaccaactttggaacatattagagtatcaagaatttatttatctttcagcagatgcaagaatctggctccatggaaaatgaaggcaatgaaaatgagcagcctgacacgttatcctttgaacagtctattctaaagataactagcataaaaggagggaatctttggagcaacccaaatgagctctctgaggagatggttcgctgcatgagaaacattttcctacgcttgtctgaatccttgaagatatcgccgaagacatcttctgattgttcatcttcctccgtggagcgtctatcaggctccacgttagcatctttctcagattcatccataatgccctcaatgctacggagtccttcagttgattctaatcacaatgacgagacgatgaaggaagtcaggaactttgatccgtataaagttaatggaaaggaaacccgaagagatatcggaaactatcgttcagcagctgaagtatcttggatgtctgttggaaaggatcaactagaatatgcatctgaagctttaaagaagttcagatttctagtggaacaattgtcaaaggttaatcctagctgtatggatcgcgatcagcggctagccttttggattaacttatacaatgctttgataatgcatgagctcacttcaattcatcgcatctgccctcaatttctttcatcaagtgtcatgcgctcaccaattgtttaccgttgcatttttttatcggaatctatcaggcgtatttggcatacggagtacctcgaaatgacatcaagcttttttctctgatgcaaaaggcttgttacacagttggcggccagtccttcagcgcagcagaaatagagtttgtgattctaaagatgaagactccagttcatcggccccaactttctttgatgttgactctgaataagttcaagattactgaggatcacaagaagtactcaatcgatgaattcgaaccccttcttttgttcggacttagctgtggaatgttctcttctcctgctgtaagtagtacgccggctaatcttagccctgtcaagctgtgcatgtgcttcagcaaattcgtcacttaataagttgctggagaaactagagccatgctgtcacccattctgctattcttgtcctacctaatcttagtcttgttaaggcctgtcatccttcagttctatttgtctgatttaccgttgcttgagctggacggttataagattgctaaaacctaagctattgctgggtcaccctgttgtcgcacaggtacgcatattctccgctgcaaatgttaggcaggagctccaggaatctctgagagactatattcaggcgactgtcggtacaaatggcaaagggaagctgctgatcccgaagctagtgcagagctacgccaagggagctgtcgaggactctctgctcgcagactggatctgccaccaccttgcacctgatcaagccacggtcatccgggactcttcctcgcagtggaagcagcggctactcggagctcgaagcttcaccgttctcgccttcgactccaagttccggtacctcttcttgccagacagctgtggctcccagagccagaagccagaggcaaagcaatcttacaaacttcctgagccgtgttcagaatcagaatagataataagagctcagtttggtatatttggaccatcatacattcttttgcatagcgggccatgtgattggcagttgtatatgatgtaaattttgaggaagcttgaattgctgtgtttgcaaaaccggatcctctccacggagttggtggcaatttgggggtcgtattggttttcttttgtattcacttgtcttccatactgaagataacattcttttgttgtttttgttttatctgcataccttttcctttttttcccctctccttttctgtaaacctgtatggtcaatttgatctgtaacttctgcacaaataaaggtggtgagcagtctttacttaggtttttctgcacaactgattagggacgaagccagtcggtggggcgagcggggctcgacccccctacctcctatactaa

SEQ ID NO: 49541 - DNA, 3108 bp, Zea Mays
gtttactgttcttgtcaagagcagccgtcagccccgtcaccagcaagactcgccccccactactcttcctcctccaacctcccctcctgtctctccctccctccctggcagcgactactccccaacccgcacgcacgccgtgagcataaagccgtcgcgcgcccacacgcccgttttcatttccatcggttccctttccaaactcaacggccgcggcagggagcaggcacagtcacctccctgacccgttgagccgtcaattttatcccgccccgcgatttcctacagctgccgatcgaggaggaggcgcattgcccgcattcttctccgcttccaccgagagggcctcgcctgatcggcgccgccttggcccccatgacgtgtgtgcgcgccgaggacgccgtctcgcccgccgccgccgacgacgtggcggctgccctggtttccaggggcggcttgatccagaaggtggctgccggcggcgggcggagaccggcaggctcggcgcgctcgctgcagcgctcagcacatctggccaccggggacggcaacgctccggcgccggcggtggaggccagttgctcctggtccggggatgggataggtaagagcaacggtggtgggaagagagatgatagacacaggatgcggcagtacaggtcgcagctcgaacaggaggtcaagaaattgcagaggcagcttgaagaagaggttgatctgcacgtggcgttggcggatgctgttacacaaaatgttgcgcctatactgaagtcttctatgaagcttccacacaaggcacaggagctactgattaacatcgcctccttggagattaccgtttcaaaccttgaaaagaagctaaatgatctgtactaccagctttgtcacgaaaggaacgaaaggttacttgctgaaaataatcagggatgcttgccatctacatcctccgatgagcaccagtcattgtcaacttgcacgtgtacgtgggaagagcacatatcatcgttgagagatttgaagtttgggggatctgaatcaatgagatcaatgagacaggacttattccccgagcttgaagatgaccaggatatgggagaagatcctgagggtcaacagatagtttctttaaacaggctgctagaaaagcaccgagattcttctttgaatagacttcttgaaaagcatcgagatgaagagatgcaagaatctggctccatggaaaatgaaggcaatgaaaatgagcagcctgacacgttatcctttgaacagtctattctaaagataactagcataaaaggagggaatctttggagcaacccaaatgagctctctgaggagatggttcgctgcatgagaaacattttcctacgcttgtctgaatccttgaagatatcgccgaagacatcttctgattgttcatcttcctccgtggagcgtctatcaggctccacgttagcatctttctcagattcatccataatgccctcaatgctacggagtccttcagttgattctaatcacaatgacgagacgatgaaggaagtcaggaactttgatccgtataaagttaatggaaaggaaacccgaagagatatcggaaactatcgttcagcagctgaagtatcttggatgtctgttggaaaggatcaactagaatatgcatctgaagctttaaagaagttcagatttctagtggaacaattgtcaaaggttaatcctagctgtatggatcgcgatcagcggctagccttttggattaacttatacaatgctttgataatgcatgcgtatttggcatacggagtacctcgaaatgacatcaagcttttttctctgatgcaaaaggcttgttacacagttggcggccagtccttcagcgcagcagaaatagagtttgtgattctaaagatgaagactccagttcatcggccccaactttctttgatgttgactctgaataagttcaagattactgaggatcacaagaagtactcaatcgatgaattcgaaccccttcttttgttcggacttagctgtggaatgttctcttctcctgctgtaagtagtacgccggctaatcttagccctgtcaagctgtgcatgtgcttcagcaaattcgtcacttaataagttgctggagaaactagagccatgctgtcacccattctgctattcttgtcctacctaatcttagtcttgttaaggcctgtcatccttcagttctatttgtctgatttaccgttgcttgagctggacggttataagattgctaaaacctaagctattgctgggtcaccctgttgtcgcacaggtacgcatattctccgctgcaaatgttaggcaggagctccaggaatctctgagagactatattcaggcgactgtcggtacaaatggcaaagggaagctgctgatcccgaagctagtgcagagctacgccaagggagctgtcgaggactctctgctcgcagactggatctgccaccaccttgcacctgatcaagccacggtcatccgggactcttcctcgcagtggaagcagcggctactcggagctcgaagcttcaccgttctcgccttcgactccaagttccggtacctcttcttgccagacagctgtggctcccagagccagaagccagaggcaaagcaatcttacaaacttcctgagccgtgttcagaatcagaatagataataagagctcagtttggtatatttggaccatcatacattcttttgcatagcgggccatgtgattggcagttgtatatgatgtaaattttgaggaagcttgaattgctgtgtttgcaaaaccggatcctctccacggagttggtggcaatttgggggtcgtattggttttcttttgtattcacttgtcttccatactgaagataacattcttttgttgtttttgttttatctgcataccttttcctttttttcccctctccttttctgtaaacctgtatggtcaatttgatctgtaacttctgcacaaataaaggtggtgagcagtctttacttaggtttttctgcacaactgattagggacgaagccagtcggtggggcgagcggggctcgacccccctacctcctatactaa

SEQ ID NO: 49542 - DNA, 2943 bp, Zea Mays
gtcaagagcagccgtcagccccgtcaccagcaagactcgccccccactactcttcctcctccaacctcccctcctgtctctccctccctccctggcagcgactactccccaacccgcacgcacgccgtgagcataaagccgtcgcgcgcccacacgcccgttttcatttccatcggttccctttccaaactcaacggccgcggcagggagcaggcacagtcacctccctgacccgttgagccgtcaattttatcccgccccgcgatttcctacagctgccgatcgaggaggaggcgcattgcccgcattcttctccgcttccaccgagagggcctcgcctgatcggcgccgccttggcccccatgacgtgtgtgcgcgccgaggacgccgtctcgcccgccgccgccgacgacgtggcggctgccctggtttccaggggcggcttgatccagaaggtggctgccggcggcgggcggagaccggcaggctcggcgcgctcgctgcagcgctcagcacatctggccaccggggacggcaacgctccggcgccggcggtggaggccagttgctcctggtccggggatgggataggtaagagcaacggtggtgggaagagagatgatagacacaggatgcggcagtacaggtcgcagctcgaacaggaggtcaagaaattgcagaggcagcttgaagaagaggttgatctgcacgtggcgttggcggatgctgttacacaaaatgttgcgcctatactgaagtcttctatgaagcttccacacaaggcacaggagctactgattaacatcgcctccttggagattaccgtttcaaaccttgaaaagaagctaaatgatctgtactaccagctttgtcacgaaaggaacgaaaggttacttgctgaaaataatcagggatgcttgccatctacatcctccgatgagcaccagtcattgtcaacttgcacgtgtacgtgggaagagcacatatcatcgttgagagatttgaagtttgggggatctgaatcaatgagatcaatgagacaggacttattccccgagcttgaagatgaccaggatatgggagaagatcctgagggtcaacagatagtttctttaaacaggctgctagaaaagcaccgagattcttctttgaatagacttcttgaaaagcatcgagatgaagagatgcaagaatctggctccatggaaaatgaaggcaatgaaaatgagcagcctgacacgttatcctttgaacagtctattctaaagataactagcataaaaggagggaatctttggagcaacccaaatgagctctctgaggagatggttcgctgcatgagaaacattttcctacgcttgtctgaatccttgaagatatcgccgaagacatcttctgattgttcatcttcctccgtggagcgtctatcaggctccacgttagcatctttctcagattcatccataatgccctcaatgctacggagtccttcagttgattctaatcacaatgacgagacgatgaaggaagtcaggaactttgatccgtataaagttaatggaaaggaaacccgaagagatatcggaaactatcgttcagcagctgaagtatcttggatgtctgttggaaaggatcaactagaatatgcatctgaagctttaaagaagttcagatttctagtggaacaattgtcaaaggttaatcctagctgtatggatcgcgatcagcggctagccttttggattaacttatacaatgctttgataatgcatgagctcacttcaattcatcgcatctgccctcaatttctttcatcaagtgtcatgcgctcaccaattgtttaccgttgcatttttttatcggaatctatcaggcgtatttggcatacggagtacctcgaaatgacatcaagcttttttctctgatgcaaaaggcttgttacacagttggcggccagtccttcagcgcagcagaaatagagtttgtgattctaaagatgaagactccagttcatcggccccaactttctttgatgttgactctgaataagttcaagattactgaggatcacaagaagtactcaatcgatgaattcgaaccccttcttttgttcggacttagctgtggaatgttctcttctcctgctgtacgcatattctccgctgcaaatgttaggcaggagctccaggaatctctgagagactatattcaggcgactgtcggtacaaatggcaaagggaagctgctgatcccgaagctagtgcagagctacgccaagggagctgtcgaggactctctgctcgcagactggatctgccaccaccttgcacctgatcaagccacggtcatccgggactcttcctcgcagtggaagcagcggctactcggagctcgaagcttcaccgttctcgccttcgactccaagttccggtacctcttcttgccagacagctgtggctcccagagccagaagccagaggcaaagcaatcttacaaacttcctgagccgtgttcagaatcagaatagataataagagctcagtttggtatatttggaccatcatacattcttttgcatagcgggccatgtgattggcagttgtatatgatgtaaattttgaggaagcttgaattgctgtgtttgcaaaaccggatcctctccacggagttggtggcaatttgggggtcgtattggttttcttttgtattcacttgtcttccatactgaagataacattcttttgttgtttttgttttatctgcataccttttcctttttttcccctctccttttctgtaaacctgtatggtcaatttgatctgtaacttctgcacaaataaaggtggtgagcagtctttacttaggtttttctgcacaactgattagggacgaagccagtcggtggggcgagcggggctcgacccccctacctcctatactaa

SEQ ID NO: 49543 - DNA, 2829 bp, Zea Mays
gtcaagagcagccgtcagccccgtcaccagcaagactcgccccccactactcttcctcctccaacctcccctcctgtctctccctccctccctggcagcgactactccccaacccgcacgcacgccgtgagcataaagccgtcgcgcgcccacacgcccgttttcatttccatcggttccctttccaaactcaacggccgcggcagggagcaggcacagtcacctccctgacccgttgagccgtcaattttatcccgccccgcgatttcctacagctgccgatcgaggaggaggcgcattgcccgcattcttctccgcttccaccgagagggcctcgcctgatcggcgccgccttggcccccatgacgtgtgtgcgcgccgaggacgccgtctcgcccgccgccgccgacgacgtggcggctgccctggtttccaggggcggcttgatccagaaggtggctgccggcggcgggcggagaccggcaggctcggcgcgctcgctgcagcgctcagcacatctggccaccggggacggcaacgctccggcgccggcggtggaggccagttgctcctggtccggggatgggataggtaagagcaacggtggtgggaagagagatgatagacacaggatgcggcagtacaggtcgcagctcgaacaggaggtcaagaaattgcagaggcagcttgaagaagaggttgatctgcacgtggcgttggcggatgctgttacacaaaatgttgcgcctatactgaagtcttctatgaagcttccacacaaggcacaggagctactgattaacatcgcctccttggagattaccgtttcaaaccttgaaaagaagctaaatgatctgtactaccagctttgtcacgaaaggaacgaaaggttacttgctgaaaataatcagggatgcttgccatctacatcctccgatgagcaccagtcattgtcaacttgcacgtgtacgtgggaagagcacatatcatcgttgagagatttgaagtttgggggatctgaatcaatgagatcaatgagacaggacttattccccgagcttgaagatgaccaggatatgggagaagatcctgagggtcaacagatagtttctttaaacaggctgctagaaaagcaccgagattcttctttgaatagacttcttgaaaagcatcgagatgaagagatgcaagaatctggctccatggaaaatgaaggcaatgaaaatgagcagcctgacacgttatcctttgaacagtctattctaaagataactagcataaaaggagggaatctttggagcaacccaaatgagctctctgaggagatggttcgctgcatgagaaacattttcctacgcttgtctgaatccttgaagatatcgccgaagacatcttctgattgttcatcttcctccgtggagcgtctatcaggctccacgttagcatctttctcagattcatccataatgccctcaatgctacggagtccttcagttgattctaatcacaatgacgagacgatgaaggaagtcaggaactttgatccgtataaagttaatggaaaggaaacccgaagagatatcggaaactatcgttcagcagctgaagtatcttggatgtctgttggaaaggatcaactagaatatgcatctgaagctttaaagaagttcagatttctagtggaacaattgtcaaaggttaatcctagctgtatggatcgcgatcagcggctagccttttggattaacttatacaatgctttgataatgcatgcgtatttggcatacggagtacctcgaaatgacatcaagcttttttctctgatgcaaaagttggcggccagtccttcagcgcagcagaaatagagtttgtgattctaaagatgaagactccagttcatcggccccaactttctttgatgttgactctgaataagttcaagattactgaggatcacaagaagtactcaatcgatgaattcgaaccccttcttttgttcggacttagctgtggaatgttctcttctcctgctgtacgcatattctccgctgcaaatgttaggcaggagctccaggaatctctgagagactatattcaggcgactgtcggtacaaatggcaaagggaagctgctgatcccgaagctagtgcagagctacgccaagggagctgtcgaggactctctgctcgcagactggatctgccaccaccttgcacctgatcaagccacggtcatccgggactcttcctcgcagtggaagcagcggctactcggagctcgaagcttcaccgttctcgccttcgactccaagttccggtacctcttcttgccagacagctgtggctcccagagccagaagccagaggcaaagcaatcttacaaacttcctgagccgtgttcagaatcagaatagataataagagctcagtttggtatatttggaccatcatacattcttttgcatagcgggccatgtgattggcagttgtatatgatgtaaattttgaggaagcttgaattgctgtgtttgcaaaaccggatcctctccacggagttggtggcaatttgggggtcgtattggttttcttttgtattcacttgtcttccatactgaagataacattcttttgttgtttttgttttatctgcataccttttcctttttttcccctctccttttctgtaaacctgtatggtcaatttgatctgtaacttctgcacaaataaaggtggtgagcagtctttacttaggtttttctgcacaactgattagggacgaagccagtcggtggggcgagcggggctcgacccccctacctcctatactaa

SEQ ID NO: 49544 - DNA, 2393 bp, Zea Mays
gcaaagttggtgtcctttcgctggtgctgtgccgtggtgcggagggcactgtcggcctcagctacaccgcgtgctcccctgcgctgcgcacttcatgtgggggacctggatgaactgtccctaacctccctggatgggataggtaagagcaacggtggtgggaagagagatgatagacacaggatgcggcagtacaggtcgcagctcgaacaggaggtcaagaaattgcagaggcagcttgaagaagaggttgatctgcacgtggcgttggcggatgctgttacacaaaatgttgcgcctatactgaagtcttctatgaagcttccacacaaggcacaggagctactgattaacatcgcctccttggagattaccgtttcaaaccttgaaaagaagctaaatgatctgtactaccagctttgtcacgaaaggaacgaaaggttacttgctgaaaataatcagggatgcttgccatctacatcctccgatgagcaccagtcattgtcaacttgcacgtgtacgtgggaagagcacatatcatcgttgagagatttgaagtttgggggatctgaatcaatgagatcaatgagacaggacttattccccgagcttgaagatgaccaggatatgggagaagatcctgagggtcaacagatagtttctttaaacaggctgctagaaaagcaccgagattcttctttgaatagacttcttgaaaagcatcgagatgaagagatgcaagaatctggctccatggaaaatgaaggcaatgaaaatgagcagcctgacacgttatcctttgaacagtctattctaaagataactagcataaaaggagggaatctttggagcaacccaaatgagctctctgaggagatggttcgctgcatgagaaacattttcctacgcttgtctgaatccttgaagatatcgccgaagacatcttctgattgttcatcttcctccgtggagcgtctatcaggctccacgttagcatctttctcagattcatccataatgccctcaatgctacggagtccttcagttgattctaatcacaatgacgagacgatgaaggaagtcaggaactttgatccgtataaagttaatggaaaggaaacccgaagagatatcggaaactatcgttcagcagctgaagtatcttggatgtctgttggaaaggatcaactagaatatgcatctgaagctttaaagaagttcagatttctagtggaacaattgtcaaaggttaatcctagctgtatggatcgcgatcagcggctagccttttggattaacttatacaatgctttgataatgcatgcgtatttggcatacggagtacctcgaaatgacatcaagcttttttctctgatgcaaaaggcttgttacacagttggcggccagtccttcagcgcagcagaaatagagtttgtgattctaaagatgaagactccagttcatcggccccaactttctttgatgttgactctgaataagttcaagattactgaggatcacaagaagtactcaatcgatgaattcgaaccccttcttttgttcggacttagctgtggaatgttctcttctcctgctgtacgcatattctccgctgcaaatgttaggcaggagctccaggaatctctgagagactatattcaggcgactgtcggtacaaatggcaaagggaagctgctgatcccgaagctagtgcagagctacgccaagggagctgtcgaggactctctgctcgcagactggatctgccaccaccttgcacctgatcaagccacggtcatccgggactcttcctcgcagtggaagcagcggctactcggagctcgaagcttcaccgttctcgccttcgactccaagttccggtacctcttcttgccagacagctgtggctcccagagccagaagccagaggcaaagcaatcttacaaacttcctgagccgtgttcagaatcagaatagataataagagctcagtttggtatatttggaccatcatacattcttttgcatagcgggccatgtgattggcagttgtatatgatgtaaattttgaggaagcttgaattgctgtgtttgcaaaaccggatcctctccacggagttggtggcaatttgggggtcgtattggttttcttttgtattcacttgtcttccatactgaagataacattcttttgttgtttttgttttatctgcataccttttcctttttttcccctctccttttctgtaaacctgtatggtcaatttgatctgtaacttctgcacaaataaaggtggtgagcagtctttacttaggtttttctgcacaactgattagggacgaagccagtcggtggggcgagcggggctcgacccccctacctcctatactaa

SEQ ID NO: 49545 - DNA, 1392 bp, Zea Mays
aacctccctggtccctacttcccattgagtaccacagtctgatgggataggtaagagcaacggtggtgggaagagagatgatagacacaggatgcggcagtacaggtcgcagctcgaacaggaggtcaagaaattgcagaggcagcttgaagaagaggttgatctgcacgtggcgttggcggatgctgttacacaaaatgttgcgcctatactgaagtcttctatgaagcttccacacaaggcacaggagctactgattaacatcgcctccttggagattaccgtttcaaaccttgaaaagaagctaaatgatctgtactaccagctttgtcacgaaaggaacgaaaggttacttgctgaaaataatcagggatgcttgccatctacatcctccgatgagcaccagtcattgtcaacttgcacgtgtacgtgggaagagcacatatcatcgttgagagatttgaagtttgggggatctgaatcaatgagatcaatgagacaggacttattccccgagcttgaagatgaccaggatatgggagaagatcctgagggtcaacagatagtttctttaaacaggctgctagaaaagcaccgagattcttctttgaatagacttcttgaaaagcatcgagatgaagagatgcaagaatctggctccatggaaaatgaaggcaatgaaaatgagcagcctgacacgttatcctttgaacagtctattctaaagataactagcataaaaggagggaatctttggagcaacccaaatgagctctctgaggagatggttcgctgcatgagaaacattttcctacgcttgtctgaatccttgaagatatcgccgaagacatcttctgattgttcatcttcctccgtggagcgtctatcaggctccacgttagcatctttctcagattcatccataatgccctcaatgctacggagtccttcagttgattctaatcacaatgacgagacgatgaaggaagtcaggaactttgatccgtataaagttaatggaaaggaaacccgaagagatatcggaaactatcgttcagcagctgaagtatcttggatgtctgttggaaaggatcaactagaatatgcatctgaagctttaaagaagttcaggtttgctgctacagccttggctaaacctatgagtcctcatagatatatcacatgtctacaaactgtacaaaccttagtgcatatatacaaaaattttagcatatgatgtatacttttaaattttgttcagccttgttaatgttctaaaagaatatgcagacaatcgaaccagtctagggatttggattgggggaacaaatggatgctctattcttgttcgcttgcagtaaagcaatcagtttcaaaattggtttgcgtata

SEQ ID NO: 49546 - DNA, 2297 bp, Zea Mays
aacctccctggtccctacttcccattgagtaccacagatgggataggtaagagcaacggtggtgggaagagagatgatagacacaggatgcggcagtacaggtcgcagctcgaacaggaggtcaagaaattgcagaggcagcttgaagaagaggttgatctgcacgtggcgttggcggatgctgttacacaaaatgttgcgcctatactgaagtcttctatgaagcttccacacaaggcacaggagctactgattaacatcgcctccttggagattaccgtttcaaaccttgaaaagaagctaaatgatctgtactaccagctttgtcacgaaaggaacgaaaggttacttgctgaaaataatcagggatgcttgccatctacatcctccgatgagcaccagtcattgtcaacttgcacgtgtacgtgggaagagcacatatcatcgttgagagatttgaagtttgggggatctgaatcaatgagatcaatgagacaggacttattccccgagcttgaagatgaccaggatatgggagaagatcctgagggtcaacagatagtttctttaaacaggctgctagaaaagcaccgagattcttctttgaatagacttcttgaaaagcatcgagatgaagagatgcaagaatctggctccatggaaaatgaaggcaatgaaaatgagcagcctgacacgttatcctttgaacagtctattctaaagataactagcataaaaggagggaatctttggagcaacccaaatgagctctctgaggagatggttcgctgcatgagaaacattttcctacgcttgtctgaatccttgaagatatcgccgaagacatcttctgattgttcatcttcctccgtggagcgtctatcaggctccacgttagcatctttctcagattcatccataatgccctcaatgctacggagtccttcagttgattctaatcacaatgacgagacgatgaaggaagtcaggaactttgatccgtataaagttaatggaaaggaaacccgaagagatatcggaaactatcgttcagcagctgaagtatcttggatgtctgttggaaaggatcaactagaatatgcatctgaagctttaaagaagttcagatttctagtggaacaattgtcaaaggttaatcctagctgtatggatcgcgatcagcggctagccttttggattaacttatacaatgctttgataatgcatgcgtatttggcatacggagtacctcgaaatgacatcaagcttttttctctgatgcaaaaggcttgttacacagttggcggccagtccttcagcgcagcagaaatagagtttgtgattctaaagatgaagactccagttcatcggccccaactttctttgatgttgactctgaataagttcaagattactgaggatcacaagaagtactcaatcgatgaattcgaaccccttcttttgttcggacttagctgtggaatgttctcttctcctgctgtacgcatattctccgctgcaaatgttaggcaggagctccaggaatctctgagagactatattcaggcgactgtcggtacaaatggcaaagggaagctgctgatcccgaagctagtgcagagctacgccaagggagctgtcgaggactctctgctcgcagactggatctgccaccaccttgcacctgatcaagccacggtcatccgggactcttcctcgcagtggaagcagcggctactcggagctcgaagcttcaccgttctcgccttcgactccaagttccggtacctcttcttgccagacagctgtggctcccagagccagaagccagaggcaaagcaatcttacaaacttcctgagccgtgttcagaatcagaatagataataagagctcagtttggtatatttggaccatcatacattcttttgcatagcgggccatgtgattggcagttgtatatgatgtaaattttgaggaagcttgaattgctgtgtttgcaaaaccggatcctctccacggagttggtggcaatttgggggtcgtattggttttcttttgtattcacttgtcttccatactgaagataacattcttttgttgtttttgttttatctgcataccttttcctttttttcccctctccttttctgtaaacctgtatggtcaatttgatctgtaacttctgcacaaataaaggtggtgagcagtctttacttaggtttttctgcacaactgattagggacgaagccagtcggtggggcgagcggggctcgacccccctacctcctatactaa

SEQ ID NO: 49547 - DNA, 225 bp, Zea Mays
gtggttgctctgccagaatggcttcggcagtctgcacaaatggttccctgcaagctctgcaaacgggtccctcttctctctcgggctcccacgaggccacaagtccataacgcctgcacggagcggagccggagccggcgacgacgacgaacggcggcgcctcggtttctccgcggagcattcggccgcagccgctgcaacggcaggtattgtcccactgagttg

SEQ ID NO: 49548 - DNA, 776 bp, Zea Mays
gtggttgctctgccagaatggcttcggcagtctgcacaaatggttccctgcaagctctgcaaacgggtccctcttctctctcgggctcccacgaggccacaagtccataacgcctgcacggagcggagccggagccggcgacgacgacgaacggcggcgcctcggtttctccgcggagcattcggccgcagccgctgcaacgctactctgttgtggccgatttgggtccccaagcagcaatgcagcagcacgatagacttgtctacttgtcgttccatcttcatcagctgttctgttgaccaagatgtggcgctcacgtctgcacgaaccggatccaattcttttgccctcggtctccctcctgctttagttgacctcagatgtcggctgccactttgcagtgtactgtaacctgtatatctacctattgtatttcaaaaaggaataccgcagatcgaagccatgtatttcaaaagtttcttttgtggcatgtatttcaaaagtttataacttgcatatgtgaactccagattgcatatgttaataatttcagttgttaccggacatgtatttcaaaagtttatctttgccatgcttgcttgaaccaagaatacatgtatgtatgtatatatgcatgcgtatgtgaactccagattgcagcacgaagaaagcgtctggtgtgggggtccgcaccactcgccgacacgcgtatcgcgtacggccaggcctgctacgtatgaaatagttcgtaaaaaaacatttccaggttctggttc

SEQ ID NO: 49549 - DNA, 839 bp, Zea Mays
cgattcgatagtgttgttgctatccaaccgacattttgtttcaatttgtgactacgtatcgtggtctttttcatatggaggggatcttattacttgtcgttttcgcagtcttttcatcgctacaagaagaatacaacaagctaccaaagcaaagaagaaaaatacaacaaagtgcctcatcatttgtgtgcattttttgtttaatcgtggccactgtcttcagatgccatagcagaggatgataagttaaggatgttatgaagaaacagaatgagcttcctctgtgcaaggagggagatatgataatggaccaactcaccgagctcaccagtaaaggttgtggttgtctgcttgtggttgatgaagagcatcatttgattgggaccttcactgatggtgatctccggcggacactgaaggcaagcgggccagctatcttcagtctcacagttggagagatgtgcaacaggaacccaaggacaatcactgcggaggcaatggcagttgaagccatggagaagatggaggcaccaccttcacccgtgcagttcttgcctgttgtcaacgagaacaacgtcgtgtgtggaatcatcacattgcatggattggtctctgccggattgtagacttgtgtggcaccattacctgttagctagctgttaccgctggagtatttatgtggagcctgaactcttcagtgtacccttatgtacagtatagtggtcgctaagaggaacatggtacactgcttataatgcttgtgtttttgtacttaattttaaatgccgattgccttggtttctcttgatggatccgggtgtgtggcaggctgagcttac

SEQ ID NO: 49550 - DNA, 392 bp, Zea Mays
aaatcataactacaataccggagaagggtataatcacaattggcctctaataatttttgtcatttgtgcaattgaccacgtttgctgcggacggtgtactatgcgatccgtggtatcaaatagttgcatatgtaaaggttgtaaatgcaaaatttctcttaaacgtgtcgaatgtgttggcacgtcaggcattacagtatgtttgaagggagaaaatcattggaccaccaccacccacaggaatacaggatttgttcgaaaaagaatacgagggaaccactgacctatgcttccttgagtcaattccgcgagttcattactttcccctgtcaaagagagatcgccaacattgcccgggaaaggagaaataacgactacgactcgcttagctc

SEQ ID NO: 49551 - DNA, 3841 bp, Zea Mays
ctctggtctgctacggttgatcacagtcgcgagcggcgagagtgacagtgcgaacaggctcgtcagccaacaggaagcaagtgcacactcccaccccactcccgcgcgccgcgcccgcgaccggggcggcggggccggtggtggtggaggcggcggccatggcggagctgcggcactcgatggcggtgcgctcgtccaactcccccgccaagcgcgattccgacacctccgcggcgtcgtcccccttcctcctgtccccctccacccgcggcagccgcggcggcggcggcggggacgacgacggcaaggacgcccaccgctcgtcccctctcctctcgcatcaccaccacaagcgtgtccacctgctgacgtccccgttccgctccctcctcgcactcgaggaccccaggtcctccgccgcctcgacctcctacaggatcctgcttgttctcctcgcgctccttctcgccgctgtgattttctgcgcgcccttgttctggtcccgcctcaacactccgttcttgtgccacaaggaggggatcacgctccactgccctgagacgaaggaacccccatctctatgggaaaatccacgtgctgccacgatgtcctggaagccctgtgcagagcgatgcagcaatgagccctcagatgtcccatcagtgaatgaaacctctgggtatatttttatccatgccgagggaggactaaaccagcaacgcatagctatatgtaatgctgttgcgattgctaaaataatgagagcaacacttattctacctgttctgaagcaggaccaaatttggaaagaccagtcaaaattcgaagacatctttgatgttgatcattttataaattatttgaaggatgatgtacggattgtccgagatatccctgactggttcacagagaaggatgagctgtttactagtataaagcgtactgtgaagaacatcccaaagtatgcttcagcacagttttatattgataatgtacttccaaggatcaaagagaaaaggataatgtctatcaagccatttgtggacagattggggtatgataatgtaccaacagagattaaccggctgagatgcagagttaactatcatgcattaaagttcctacctgatattgaggaaatggctgttaagcttgctgcaagaatgaggaacaaaactggcagcataaatccatacatggctcttcacctgagatttgaaaaagggatggtggggctttctttctgtgattttgccggcacacgggaggagaaggcaatgatggcggcttataggcagaaagaatggccaaggcgcttcaagaatggatcccatctatggccactggcgctgcagaagagaaaagaagggcggtgccctcttgagcccggtgagatcgctgtgatcctgcgggcactggggtacacgagcggcacacagatatacgtcgcgtccgggcaagtgtacggcggcaagaaccggatggctcccctcaggaacatgttccccaacctggtgacgaaggaggagctagcgagcgcggaggagctggcgccgttccggcggcacgtgacgagcctggcggcgctggacttcctggtgtgcctgcggtcggacgcgttcgtgatgacgcacggcggcaacttcgccaaactcatcatcggggcgcgccgctacgcggggcaccgcctcaagtcggtgaagcccgacaagggcctcatgtccaagtccctgggcgaccccgacatgggctgggcctccttcacggaggacgtcgtcgtcacgcaccgcacgaggacgggcctccccgagcccaccttccccggctacgatctctgggagaacccgctgacaccctgcatgtgcagggcatgagacgggccatccctcagatcagagtggccgtctggccgagtcctcgtcttcgctaggctacgactacgagtagtctcgtgctcacttccatcagcgcgcatttcagcgagcatatgcttctactagttaaacacctagatttgtatgtatttggctggcctaatctgtagtttcacatagatcacttcatgctgaaaatgtcttggacaaggcagtgaatgaagataacatcaccttgcaggcatgacgtgggcgacctgaactcgctagtcgtagagtttctttccacgcggcagctcggcagagctacgcagcctctctgcccgccacgttctcctgcaaggctgcaactcgaagcactgagaagctattaattaatggattctcgagcatgcggccttgttcgctaaacctcgcgcacagaaacacaagcgagtaccagagcagctaggagtggtcagcaatggcgcagcttaaagcagccgccgacgagcagcaggaggcggcgctgcacggcgtcgcctccggcggcgggaacgagagcaacaagaaggcgcgcgcggggctctgcggcctgctccgcgagcgcaaggtggtggacctggcgcgggccaagcggcggctggtggaggttccctacaccgcgacgctggcgcacacggccaacgcgctcctggcagcgcgcgtctctgccgtggccgtggctgcgccaccgggccactggatcggcgccggcggctccatgatcctcgagtccgacccggccaccggcgccgtccgcaagcactacatcggcatggtgaacatgctcgacatccttgcccacatcgccgaggccagcgacgacgacgaggcggccgacctcgaccgccggatggccgtgccggtgtcctccgtcatcggacactccctcgagggcctcactctgtggacgctccacccgagcaccagcgtgctggactgcatggagacgttcagcaagggtgtgcaccgcgcgctggtgccgctggagagctcggcggacaacgtggtggcgctggagctggtggagtcggcgccggggtaccggatgctcacccagatggacgtggtgaggttcctcagggcgcacggcgcggagctcaggggcgtgctgttgcgcaccgtgcgcgagctcggcgccgtgaacgacaccgtgttcgccgtctctggcgttaccaaggtgatcgacgtcatcaaggcgatgcgggcggcgtcgctgaccgccgtgcccgtcgtggacgccgtcggtagcggtacagagacccttcaatacgggagcgggcaaagggcggtcgagacgttctcggcgacggacctgcgggactgcccggtggcgcggctgcaggcttggctggggatcagcgtgatggagttcaagaggaaggtggctgagtaccgcgccagcaccaggcttgtggtccccggcgccgacgccacggacactggcacccctgtcgccgggtacgccgacacccccgcggctgccgccgccactgacgaagagcagagcgagcagcaggagtcggcgctggtgacgtgctcccaggagagcaccctcggcgaggcgatcgaggcggcgacatcgaggcacgtgcaccggctgtgggtggtcgacgaggaagggctcttgcgtggggtcgtgtcgctcaccgacatcctccgggcagtgcgggaggccgcgctcggcgaggacctggagctgcacagcatcgtgccgtgagcccgtgggccgtgagtcgtgacgtccaagaacaagctcgtagctgtttctgcccatagtgtccgtccacctgtcgtgctcctgcagaggagggggaaaagggcgatcgagacgtgttggcgacggccgaccggcgaccgccgccgagctcgttttgccttgttgctttgtttgttatatggccctggctccgatccgggcttcgtatttcgttgacaggccttca

SEQ ID NO: 49552 - DNA, 2023 bp, Zea Mays
cggttgatcacagtcgcgagcggcgagagtgacagtgcgaacaggctcgtcagccaacaggaagcaagtgcacactcccaccccactcccgcgcgccgcgcccgcgaccggggcggcggggccggtggtggtggaggcggcggccatggcggagctgcggcactcgatggcggtgcgctcgtccaactcccccgccaagcgcgattccgacacctccgcggcgtcgtcccccttcctcctgtccccctccacccgcggcagccgcggcggcggcggcggggacgacgacggcaaggacgcccaccgctcgtcccctctcctctcgcatcaccaccacaagcgtgtccacctgctgacgtccccgttccgctccctcctcgcactcgaggaccccaggtcctccgccgcctcgacctcctacaggatcctgcttgttctcctcgcgctccttctcgccgctgtgattttctgcgcgcccttgttctggtcccgcctcaacactccgttcttgtgccacaaggaggggatcacgctccactgccctgagacgaaggaacccccatctctatgggaaaatccacgtgctgccacgatgtcctggaagccctgtgcagagcgatgcagcaatgagccctcagatatgtaatgctgttgcgattgctaaaataatgagagcaacacttattctacctgttctgaagcaggaccaaatttggaaagaccagtcaaaattcgaagacatctttgatgttgatcattttataaattatttgaaggatgatgtacggattgtccgagatatccctgactggttcacagagaaggatgagctgtttactagtataaagcgtactgtgaagaacatcccaaagtatgcttcagcacagttttatattgataatgtacttccaaggatcaaagagaaaaggataatgtctatcaagccatttgtggacagattggggtatgataatgtaccaacagagattaaccggctgagatgcagagttaactatcatgcattaaagttcctacctgatattgaggaaatggctgttaagcttgctgcaagaatgaggaacaaaactggcagcataaatccatacatggctcttcacctgagatttgaaaaagggatggtggggctttctttctgtgattttgccggcacacgggaggagaaggcaatgatggcggcttataggcagaaagaatggccaaggcgcttcaagaatggatcccatctatggccactggcgctgcagaagagaaaagaagggcggtgccctcttgagcccggtgagatcgctgtgatcctgcgggcactggggtacacgagcggcacacagatatacgtcgcgtccgggcaagtgtacggcggcaagaaccggatggctcccctcaggaacatgttccccaacctggtgacgaaggaggagctagcgagcgcggaggagctggcgccgttccggcggcacgtgacgagcctggcggcgctggacttcctggtgtgcctgcggtcggacgcgttcgtgatgacgcacggcggcaacttcgccaaactcatcatcggggcgcgccgctacgcggggcaccgcctcaagtcggtgaagcccgacaagggcctcatgtccaagtccctgggcgaccccgacatgggctgggcctccttcacggaggacgtcgtcgtcacgcaccgcacgaggacgggcctccccgagcccaccttccccggctacgatctctgggagaacccgctgacaccctgcatgtgcagggcatgagacgggccatccctcagatcagagtggccgtctggccgagtcctcgtcttcgctaggctacgactacgagtagtctcgtgctcacttccatcagcgcgcatttcagcgagcatatgcttctactagttaaacacctagatttgtatgtatttggctggcctaatctgtagtttcacatagatcacttcatgctgaaaatgtcttggacaaggcagtgaatgaagataacatcagtaacg

SEQ ID NO: 49553 - DNA, 3832 bp, Zea Mays
cggttgatcacagtcgcgagcggcgagagtgacagtgcgaacaggctcgtcagccaacaggaagcaagtgcacactcccaccccactcccgcgcgccgcgcccgcgaccggggcggcggggccggtggtggtggaggcggcggccatggcggagctgcggcactcgatggcggtgcgctcgtccaactcccccgccaagcgcgattccgacacctccgcggcgtcgtcccccttcctcctgtccccctccacccgcggcagccgcggcggcggcggcggggacgacgacggcaaggacgcccaccgctcgtcccctctcctctcgcatcaccaccacaagcgtgtccacctgctgacgtccccgttccgctccctcctcgcactcgaggaccccaggtcctccgccgcctcgacctcctacaggatcctgcttgttctcctcgcgctccttctcgccgctgtgattttctgcgcgcccttgttctggtcccgcctcaacactccgttcttgtgccacaaggaggggatcacgctccactgccctgagacgaaggaacccccatctctatgggaaaatccacgtgctgccacgatgtcctggaagccctgtgcagagcgatgcagcaatgagccctcagatgtcccatcagtgaatgaaacctctgggtatatttttatccatgccgagggaggactaaaccagcaacgcatagctgtatatatgtaatgctgttgcgattgctaaaataatgagagcaacacttattctacctgttctgaagcaggaccaaatttggaaagaccagtcaaaattcgaagacatctttgatgttgatcattttataaattatttgaaggatgatgtacggattgtccgagatatccctgactggttcacagagaaggatgagctgtttactagtataaagcgtactgtgaagaacatcccaaagtatgcttcagcacagttttatattgataatgtacttccaaggatcaaagagaaaaggataatgtctatcaagccatttgtggacagattggggtatgataatgtaccaacagagattaaccggctgagatgcagagttaactatcatgcattaaagttcctacctgatattgaggaaatggctgttaagcttgctgcaagaatgaggaacaaaactggcagcataaatccatacatggctcttcacctgagatttgaaaaagggatggtggggctttctttctgtgattttgccggcacacgggaggagaaggcaatgatggcggcttataggcagaaagaatggccaaggcgcttcaagaatggatcccatctatggccactggcgctgcagaagagaaaagaagggcggtgccctcttgagcccggtgagatcgctgtgatcctgcgggcactggggtacacgagcggcacacagatatacgtcgcgtccgggcaagtgtacggcggcaagaaccggatggctcccctcaggaacatgttccccaacctggtgacgaaggaggagctagcgagcgcggaggagctggcgccgttccggcggcacgtgacgagcctggcggcgctggacttcctggtgtgcctgcggtcggacgcgttcgtgatgacgcacggcggcaacttcgccaaactcatcatcggggcgcgccgctacgcggggcaccgcctcaagtcggtgaagcccgacaagggcctcatgtccaagtccctgggcgaccccgacatgggctgggcctccttcacggaggacgtcgtcgtcacgcaccgcacgaggacgggcctccccgagcccaccttccccggctacgatctctgggagaacccgctgacaccctgcatgtgcagggcatgagacgggccatccctcagatcagagtggccgtctggccgagtcctcgtcttcgctaggctacgactacgagtagtctcgtgctcacttccatcagcgcgcatttcagcgagcatatgcttctactagttaaacacctagatttgtatgtatttggctggcctaatctgtagtttcacatagatcacttcatgctgaaaatgtcttggacaaggcagtgaatgaagataacatcaccttgcaggcatgacgtgggcgacctgaactcgctagtcgtagagtttctttccacgcggcagctcggcagagctacgcagcctctctgcccgccacgttctcctgcaaggctgcaactcgaagcactgagaagctattaattaatggattctcgagcatgcggccttgttcgctaaacctcgcgcacagaaacacaagcgagtaccagagcagctaggagtggtcagcaatggcgcagcttaaagcagccgccgacgagcagcaggaggcggcgctgcacggcgtcgcctccggcggcgggaacgagagcaacaagaaggcgcgcgcggggctctgcggcctgctccgcgagcgcaaggtggtggacctggcgcgggccaagcggcggctggtggaggttccctacaccgcgacgctggcgcacacggccaacgcgctcctggcagcgcgcgtctctgccgtggccgtggctgcgccaccgggccactggatcggcgccggcggctccatgatcctcgagtccgacccggccaccggcgccgtccgcaagcactacatcggcatggtgaacatgctcgacatccttgcccacatcgccgaggccagcgacgacgacgaggcggccgacctcgaccgccggatggccgtgccggtgtcctccgtcatcggacactccctcgagggcctcactctgtggacgctccacccgagcaccagcgtgctggactgcatggagacgttcagcaagggtgtgcaccgcgcgctggtgccgctggagagctcggcggacaacgtggtggcgctggagctggtggagtcggcgccggggtaccggatgctcacccagatggacgtggtgaggttcctcagggcgcacggcgcggagctcaggggcgtgctgttgcgcaccgtgcgcgagctcggcgccgtgaacgacaccgtgttcgccgtctctggcgttaccaaggtgatcgacgtcatcaaggcgatgcgggcggcgtcgctgaccgccgtgcccgtcgtggacgccgtcggtagcggtacagagacccttcaatacgggagcgggcaaagggcggtcgagacgttctcggcgacggacctgcgggactgcccggtggcgcggctgcaggcttggctggggatcagcgtgatggagttcaagaggaaggtggctgagtaccgcgccagcaccaggcttgtggtccccggcgccgacgccacggacactggcacccctgtcgccgggtacgccgacacccccgcggctgccgccgccactgacgaagagcagagcgagcagcaggagtcggcgctggtgacgtgctcccaggagagcaccctcggcgaggcgatcgaggcggcgacatcgaggcacgtgcaccggctgtgggtggtcgacgaggaagggctcttgcgtggggtcgtgtcgctcaccgacatcctccgggcagtgcgggaggccgcgctcggcgaggacctggagctgcacagcatcgtgccgtgagcccgtgggccgtgagtcgtgacgtccaagaacaagctcgtagctgtttctgcccatagtgtccgtccacctgtcgtgctcctgcagaggagggggaaaagggcgatcgagacgtgttggcgacggccgaccggcgaccgccgccgagctcgttttgccttgttgctttgtttgttatatggccctggctccgatccgggcttcgtatttcgttgacaggccttca

SEQ ID NO: 49554 - DNA, 479 bp, Zea Mays
gtacaagtacaaacaacccgtgcgggcagcgggcggagaaggaagcgaggacgccgcgcgcgggccacgaggcagaggcagaggcagaggcaggtgcatgaccttggccgtcttggcgtggccgtggcggtggtcctcccgctcccgcccgcgccaccccgccgtctccctcccggcccgggccgccgcgtcgcgcgccagcgcgcgcagggcggccagctctggccacctgctgctggtgctctcctcgcgcccgtcgctcatgtcggctgctgctagctgcgccgtagtaggttaggtagctaggccgtagctgtagcactagcacactggttctcttcttgctctgtggccgaaccgcacgtatgccgttgtcagctggaaacctcgccggccgcttatataagcgcgggcgcgggcagtctactagcgtgacgcactgaccgacggcaggcaggcagcacaggtggagtggggtg

SEQ ID NO: 49555 - DNA, 3128 bp, Zea Mays
gtcagacgtgtggatgcctggccgcccgcccgcccacgcatctcaaccgcctcccgacgctttctcttccatgcgcgcgtcttggtcagagacaggcagatgcaggtgcgcgtgcccaagtcaacatttccttctacttctaccattcgccgactccttgtgccatccggcctaacctcttgtgatgctcaaacaaaccccaggccgtctctaaggacaaatctagctagtctggtgcagccaaaaggaatcttcgtgttctacactccacaaagaccacaaaaagtgtcatctttttcttccttttcttggtcgacgaaaggaggaggaggaatgagctcataggaggcaacaagtgatgaggggtttaggattcgtgttgctgttggtggcagctgcagcattgatcaggccatcagaagtagtaggggcagaggaggaggactgggagcttttcttgttgcagtggaggcagcataattctcttccatccccacttctcaatggggatctggtggatagaatatggtcaatttgcttaccagacatggccggtgcacaggaaatattgggcaatccactgcaatttgcttcagatcagctattgagtcagccatcagaaaatgctttgaaggcaatgctgtttctggagtttctgtctcttctttcccctgaaaaattatccagtacctatggttgcatccatgcaaactacttcggtttgggcattccacaagaactcagtgtttcactggcaacctaccttgagagccatcagctgttgcttggttcgaacttctatgcgagacggcatttggctgacaactcaattggagatgctccttccatggctccagattttgcgccgtccatgtcctctggcgatgacgtgaagcttcctcagtctgttacagaaacaccgtatgcaccttccagctcttacaacaatgaaaatccaaaccgacctcatcacagtaaacctgcacagaagcatcggggagtacctccaatttcacttctggagaagcataaagactatgttagattagtcttgatcgtggttctaccaacagcggcattctcgttcattgctgcttttctaattttctactgctgcggatgcaacaagaacaaggtctctgtcggtgagcaacgagatgatcatcctcttcttcacatgcagttggctaatgtacctggttcatcacccgatgcccgtgtttctgccagtcaccttaacaaggataatcgaagtcattctggagtcagcatgagtcggtgcttttcatgctgttttaaaagatccactgatgccacaccatcttcagaagtgattggaggaacaccagagaataatgtcacaagtgatgctcctaaaccgatgtcgcctccagctcctccacctttgccacctccgatcaagaaggctcctcctcccccacctggacctcccagaggttctaaagcaagacttgctcagctgtcacctgttgagtcaagtcgttctgaaggatcatctgccagcgagcagaccagcgaatcatctgaagcagaagttaatgctccaagaaccaagcttcgacctttctattgggacaaagttcttgctaatcctgatcagtcaatggcatggcatgatatcaaattcggttcttttcatgtgaatgaagatatgatagaggaattgtttggttatagtggtggaagcagaaataaccttaaggataaggaactcccctctgcggatcctgcatctcagcacatttctcttctcaatgttaagaaatcatgcaacctggcagttgttttaaaggcaatgaatatcagggtacaagacattcatgacgctcttattgaagggaacgaacttccaagggtgcttcttgagacaatcttgagaatgaaaccaactgacgaggaggaacagaatctcaggctttataacggggatttctcgcagctaggccttgcagaacaagtgatgaaggcattaattgacacgccttttgctttcaagagggttgacatgttgcttttcatgtcctccttgcaagaagatgcttcaagtctcagggattcgttccaccaattggaggccgcttgtggggaactgaagcaccgcctttttctcaagttactagaagccgtgctcaaaactggaaaccgtttgaatgatggaaccttccgtggtggtgctaatgcattcaagcttgacactctcctgaagctatcagatgtcaagggtgctgatggaaagaccacattgctgcactttgttgtgcaggagattgttcggtccgaaggtgtccgcgaagcaaggctagccatggaaaacggaagaagtccagctcatagtgcttcagatgacacttccaatggatctcttgaagaggacggtgatcactactccaaccgcggacttagcattgtgtcaggacttagcagtgagatggacaacgtcaagagggtagccgcactggatgctgagcctctgtttgccactgtggtgaccctcagacaagagttgctgaaatcaagggagttcctgaatgaaattgcgacagtagaagagacgagtggattcagacgttcgttggaaagctttgtggaacacgcggataatgagacggggtttttgttgaaagaagagaagaggttgagatcgttggtgaagaaaacaatccggtatttccatggaaacgactctaaagacgacggtttccggttgtttgtggttgtgagagatttcttggtgatgctagataaggcgtgcaaggaggtcggggcatcacagaagggtacgaataaatcacgaagcagtggcagtggcagtggcaatggcaatggcaaccctacgttcccgtcaatcctacaggagcaacagttccctgctgttattgatggccattcagatagttcacatactagcaattgacgatgagatactaacctttttttgtaaagaaaaaaaaatccgttttggagaggaaatacattttagcatacatgtagatttacatacgtatcatcctacgggatctttttatttttaatattttaatcaatattttaataataaccgtggacaggttatttctaactcattgtttaatcacgatatataaaat

SEQ ID NO: 49556 - DNA, 2668 bp, Zea Mays
ctcaaccgcctcccgacgctttctcttccatgcgcgcgtcttggtcagagacaggtggatagaatatggtcaatttgcttaccagacatggccggtgcacaggaaatattgggcaatccactgcaatttgcttcagatcagctattgagtcagccatcagaaaatgctttgaaggcaatgctgtttctggagtttctgtctcttctttcccctgaaaaattatccagtacctatggttgcatccatgcaaactacttcggtttgggcattccacaagaactcagtgtttcactggcaacctaccttgagagccatcagctgttgcttggttcgaacttctatgcgagacggcatttggctgacaactcaattggagatgctccttccatggctccagattttgcgccgtccatgtcctctggcgatgacgtgaagcttcctcagtctgttacagaaacaccgtatgcaccttccagctcttacaacaatgaaaatccaaaccgacctcatcacagtaaacctgcacagaagcatcggggagtacctccaatttcacttctggagaagcataaagactatgttagattagtcttgatcgtggttctaccaacagcggcattctcgttcattgctgcttttctaattttctactgctgcggatgcaacaagaacaaggtctctgtcggtgagcaacgagatgatcatcctcttcttcacatgcagttggctaatgtacctggttcatcacccgatgcccgtgtttctgccagtcaccttaacaaggataatcgaagtcattctggagtcagcatgagtcggtgcttttcatgctgttttaaaagatccactgatgccacaccatcttcagaagtgattggaggaacaccagagaataatgtcacaagtgatgctcctaaaccgatgtcgcctccagctcctccacctttgccacctccgatcaagaaggctcctcctcccccacctggacctcccagaggttctaaagcaagacttgctcagctgtcacctgttgagtcaagtcgttctgaaggatcatctgccagcgagcagaccagcgaatcatctgaagcagaagttaatgctccaagaaccaagcttcgacctttctattgggacaaagttcttgctaatcctgatcagtcaatggcatggcatgatatcaaattcggttcttttcatgtgaatgaagatatgatagaggaattgtttggttatagtggtggaagcagaaataaccttaaggataaggaactcccctctgcggatcctgcatctcagcacatttctcttctcaatgttaagaaatcatgcaacctggcagttgttttaaaggcaatgaatatcagggtacaagacattcatgacgctcttattgaagggaacgaacttccaagggtgcttcttgagacaatcttgagaatgaaaccaactgacgaggaggaacagaatctcaggctttataacggggatttctcgcagctaggccttgcagaacaagtgatgaaggcattaattgacacgccttttgctttcaagagggttgacatgttgcttttcatgtcctccttgcaagaagatgcttcaagtctcagggattcgttccaccaattggaggccgcttgtggggaactgaagcaccgcctttttctcaagttactagaagccgtgctcaaaactggaaaccgtttgaatgatggaaccttccgtggtggtgctaatgcattcaagcttgacactctcctgaagctatcagatgtcaagggtgctgatggaaagaccacattgctgcactttgttgtgcaggagattgttcggtccgaaggtgtccgcgaagcaaggctagccatggaaaacggaagaagtccagctcatagtgcttcagatgacacttccaatggatctcttgaagaggacggtgatcactactccaaccgcggacttagcattgtgtcaggacttagcagtgagatggacaacgtcaagagggtagccgcactggatgctgagcctctgtttgccactgtggtgaccctcagacaagagttgctgaaatcaagggagttcctgaatgaaattgcgacagtagaagagacgagtggattcagacgttcgttggaaagctttgtggaacacgcggataatgagacggggtttttgttgaaagaagagaagaggttgagatcgttggtgaagaaaacaatccggtatttccatggaaacgactctaaagacgacggtttccggttgtttgtggttgtgagagatttcttggtgatgctagataaggcgtgcaaggaggtcggggcatcacagaagggtacgaataaatcacgaagcagtggcagtggcagtggcaatggcaatggcaaccctacgttcccgtcaatcctacaggagcaacagttccctgctgttattgatggccattcagatagttcacatactagcaattgacgatgagatactaacctttttttgtaaagaaaaaaaaatccgttttggagaggaaatacattttagcatacatgtagatttacatacgtatcatcctacgggatctttttatttttaatattttaatcaatattttaataataaccgtggacaggttatttctaactcattgtttaatcacgatatataaaat

SEQ ID NO: 49557 - DNA, 2637 bp, Zea Mays
gtttgtttttccctgtattctgggtggatagaatatggtcaatttgcttaccagacatggccggtgcacaggaaatattgggcaatccactgcaatttgcttcagatcagctattgagtcagccatcagaaaatgctttgaaggcaatgctgtttctggagtttctgtctcttctttcccctgaaaaattatccagtacctatggttgcatccatgcaaactacttcggtttgggcattccacaagaactcagtgtttcactggcaacctaccttgagagccatcagctgttgcttggttcgaacttctatgcgagacggcatttggctgacaactcaattggagatgctccttccatggctccagattttgcgccgtccatgtcctctggcgatgacgtgaagcttcctcagtctgttacagaaacaccgtatgcaccttccagctcttacaacaatgaaaatccaaaccgacctcatcacagtaaacctgcacagaagcatcggggagtacctccaatttcacttctggagaagcataaagactatgttagattagtcttgatcgtggttctaccaacagcggcattctcgttcattgctgcttttctaattttctactgctgcggatgcaacaagaacaaggtctctgtcggtgagcaacgagatgatcatcctcttcttcacatgcagttggctaatgtacctggttcatcacccgatgcccgtgtttctgccagtcaccttaacaaggataatcgaagtcattctggagtcagcatgagtcggtgcttttcatgctgttttaaaagatccactgatgccacaccatcttcagaagtgattggaggaacaccagagaataatgtcacaagtgatgctcctaaaccgatgtcgcctccagctcctccacctttgccacctccgatcaagaaggctcctcctcccccacctggacctcccagaggttctaaagcaagacttgctcagctgtcacctgttgagtcaagtcgttctgaaggatcatctgccagcgagcagaccagcgaatcatctgaagcagaagttaatgctccaagaaccaagcttcgacctttctattgggacaaagttcttgctaatcctgatcagtcaatggcatggcatgatatcaaattcggttcttttcatgtgaatgaagatatgatagaggaattgtttggttatagtggtggaagcagaaataaccttaaggataaggaactcccctctgcggatcctgcatctcagcacatttctcttctcaatgttaagaaatcatgcaacctggcagttgttttaaaggcaatgaatatcagggtacaagacattcatgacgctcttattgaagggaacgaacttccaagggtgcttcttgagacaatcttgagaatgaaaccaactgacgaggaggaacagaatctcaggctttataacggggatttctcgcagctaggccttgcagaacaagtgatgaaggcattaattgacacgccttttgctttcaagagggttgacatgttgcttttcatgtcctccttgcaagaagatgcttcaagtctcagggattcgttccaccaattggaggccgcttgtggggaactgaagcaccgcctttttctcaagttactagaagccgtgctcaaaactggaaaccgtttgaatgatggaaccttccgtggtggtgctaatgcattcaagcttgacactctcctgaagctatcagatgtcaagggtgctgatggaaagaccacattgctgcactttgttgtgcaggagattgttcggtccgaaggtgtccgcgaagcaaggctagccatggaaaacggaagaagtccagctcatagtgcttcagatgacacttccaatggatctcttgaagaggacggtgatcactactccaaccgcggacttagcattgtgtcaggacttagcagtgagatggacaacgtcaagagggtagccgcactggatgctgagcctctgtttgccactgtggtgaccctcagacaagagttgctgaaatcaagggagttcctgaatgaaattgcgacagtagaagagacgagtggattcagacgttcgttggaaagctttgtggaacacgcggataatgagacggggtttttgttgaaagaagagaagaggttgagatcgttggtgaagaaaacaatccggtatttccatggaaacgactctaaagacgacggtttccggttgtttgtggttgtgagagatttcttggtgatgctagataaggcgtgcaaggaggtcggggcatcacagaagggtacgaataaatcacgaagcagtggcagtggcagtggcaatggcaatggcaaccctacgttcccgtcaatcctacaggagcaacagttccctgctgttattgatggccattcagatagttcacatactagcaattgacgatgagatactaacctttttttgtaaagaaaaaaaaatccgttttggagaggaaatacattttagcatacatgtagatttacatacgtatcatcctacgggatctttttatttttaatattttaatcaatattttaataataaccgtggacaggttatttctaactcattgtttaatcacgatatataaaat

SEQ ID NO: 49558 - DNA, 379 bp, Zea Mays
ctacgctcaacggaaaccgagatttcctggccgccattcttgcgccagtctttggggaaggcacgacctctaccacttttccccgaccttcggtgtatataggcgccgtcagcatgtttgtatcgccacggcgcagctcgacgggagataaccaactgagtgcccctcttgccgtcccaccattttcgtggctcgccggtgttctaaccttgaagctcggccgcctggaatcgacttggcgcgcggagtgtggaggccccggttgcgcgcgcctagggagcctcagcggcggccaatttctcaatcccccgctggtgccaccatcccgcgcgaagaacgacacccaccctgacacgaagccgaagagcctgtgactgag

SEQ ID NO: 49559 - DNA, 673 bp, Zea Mays
cctctaaccctctcactcttccctcccgcgtgtatttccgctaacatactctactctgtagcaggcaccaccaccgcgcgctcatggaccctgacccacgaccgccggcagcggcagcggcagcgcaggtgcggctcctcctcatggccatcgcggccgtcgcctgcatcaacgccgccgagccccacctcgccttggcagccttcgtcctttggctcgtcgccatctttcccccgctccaccgccacgactgaggcagccgcagcgtgaaggaggaccacacacaggaggttgcgcggcggcggcggcgacgctgccctggcgggggtggtggtttggaggcagcaggtgcccgcgtgtagggaggggggtgttgcctcggcgggtctcgcatctcaacgtcgtggtttgtggagatttacggaggcgagatttgcggaggcggctgaggcccggctggacgggtgcgagggagaggctgtcgcgggtggtggcaggggcatgcaagatttgtgaaggcggggcatgtatactaatgtggatgtctatgttgtgttcttgtagagtagtatatatataaatagatattaatatatttattaaaatataattattgtttatttatgaccactaacgtggtctagtggttagccctaaatttatagagaagggg

SEQ ID NO: 49560 - DNA, 498 bp, Zea Mays
cttgatcttattaagactcggatcaagaaaactgtcattttttaaaactttaacacatacatccattcatgtctgcaaatcatgtgcttggatggctttgctaaatgcaactaaacccgacaatgaccaaattgagaacaacatagattttttgtcttcttcgaagccagttctgataattacaggagacgatgttagaagacacaatcagccctgcaaatgatttggtcatggacaaccctcaaaaagttcaatacaaagacaataatgatatggcacactaagaaataggaagcattggtcccatcagtactccattcattcaaaagaagacaaaccaacaattctccttaagacttgggcaaatccagacaagattgtgacataattcaatcagttgcgggtaatctggtttaccatttcgctagtgctggatagacaccaatatatgccgtagtaactgatgcaattagctaagctgcaacatcaaaagttgac

SEQ ID NO: 49561 - DNA, 2450 bp, Zea Mays
caaagcacacgcacaccaaactaccaaaccaacagagcaacatcaatgcgccttccgccgccatcaaccaccgcggccgcagccgctgccaccgtcggggccgtactcgccgcagtcgccctccgccgctacctgtccgcttctcgccaccgcgaacccgcccgcgtgcccatgtccgcggccgccggagccaccacgcttgtggtgtacggcaaatcggcgcaggagcaggagctgctggcctccgcggccggttccgtcgtcctcggtgagggcgatccgtccggtgatgtcgccatcgcgctcgcctacgagagcgcgggcttcgacgccgccgcgtacatgagcgcgctccgggcgcgccggttcgggaggtggatgctctggacgcccaggattggttccacgcaggatctcatcacgcggaactttgcaaagctaccggtgggcgttgtgtgcgttgccgacgtgcagttcaaagggagaggccgttcaaagaatgtgtgggaatcgccaccaggctgtctcatgttctctttcacatcacagatgcaggatgcacggaagttgccccttatgcaatatgttgtctgcctttcgataactgaagctatcaaggagctgtgccgtgccaagggactaccagaacttgatgtgagaataaaatggcctaatgatctctatctgaaaggattaaaagttggtggcattctatgtacctcatcttatgaacccaaagtgtacaatatttgtactggtgttggtttgaatgttgacaatgagaagcctaccacatgcttgaatgctgcacttcaagaggcaaatcatacatcacccatattgaaacgagaagacatattggcatacttcttcaataaatttgaaaaccttttcgagatcttcatgaaccatggatttcaggttcttgaggagcaatactataactcatggcttcatagtggccagagagttgtcgtacatgatgcacatgaaaacaagtcaggcagtgtcgtcaccatccaggggttaacaccaactgggtacttacatgctattggtgaggataacaaaagctatgagttgcacccagatggcaacagctttgatttcttcactggattggtgaggaggaagatggaagcttagggtatcaatacaatgggatacatggatagattcaacagactgtacaaatgaatggaatgagaacatgatttaagcatcagccccctccatctgtattcaaaccttgtgcttggaataaatagaaggaatgctcttatcacaatcctgaacggccgctttgagacctcaaaccttaacaagtgccccaccctcgcaattccatttgcgacagctcagcataaacaattaagaagacaatcaaccgtgactgaagcccaggcatgagttcagatctcaggtgaagaaatcgcagtgactgaagaccgtttacttgaatgattcatatttcataggaagaatgcatgaaaattatgaagcacatctgctccattgatgggcggacagcttcttcggcagtgtttggggctcatgtttgcatcagtggcgagcttcttgtttcaattctggaaaatgccagccctgatgatgcagttctgaaatcaaatgctgtaaataaggctgtcgagagggtttataatggtgaacaggttgcacatactatcacttgctaagacttaccaacaaatagatgccagagcaaagggcagatttgatggtgtggccccagaaccacggaaagggtaataagtgggcatataacaggaagcatctgtgttccattccctgagatgttcaatggtgcaccaagccttctgtctgcagatgagctgcggcagaagtttcagcaagcaggcaggtctccattctgttgcaacttgcaactcattttaataatcagaaacaagtaatttgttgtgttcttggcaagaacgaaagcaagaatttttccaaagtacaaatacgagaagcagaggaagaagaagaatactgataatttaacatttcagatctttgagaaattgagtatttctcacagatatattatacatgtacataaattctgaaaagtttgccaagcaataacaatatggtgtgtttggtgtttcttcaggaatttccctagacaaacccattgatgtcacttgcggatctggcatgactgcctaaattatgatggatcttggacagaatgggaagcacaattagattccaattacccaagttaccgctccttcttgttaaactcaccagtcaccagctctgaaaaaattaatgcagtttgagaatcttggaccattcagtttagattgtcagcaagataacattatgctgtaacaagctttgcactaaataacagcgaatattgtatggaccagaaatttgctatatgttttatgttgtcctgacacaaaaagagatgaaag

SEQ ID NO: 49562 - DNA, 1700 bp, Zea Mays
aaagcacacgcacaccaaactaccaaaccaacagagcaacatcaatgcgccttccgccgccatcaaccaccgcggccgcagccgctgccaccgtcggggccgtactcgccgcagtcgccctccgccgctacctgtccgcttctcgccaccgcgaacccgcccgcgtgcccatgtccgcggccgccggagccaccacgcttgtggtgtacggcaaatcggcgcaggagcaggagctgctggcctccgcggccggttccgtcgtcctcggtgagggcgatccgtccggtgatgtcgccatcgcgctcgcctacgagagcgcgggcttcgacgccgccgcgtacatgagcgcgctccgggcgcgccggttcgggaggtggatgctctggacgcccaggattggttccacgcaggatctcatcacgcggaactttgcaaagctaccggtgggcgttgtgtgcgttgccgacgtgcagttcaaagggagaggccgttcaaagaatgtgtgggaatcgccaccaggctgtctcatgttctctttcacatcacagatgcaggatgcacggaagttgccccttatgcaatatgttgtctgcctttcgataactgaagctatcaaggagctgtgccgtgccaagaacttgatgtgagaataaaatggcctaatgatctctatctgaaaggattaaaagttggtggcattctatgtacctcatcttatgaacccaaagtgtacaatatttgtactggtgttggtttgaatgttgacaatgagaagcctaccacatgcttgaatgctgcacttcaagaggcaaatcatacatcacccatattgaaacgagaagacatattggcatacttcttcaataaatttgaaaaccttttcgagatcttcatgaaccatggatttcaggttcttgaggagcaatactataactcatggcttcatagtggccagagagttgtcgtacatgatgcacatgaaaacaagtcaggcagtgtcgtcaccatccaggggttaacaccaactgggtacttacatgctattggtgaggataacaaaagctatgagttgcacccagatggcaacagctttgatttcttcactggattggtgaggaggaagatggaagcttagggtatcaatacaatgggatacatggatagattcaacagactgtacaaatgaatggaatgagaacatgatttaagcatcagccccctccatctgtattcaaaccttgtgcttggaataaatagaaggaatgctcttatcacaatcctgaacggccgctttgagacctcaaaccttaacaagtgccccaccctcgcaattccatttgcgacagctcagcataaacaattaagaagacaatcaaccgtgactgaagcccaggcatgagttcagatctcaggtgaagaaatcgcagtgactgaagaccgtttacttgaatgattcatatttcataggaagaatgcatgaaaattatgaagcacatctgctccattgatgggcggacagcttcttcggcagtgtttggggctcatgtttgcatcaggttctgtataactgcagtgttttttctattagtgaactaagttggaaatctgctgcaactgcaagatttgtagcggtgatgtatgagttggtaacttgtatttgcacagatgcttaactgaaaggacatgttatatattatcca

SEQ ID NO: 49563 - DNA, 1648 bp, Zea Mays
aaagcacacgcacaccaaactaccaaaccaacagagcaacatcaatgcgccttccgccgccatcaaccaccgcggccgcagccgctgccaccgtcggggccgtactcgccgcagtcgccctccgccgctacctgtccgcttctcgccaccgcgaacccgcccgcgtgcccatgtccgcggccgccggagccaccacgcttgtggtgtacggcaaatcggcgcaggagcaggagctgctggcctccgcggccggttccgtcgtcctcggtgagggcgatccgtccggtgatgtcgccatcgcgctcgcctacgagagcgcgggcttcgacgccgccgcgtacatgagcgcgctccgggcgcgccggttcgggaggtggatgctctggacgcccaggattggttccacgcaggatctcatcacgcggaactttgcaaagctaccggtgggcgttgtgtgcgttgccgacgtgcagttcaaagggagagatgcaggatgcacggaagttgccccttatgcaatatgttgtctgcctttcgataactgaagctatcaaggagctgtgccgtgccaagggactaccagaacttgatgtgagaataaaatggcctaatgatctctatctgaaaggattaaaagttggtggcattctatgtacctcatcttatgaacccaaagtgtacaatatttgtactggtgttggtttgaatgttgacaatgagaagcctaccacatgcttgaatgctgcacttcaagaggcaaatcatacatcacccatattgaaacgagaagacatattggcatacttcttcaataaatttgaaaaccttttcgagatcttcatgaaccatggatttcaggttcttgaggagcaatactataactcatggcttcatagtggccagagagttgtcgtacatgatgcacatgaaaacaagtcaggcagtgtcgtcaccatccaggggttaacaccaactgggtacttacatgctattggtgaggataacaaaagctatgagttgcacccagatggcaacagctttgatttcttcactggattggtgaggaggaagatggaagcttagggtatcaatacaatgggatacatggatagattcaacagactgtacaaatgaatggaatgagaacatgatttaagcatcagccccctccatctgtattcaaaccttgtgcttggaataaatagaaggaatgctcttatcacaatcctgaacggccgctttgagacctcaaaccttaacaagtgccccaccctcgcaattccatttgcgacagctcagcataaacaattaagaagacaatcaaccgtgactgaagcccaggcatgagttcagatctcaggtgaagaaatcgcagtgactgaagaccgtttacttgaatgattcatatttcataggaagaatgcatgaaaattatgaagcacatctgctccattgatgggcggacagcttcttcggcagtgtttggggctcatgtttgcatcaggttctgtataactgcagtgttttttctattagtgaactaagttggaaatctgctgcaactgcaagatttgtagcggtgatgtatgagttggtaacttgtatttgcacagatgcttaactgaaaggacatgttatatattatcca

SEQ ID NO: 49564 - DNA, 1622 bp, Zea Mays
cgaacatccgcgactgcggtggtgccccgcacgccctccagccagccccgcaccccgtaacgcactcggctctcaccgccgcacaaattccgcctcctccaagcattttcaaattctctttcttctttctcctcccaataaacacacccacccggtcgctccgctccaccgttccgccctcgaccgcgcgcggagcctcctcaacccttcagacctccgcctcccaccgcttccgtagcctcgcctcgcctcgcctcgcctcgtccttctcctccgtcccaaccatgagggagatcctgcacatccagggcgggcagtgcgggaaccagatcggtgccaagttctgggaggtgatctgcgacgagcacggcatcgaccacacgggcaagtacgccggcgactccgacctccagctcgagcgcatcaacgtctactacaatgaggccggcgggggccggttcgtcccgcgcgccgtgctcatggacctcgagcccggcaccatggactccgtgcgctccggcccctacggccagatcttccgccccgacaacttcgtcttcggccagtccggcgccggcaacaactgggccaagggccactacaccgagggcgccgagctcatcgactccgtgcttgacgtcgtccgcaaggaggccgagaactgcgactgcctccaaggatttcaggtttgccattcattgggtggaggtactggctcagggatgggcaccctgctcatctccaaaatcagggaagagtacccagataggatgatgctgacgttctcagtttttccatcacccaaggtgtctgatactgtggtagaaccttacaatgccacgctctcagttcatcaacttgttgagaatgctgatgagtgtatggtcctcgacaacgaagctctctacgacatctgcttccgcactctgaagcttgctacacccacttgccagctgaactcggacctccggaagcttgcggtcaacctgatccccttcccccgcctccatttcttcatgatgtgggacgcgaagaacatgatgtgcgcggctgacccgcggcacgggcgctacctgacggcgtcggccatgttccgcgggaagatgagcaccaaggaggtggacgagcagatgctgaacgtgcagaacaagaactcgtcctacttcgtggagtggatcccgaacaacgtgaagtcgagcgtgtgcgacatcccccccacgggcctggcgatggcgtccacgttcgtcggcaactccacctcgatccaggagatgttccggcgcgtcagcgagcagttcacggccatgttccggcgcaaggccttcctgcactggtacaccggggagggcatggacgagatggagttcaccgaggccgagagcaacatgaacgacctggtggccgagtaccagcagtaccaggacgcgacggcggaagaggaggaggagtacaaggagggagatgaggtggctgcctgatccaccggcacattgtggggttgtgcacattgtggggttgtgttattattgttgctcttcatctggtgtttaaaatgttactgtgatgctgctgcgaaactgacgtaagttttaactgtggaattgattacttctagatcgtgg

SEQ ID NO: 49565 - DNA, 1404 bp, Zea Mays
atgagggagatcctgcacatccagggcgggcagtgcgggaaccagatcggtgccaagttctgggaggtgatctgcgacgagcacggcatcgaccacacgggcaagtacgccggcgactccgacctccagctcgagcgcatcaacgtctactacaatgaggccggcgggggccggttcgtcccgcgcgccgtgctcatggacctcgagcccggcaccatggactccgtgcgctccggcccctacggccagatcttccgccccgacaacttcgtcttcggccagtccggcgccggcaacaactgggccaagggccactacaccgagggcgccgagctcatcgactccgtgcttgacgtcgtccgcaaggaggccgagaactgcgactgcctccaaggatttcaggtttgccattcattgggtggaggtactggctcagggatgggcaccctgctcatctccaaaatcagggaagagtacccagataggatgatgctgacgttctcagtttttccatcacccaaggtgtctgatactgtggtagaaccttacaatgccacgctctcagttcatcaacttgttgagaatgctgatgagtgtatggtcctcgacaacgaagctctctacgacatctgcttccgcactctgaagcttgctacacccactttcggtgacctgaaccatctcatctctgcaaccatgagtggtgttacctgctgcctgcggttcccaggccagctgaactcggacctccggaagcttgcggtcaacctgatccccttcccccgcctccatttcttcatgatgtgggacgcgaagaacatgatgtgcgcggctgacccgcggcacgggcgctacctgacggcgtcggccatgttccgcgggaagatgagcaccaaggaggtggacgagcagatgctgaacgtgcagaacaagaactcgtcctacttcgtggagtggatcccgaacaacgtgaagtcgagcgtgtgcgacatcccccccacgggcctggcgatggcgtccacgttcgtcggcaactccacctcgatccaggagatgttccggcgcgtcagcgagcagttcacggccatgttccggcgcaaggccttcctgcactggtacaccggggagggcatggacgagatggagttcaccgaggccgagagcaacatgaacgacctggtggccgagtaccagcagtaccaggacgcgacggcggaagaggaggaggagtacaaggagggagatgaggtggctgcctgatccaccggcacattgtggggttgtgcacattgtggggttgtgttattattgttgctcttcatctggtgtttaaaatgttactgtgatgctgctgcgaaactgacgtaagttttaactgtggaattgattacttctagatcgtgg

SEQ ID NO: 49566 - DNA, 1915 bp, Zea Mays
aaattcctttcccaaaacctcctttcccccaccccttcgcacaggcgacggacgactcggctaccgccgctgccgctacgccagcttcccagcgacttctgtatcaaggagcattcagaggtctgcttggaatcttcggaggtcaaattagatacgctacaacttctgaccggagaatataatttccaggagaaactgagttacaacataaaaagggtaatggtataagtgctgaaatcccaggaaatctagctgaagagaaaggatctatcatcgaagaaaatgaaatatatgagatcagtagattcacaatatcttcagcaagacaaatgttcaaacctgttcatatagacaaaatgatccacttcacatatcacacaattattaaggcatcacttgattctccgtcaacatttcctagatatgtctatcatctgactccattgcatcaaatcgaatcctatattcaaaagaatgaatacttccttgatgtgctcggagttatcactcaagtgagtgcattaaaaccagttcggacacagacccgggaaagctcaaatgtcataaaagagatcatcataaaagatatcaatgatgtcacaatgagactaaccctatgggcagaacgagctaaagcttttaaattagatgatgtttacaatcctctagagcaaaagccaatcgtcacactctttgtaggttgtttagccaaaaatttccaaggtgcatacttaaatggtggaacaacatgtagatggtatttcaatcctgatattaaggaagccgctccttattatcaaaggtttggatctcaaaaagtaaaactacaaataccatcagagcaggaacaacaactatctgttgcaaaagaaacacatgtagaacacaaaaccttgcatgagcttcttgcgttggatccatatgcatttccgaaacaaggatatgaatgcacagttacaatcatagaagtacctacaacaaatcgttggtggtttccagcttgcaccaaatgcagtcgagcatgtagaccacaagatggtggttactattgctcctactgtaaatcagaagcgtacacactaagatataaattaacattcatgggatcagatgcaacagcaacagcgcaaatgttttgctttgatactgtagcacgacatatagttggcagaccatgtgaaacggttctgaaacaagccactgaagcaacaccaatacctccagatctagcacaaatagtatccttaaagtttacatttcgtgttacagcatcaaaccaaacattcgctcaacgagagaagcaacccactgtgttacaaataaattctatagttgtacatggaagacaacactatctaccatcaggaattcaaaacaccatagatcaaggtccatcaacaccaaacaaagaagctacactcaaattattagaagaatcaccttctattgctatggaaaggttatcaacaaaagtatccaaagatgttggcagaaaactcacatattcaacacaggacaaagacatcatagggtctcaagtcttggatgtagcacaaggaactaatgcagataagggaatccccactgataaaggcaaagagatcgaacctcatcttcaatctcctccaaaaaggcacaaacaaggaccgctgacaatcaaagagtagacaagaccaaggcaccaccaagaatgatatgtgcaaccacatggaactaattcaaaaatggctactgtctttattctgtgcaagctagccacccttttgcaactttataaatgtagtactgacatgccacaaacagttcatatggctagctcattttccttttgaatgactgccttttttacaaaaggcataaatattgtataattaatattcggatcacactaaatgcttaatgctttaaacattat

SEQ ID NO: 49567 - DNA, 2007 bp, Zea Mays
cccaaaacctcctttcccccaccccttcgcacaggcgacggacgactcggctaccgccgctgccgctacgccagcttcccagcgacttctgtatcaaggagcattcagaggtctgcttggaatcttcggaggtcaaattagatacgctacaacttctgaccggagaatataatttccaggagaaactgagttacaacataaaaagggtaatggtataagtgctgaaatcccaggaaatctagctgaagagaaaggatctatcatcgaagaaaatgaaatatatgagatcagtagattcacaatatcttcagcaagacaaatgttcaaacctgttcatatagacaaaatgatccacttcacatatcacacaattattaaggcatcacttgattctccgtcaacatttcctagatatgtctatcatctgactccattgcatcaaatcgaatcctatattcaaaagaatgaatacttccttgatgtgctcggagttatcactcaagtgagtgcattaaaaccagttcggacacagacccgggaaagctcaaatgtcataaaagagatcatcataaaagatatcaatgatgtcacaatgagactaaccctatgggcagaacgagctaaagcttttaaattagatgatgtttacaatcctctagagcaaaagccaatcgtcacactctttgtaggttgtttagccaaaaatttccaaggtgcatacttaaatggtggaacaacatgtagatggtatttcaatcctgatattaaggaagccgctccttattatcaaaggtttggatctcaaaaagtaaaactacaaataccatcagagcaggaacaacaactatctgttgcaaaagaaacacatgtagaacacaaaaccttgcatgagcttcttgcgttggatccatatgcatttccgaaacaaggatatgaatgcacagttacaatcatagaagtacctacaacaaatcgttggtggtttccagcttgcaccaaatgcagtcgagcatgtagaccacaagatggtggttactattgctcctactgtaaatcagaagcgtacacactaagatataaattaacattcatgggatcagatgcaacagcaacagcgcaaatgttttgctttgatactgtagcacgacatatagttggcagaccatgtgaaacggttctgaaacaagccactgaagcaacaccaatacctccagatctagcacaaatagtatccttaaagtttacatttcgtgttacagcatcaaaccaaacattcgctcaacgagagaagcaacccactgtgttacaaataaattctatagttgtacatggaagacaacactatctaccatcaggaattcaaaacaccatagatcaaggtccatcaacaccaaacaaagaagctacactcaaattattagaagaatcaccttctattgctatggaaaggttatcaacaaaagtatccaaagatgttggcagaaaactcacatattcaacacaggacaaagacatcatagggtctcaagtcttggatgtagcacaaggaactaatgcagataagggaatccccactgataaaggcaaagagatcgaacctcatcttcaatctcctccaaaaaggtctcaagtcttggatgtagcacaaggaactaatgcagataagggaatccccactgataaaggcaaagagatcgaacctcatcttcaatctcctccaaaaaggcacaaacaaggaccgctgacaatcaaagagtagacaagaccaaggcaccaccaagaatgatatgtgcaaccacatggaactaattcaaaaatggctactgtctttattctgtgcaagctagccacccttttgcaactttataaatgtagtactgacatgccacaaacagttcatatggctagctcattttccttttgaatgactgccttttttacaaaaggcataaatattgtataattaatattcggatcacactaaatgcttaatgctttaaacattat

SEQ ID NO: 49568 - DNA, 1698 bp, Zea Mays
atggagttcacgcttatcccaaatttagtaccacaaaatagacatgctgttataaaaggtaatggtataagtgctgaaatcccaggaaatctagctgaagagaaaggatctatcatcgaagaaaatgaaatatatgagatcagtagattcacaatatcttcagcaagacaaatgttcaaacctgttcatatagacaaaatgatccacttcacatatcacacaattattaaggcatcacttgattctccgtcaacatttcctagatatgtctatcatctgactccattgcatcaaatcgaatcctatattcaaaagaatgaatacttccttgatgtgctcggagttatcactcaagtgagtgcattaaaaccagttcggacacagacccgggaaagctcaaatgtcataaaagagatcatcataaaagatatcaatgatgtcacaatgagactaaccctatgggcagaacgagctaaagcttttaaattagatgatgtttacaatcctctagagcaaaagccaatcgtcacactctttgtaggttgtttagccaaaaatttccaaggtgcatacttaaatggtggaacaacatgtagatggtatttcaatcctgatattaaggaagccgctccttattatcaaaggtttggatctcaaaaagtaaaactacaaataccatcagagcaggaacaacaactatctgttgcaaaagaaacacatgtagaacacaaaaccttgcatgagcttcttgcgttggatccatatgcatttccgaaacaaggatatgaatgcacagttacaatcatagaagtacctacaacaaatcgttggtggtttccagcttgcaccaaatgcagtcgagcatgtagaccacaagatggtggttactattgctcctactgtaaatcagaagcgtacacactaagatataaattaacattcatgggatcagatgcaacagcaacagcgcaaatgttttgctttgatactgtagcacgacatatagttggcagaccatgtgaaacggttctgaaacaagccactgaagcaacaccaatacctccagatctagcacaaatagtatccttaaagtttacatttcgtgttacagcatcaaaccaaacattcgctcaacgagagaagcaacccactgtgttacaaataaattctatagttgtacatggaagacaacactatctaccatcaggaattcaaaacaccatagatcaaggtccatcaacaccaaacaaagaagctacactcaaattattagaagaatcaccttctattgctatggaaaggttatcaacaaaagtatccaaagatgttggcagaaaactcacatattcaacacaggacaaagacatcatagggtctcaagtcttggatgtagcacaaggaactaatgcagataagggaatccccactgataaaggcaaagagatcgaacctcatcttcaatctcctccaaaaaggtctcaagtcttggatgtagcacaaggaactaatgcagataagggaatccccactgataaaggcaaagagatcgaacctcatcttcaatctcctccaaaaagccccgactccaagaagttggcggtcgcatccggcgtatcgaggtcggtgctcttcctgctcgtcgacgtcgctgtcaaagctgttgagtccgagatcacttgttttctgtattccaaatga

SEQ ID NO: 49569 - DNA, 1596 bp, Zea Mays
atggagttcacgcttatcccaaatttagtaccacaaaatagacatgctgttataaaaggtaatggtataagtgctgaaatcccaggaaatctagctgaagagaaaggatctatcatcgaagaaaatgaaatatatgagatcagtagattcacaatatcttcagcaagacaaatgttcaaacctgttcatatagacaaaatgatccacttcacatatcacacaattattaaggcatcacttgattctccgtcaacatttcctagatatgtctatcatctgactccattgcatcaaatcgaatcctatattcaaaagaatgaatacttccttgatgtgctcggagttatcactcaagtgagtgcattaaaaccagttcggacacagacccgggaaagctcaaatgtcataaaagagatcatcataaaagatatcaatgatgtcacaatgagactaaccctatgggcagaacgagctaaagcttttaaattagatgatgtttacaatcctctagagcaaaagccaatcgtcacactctttgtaggttgtttagccaaaaatttccaaggtgcatacttaaatggtggaacaacatgtagatggtatttcaatcctgatattaaggaagccgctccttattatcaaaggtttggatctcaaaaagtaaaactacaaataccatcagagcaggaacaacaactatctgttgcaaaagaaacacatgtagaacacaaaaccttgcatgagcttcttgcgttggatccatatgcatttccgaaacaaggatatgaatgcacagttacaatcatagaagtacctacaacaaatcgttggtggtttccagcttgcaccaaatgcagtcgagcatgtagaccacaagatggtggttactattgctcctactgtaaatcagaagcgtacacactaagatataaattaacattcatgggatcagatgcaacagcaacagcgcaaatgttttgctttgatactgtagcacgacatatagttggcagaccatgtgaaacggttctgaaacaagccactgaagcaacaccaatacctccagatctagcacaaatagtatccttaaagtttacatttcgtgttacagcatcaaaccaaacattcgctcaacgagagaagcaacccactgtgttacaaataaattctatagttgtacatggaagacaacactatctaccatcaggaattcaaaacaccatagatcaaggtccatcaacaccaaacaaagaagctacactcaaattattagaagaatcaccttctattgctatggaaaggttatcaacaaaagtatccaaagatgttggcagaaaactcacatattcaacacaggacaaagacatcatagggtctcaagtcttggatgtagcacaaggaactaatgcagataagggaatccccactgataaaggcaaagagatcgaacctcatcttcaatctcctccaaaaagccccgactccaagaagttggcggtcgcatccggcgtatcgaggtcggtgctcttcctgctcgtcgacgtcgctgtcaaagctgttgagtccgagatcacttgttttctgtattccaaatga

SEQ ID NO: 49570 - DNA, 1770 bp, Zea Mays
cagcgatctaaagggccatgctccgactgtgcgagcgagcgagcgaggtcgtctcgtcgaccgtcgacgacaagctttttttttgtaacaaaaaaaaaaagtctcagacggtgaatggtactgtatcaggcaggctttcactgcagcgaggatttcacctgcagcagagctgcacgccagtaggtgagagaggacgggaggagcctactagctagctagcaagcgaaaccgcgggctttcagactctctcacgcacgccccagtccggcggcagtcccactcccacaggccacgcgacccacccacacccacccccgtccccgatgggcgatggcggagcggaggaggacggccggccgggaacaggacctgacaccttcagatcacatcagatgcacgcgagacgacagcggaggaggccggccgccgctccggacaatgagacgacgcaaaaggccaagccatcagacgtggtatataaaacatctcacgacatagattggggaacacaagacagcatctatatatcgctggggctgatgaagggaccgccggaccggtggtgccgaacaacatcacgtacgctcatggcgcggtgcgcgcgggcgcgcagactggggaaggaattgccacgcgcagcgcaaatgtgagggaagagaggccacggatgagggtcgtgaagattttgaggtaaggaagagagacctgtttgagctgttggtaacttgtttttaattgccgtgaataaaaaataagacaacatatatattaaacattaagtaccttcgttttcgaaccatttcagagataatggatctcagataaagtttataaaggacgagtcttcattttttatagaaataatattacaatacaacattataacaattacttatttcatgttgcatgtcagaatgatattaagacctttattatatattaataaagtggtacaaactatatattacatttgtacctttggcttgctcgaaatagagaatgtgaataccgtcttccaattaagcgtgaataaacaagtcttttcattgctggtttgacctcatgtatgaccttcgtgatcatcttaaaccgaaactttaatccttaccgaagcttcactatatttcatatgtgtctgttacagcttcggcactcatttccttttgacgtatccttgtcaaaatgaattacaagcggtttcttcatcctaaggctggctccagcagtatcatttcacatgatgcaaaagtgatttgtaccaagacattgaggaagcaacacctcaaataaaacattacaagactcgtagaagacctacaattatcaaacaaagtccaaaacacaagactagaaactagcccaagtgaagaagcctaaagaaaaacaagatggattggtgcaccggactggtccggtggtgtaccagaccgggttgccagagagcattttctcgggtactcgaccaactagcgcacttgacctcgggaccgatgcatcggatctcggtcaacagtcggcaacggctagttcaaacggtcatctagtcaccggaccttgtgtacaacaaaggatgccaatggctacatgatgtaaaagtcatcagaccttagtctggtggtgcattagaccagtccggtgcgacgtagaaaagtctgctttctccaatagatatatttagagtgggagcactatatataccccttcctactagctagacatttgagagcctggagagttgagtaacagtgctagtgagttgatacacttatc

SEQ ID NO: 49571 - DNA, 3516 bp, Zea Mays
ccccaaggcatgagctgagagaggctgggactgggaggagcgcagggcgcgattacgcggacgctccagtctccaccctccagagcagacagcaagcgcccaagcgccatgatgttgccgccgccgccaccaccgtcctccttgcgcgaccttctctcgcgggagcgcgtcgacgaggacgaggcgccgcatctgtcgccgcgacgcgcctccgggcggtcacccccgcgccgcggggcgtcgtcgaggtcgtccaggcacacgtcgtcgccgccgctggccacgaccacgacaacgaccagggaggcggagggggaggccgccgccgccgacgcggtggtcgccgtgctgtccgcgtacgccgggaggctgctcagggacgcggaattcaggcgggcgctccgcgacaagtgcgccgcgtgcctcgcgcccgccgcgggcgcgggcgaggacgacgacgcggcggcaggccgccccgtgctggccaacctcgagctgggcatcgagagcatagagcgcctggccgcggacggctccgccgcgcagccacaggcgccgcgcgacgccaagatccggtcgctccgcaactccatccgcctcctcagcgtcgtcgcgtcgctccactcgccaccgccgccgccgcgccccggcgccgccgcgggggacggcggcggccgcacctgcggggtgcccaactcgcacctcgcagcctgcgcgcagctctacctcgccgtggtgtacaagatggagcgcaacgaccgcgtcgcggcgcgccacctcatgcaggtgttcgccgacgcgccgggcctcgcgcgcagggagctgctgccggacctctgggaccacgtgttcctgccccacctgctccacctcaaggtctggttcgccagggaggccgacgacctcgtcgctggccgggacgccgacgaccggcgcacgaggatgaaggccctgcagaggctctacagcgaccacatggacagcggcacggctcagttcgctgtgtactacaaggagtggctccagtcaggcgccgccgcgccgcctcccgtcccctcggtgccgttgccttcgacgcccaggagtttcgacgggcgcgagaagagctcggcttcggtgcacagaacctccatcaacagagacctgtataatgcggttttcgggacagctctcgctctcgggcaggaagacgtcaaggatacaaagctggacgatgggactggactagctctggatttggatgtcgaattggatcacgatgctgcgggcttcaagacacagaagcttgctcatacagagtaaaatggggctccaggaaaagcactcccgctctcggaaagaaggcgccgctctagcagaaacagcacctgcgcagcggaaatcatactcctttcgactgttctcgtgccaaggcgatataagcaggaacgtgatcagccatcccaaagcagcgaagaaggaacccgtggtgtctgtcgagaaagagctggacagcagcgagctagctcctgctgtcgtgcctctgctggaacgagcggtttccgtggtatccagttcggacagcctgagtcagtgcgaggacgccgtgcacgaggtcgccagagcatgctcggcctgggacccgagcctcgtgaacctgctgtcgtgcgcctctttcatccaaggccttctcgaggtcacgctgacctccaaagacgacgccgtgctggagtcggccatgtcgatcatggggaagctggttctggggaacgaggtgatcagacagctcgtgctcaacgcggacccgcagctggaggttttcctgaggctcctgaggagcagcgagctgttcctcaaggcggccgtggtgctctacatgatgaagcctaaggccaagcagatgctgtccctggactgggtgccgctcgtgctgcacgtactggagtgcggcgacgaggtgcagtctctgttctccgtaagatgcgcccccaagatcgccgcgttctatttcctggaccagctgctcatggggttcgacgttgacagaaacgtcgagaacgcgaagcagatgatcgctctcggtgggctggacctcctgatcggcaggcttggcgctggcgacgctcgcgagagcaggcactgcatcgctctcctgaccacgtgcgttcaggccgatggcagctgcaggcactacttggctgatagtctcaagaaggagcctctcgttcagcttcttgctggaaatcagaggaaagccagtgccgcgtcccttaacctgatgagtgaactcgtctgccttaacagaacaagcaaaatcgtggagttcgtcaaggagctgaagaacagcgggtgcttgaacacgatgcacgttctgctggtctacctccagcaggctcctctcgtccagcacccgttagcagctaccatgctactccagctcgatctcctgggtgatccttcgcagtacagcgtgtacagggaggaggcgatcgaggccatcgtagccgctctggagcacagctcgcagagcaggaaggtccaggaacagtgcgcccgagctctcctaatcttggcagggcggttctcgtcttcaggagagcccgtagcagaagcgtggctgctaaagagagcgggcctagacgattccctctctgagtccttcaggagatcagaagtattcaaagataagagtgttcgagcggaggaagagaagctagtggaagaacggcagaagaacctcgccttgatgctactgaagagcgggggcagaaggttcctcacggcgctgtcgagctgcatatccgatggaaccccgagcctcagccggtcgtgcctcgtcagcgtggcatggatgagcagctccctctcgccgctgcgcggatgcaacgacttccagcccctggcatgctccgtcctcgcgtctaagcttttggacagcttgagctacgacagagtcctggaggagagggtgctcgcttcgctgtcgcttctgaacgtcgtgagacacccaggtcttcccgctgaagaaagaaaccatcgagtcactccaagatctcgcggaggtgacgtggactgcgaaggagctcctctttgcctgctgcagatgagatgcaagaccagatcgtcctcagcgatgaagaactagacaccagcatgtaattggaagtgattgttttgggagaagagtgatcgccactgctgtacacagattgtttcgtacttccgttgatatgtgaagccccacagatcctttccctcgtcatggactttggctttcgctgttgaattgaagcctgcacatggcttcctttcttcttcttctttagggcttgtttagattgccaggtatccatatcaatacacatccatgtgttgtacgttaacacacaacatactatattgagttggataatgatcatccaaataagtccttagttttacattatcctatacacgtggattgagttgaatatataatcacccaaatgtaagtcctcagtcgtagttcgttcccgtgataacatttttttgtctcca

SEQ ID NO: 49572 - DNA, 3500 bp, Zea Mays
agctgagagaggctgggactgggaggagcgcagggcgcgattacgcggacgctccagtctccaccctccagagcagacagcaagcgcccaagcgccatgatgttgccgccgccgccaccaccgtcctccttgcgcgaccttctctcgcgggagcgcgtcgacgaggacgaggcgccgcatctgtcgccgcgacgcgcctccgggcggtcacccccgcgccgcggggcgtcgtcgaggtcgtccaggcacacgtcgtcgccgccgctggccacgaccacgacaacgaccagggaggcggagggggaggccgccgccgccgacgcggtggtcgccgtgctgtccgcgtacgccgggaggctgctcagggacgcggaattcaggcgggcgctccgcgacaagtgcgccgcgtgcctcgcgcccgccgcgggcgcgggcgaggacgacgacgcggcggcaggccgccccgtgctggccaacctcgagctgggcatcgagagcatagagcgcctggccgcggacggctccgccgcgcagccacaggcgccgcgcgacgccaagatccggtcgctccgcaactccatccgcctcctcagcgtcgtcgcgtcgctccactcgccaccgccgccgccgcgccccggcgccgccgcgggggacggcggcggccgcacctgcggggtgcccaactcgcacctcgcagcctgcgcgcagctctacctcgccgtggtgtacaagatggagcgcaacgaccgcgtcgcggcgcgccacctcatgcaggtgttcgccgacgcgccgggcctcgcgcgcagggagctgctgccggacctctgggaccacgtgttcctgccccacctgctccacctcaaggtctggttcgccagggaggccgacgacctcgtcgctggccgggacgccgacgaccggcgcacgaggatgaaggccctgcagaggctctacagcgaccacatggacagcggcacggctcagttcgctgtgtactacaaggagtggctccagtcaggcgccgccgcgccgcctcccgtcccctcggtgccgttgccttcgacgcccaggagtttcgacgggcgcgagaagagctcggcttcggtgcacagaacctccatcaacagagacctgtataatgcggttttcgggacagctctcgctctcgggcaggaagacgtcaaggatacaaagctggacgatgggactggactagctctggatttggatgtcgaattggatcacgatgctgcgggcttcaagacacagaagcttgctcatagtaaaatggggctccaggaaaagcactcccgctctcggaaagaaggcgccgctctagcagaaacagcacctgcgcagcggaaatcatactcctttcgactgttctcgtgccaaggcgatataagcaggaacgtgatcagccatcccaaagcagcgaagaaggaacccgtggtgtctgtcgagaaagagctggacagcagcgagctagctcctgctgtcgtgcctctgctggaacgagcggtttccgtggtatccagttcggacagcctgagtcagtgcgaggacgccgtgcacgaggtcgccagagcatgctcggcctgggacccgagcctcgtgaacctgctgtcgtgcgcctctttcatccaaggccttctcgaggtcacgctgacctccaaagacgacgccgtgctggagtcggccatgtcgatcatggggaagctggttctggggaacgaggtgatcagacagctcgtgctcaacgcggacccgcagctggaggttttcctgaggctcctgaggagcagcgagctgttcctcaaggcggccgtggtgctctacatgatgaagcctaaggccaagcagatgctgtccctggactgggtgccgctcgtgctgcacgtactggagtgcggcgacgaggtgcagtctctgttctccgtaagatgcgcccccaagatcgccgcgttctatttcctggaccagctgctcatggggttcgacgttgacagaaacgtcgagaacgcgaagcagatgatcgctctcggtgggctggacctcctgatcggcaggcttggcgctggcgacgctcgcgagagcaggcactgcatcgctctcctgaccacgtgcgttcaggccgatggcagctgcaggcactacttggctgatagtctcaagaaggagcctctcgttcagcttcttgctggaaatcagaggaaagccagtgccgcgtcccttaacctgatgagtgaactcgtctgccttaacagaacaagcaaaatcgtggagttcgtcaaggagctgaagaacagcgggtgcttgaacacgatgcacgttctgctggtctacctccagcaggctcctctcgtccagcacccgttagcagctaccatgctactccagctcgatctcctgggtgatccttcgcagtacagcgtgtacagggaggaggcgatcgaggccatcgtagccgctctggagcacagctcgcagagcaggaaggtccaggaacagtgcgcccgagctctcctaatcttggcagggcggttctcgtcttcaggagagcccgtagcagaagcgtggctgctaaagagagcgggcctagacgattccctctctgagtccttcaggagatcagaagtattcaaagataagagtgttcgagcggaggaagagaagctagtggaagaacggcagaagaacctcgccttgatgctactgaagagcgggggcagaaggttcctcacggcgctgtcgagctgcatatccgatggaaccccgagcctcagccggtcgtgcctcgtcagcgtggcatggatgagcagctccctctcgccgctgcgcggatgcaacgacttccagcccctggcatgctccgtcctcgcgtctaagcttttggacagcttgagctacgacagagtcctggaggagagggtgctcgcttcgctgtcgcttctgaacgtcgtgagacacccaggtcttcccgctgaagaaagaaaccatcgagtcactccaagatctcgcggaggtgacgtggactgcgaaggagctcctctttgcctgctgcagatgagatgcaagaccagatcgtcctcagcgatgaagaactagacaccagcatgtaattggaagtgattgttttgggagaagagtgatcgccactgctgtacacagattgtttcgtacttccgttgatatgtgaagccccacagatcctttccctcgtcatggactttggctttcgctgttgaattgaagcctgcacatggcttcctttcttcttcttctttagggcttgtttagattgccaggtatccatatcaatacacatccatgtgttgtacgttaacacacaacatactatattgagttggataatgatcatccaaataagtccttagttttacattatcctatacacgtggattgagttgaatatataatcacccaaatgtaagtcctcagtcgtagttcgttcccgtgataacatttttttgtctcca

SEQ ID NO: 49573 - DNA, 4051 bp, Zea Mays
ggactgggaggagcgcagggcgcgattacgcggacgctccagtctccaccctccagagcagacagcaagcgcccaagcgccatgatgttgccgccgccgccaccaccgtcctccttgcgcgaccttctctcgcgggagcgcgtcgacgaggacgaggcgccgcatctgtcgccgcgacgcgcctccgggcggtcacccccgcgccgcggggcgtcgtcgaggtcgtccaggcacacgtcgtcgccgccgctggccacgaccacgacaacgaccagggaggcggagggggaggccgccgccgccgacgcggtggtcgccgtgctgtccgcgtacgccgggaggctgctcagggacgcggaattcaggcgggcgctccgcgacaagtgcgccgcgtgcctcgcgcccgccgcgggcgcgggcgaggacgacgacgcggcggcaggccgccccgtgctggccaacctcgagctgggcatcgagagcatagagcgcctggccgcggacggctccgccgcgcagccacaggcgccgcgcgacgccaagatccggtcgctccgcaactccatccgcctcctcagcgtcgtcgcgtcgctccactcgccaccgccgccgccgcgccccggcgccgccgcgggggacggcggcggccgcacctgcggggtgcccaactcgcacctcgcagcctgcgcgcagctctacctcgccgtggtgtacaagatggagcgcaacgaccgcgtcgcggcgcgccacctcatgcaggtgttcgccgacgcgccgggcctcgcgcgcagggagctgctgccggacctctgggaccacgtgttcctgccccacctgctccacctcaaggtctggttcgccagggaggccgacgacctcgtcgctggccgggacgccgacgaccggcgcacgaggatgaaggccctgcagaggctctacagcgaccacatggacagcggcacggctcagttcgctgtgtactacaaggagtggctccagtcaggcgccgccgcgccgcctcccgtcccctcggtgccgttgccttcgacgcccaggagtttcgacgggcgcgagaagagctcggcttcggtgcacagaacctccatcaacagagacctgtataatgcggttttcgggacagctctcgctctcgggcaggaagacgtcaaggatacaaagctggacgatgggactggactagctctggatttggatgtcgaattggatcacgatgctgcgggcttcaagacacagaagcttgctcatgtgagtcgacagttccttcaactttctccagatgactactctactcctagatggtttgcctcgtagtaataatatgtgtttttttgtttggcaaggcaaactagcattggcatctatcttttagacaagtgacgagttgtggtcactgtttgcagctgacaatttaagtggtgccaaggagacagccgtttgatccacgtacagtataatatttgttttctatgccgtggggcctttttttttgtcatattcctaggatcctcagttgtctatggttggttgtagacatgtagcatccactgagctgttcggtttaaaaagcttgcctcctgaactgagaaacatctgtccttgacgcctcatagtattacacagttagccatcaaaaatccgatcttgatttaggagtaacatattaccctaaactggcaatgcaaagtccttctctttgctttagaataacactgctatatgtagtgttttaagctacatgttcctgtttgtttagtcccgcatatatatatatatttgaagttagttaacttgagcccgttttgagtagacagagtaaaatggggctccaggaaaagcactcccgctctcggaaagaaggcgccgctctagcagaaacagcacctgcgcagcggaaatcatactcctttcgactgttctcgtgccaaggcgatataagcaggaacgtgatcagccatcccaaagcagcgaagaaggaacccgtggtgtctgtcgagaaagagctggacagcagcgagctagctcctgctgtcgtgcctctgctggaacgagcggtttccgtggtatccagttcggacagcctgagtcagtgcgaggacgccgtgcacgaggtcgccagagcatgctcggcctgggacccgagcctcgtgaacctgctgtcgtgcgcctctttcatccaaggccttctcgaggtcacgctgacctccaaagacgacgccgtgctggagtcggccatgtcgatcatggggaagctggttctggggaacgaggtgatcagacagctcgtgctcaacgcggacccgcagctggaggttttcctgaggctcctgaggagcagcgagctgttcctcaaggcggccgtggtgctctacatgatgaagcctaaggccaagcagatgctgtccctggactgggtgccgctcgtgctgcacgtactggagtgcggcgacgaggtgcagtctctgttctccgtaagatgcgcccccaagatcgccgcgttctatttcctggaccagctgctcatggggttcgacgttgacagaaacgtcgagaacgcgaagcagatgatcgctctcggtgggctggacctcctgatcggcaggcttggcgctggcgacgctcgcgagagcaggcactgcatcgctctcctgaccacgtgcgttcaggccgatggcagctgcaggcactacttggctgatagtctcaagaaggagcctctcgttcagcttcttgctggaaatcagaggaaagccagtgccgcgtcccttaacctgatgagtgaactcgtctgccttaacagaacaagcaaaatcgtggagttcgtcaaggagctgaagaacagcgggtgcttgaacacgatgcacgttctgctggtctacctccagcaggctcctctcgtccagcacccgttagcagctaccatgctactccagctcgatctcctgggtgatccttcgcagtacagcgtgtacagggaggaggcgatcgaggccatcgtagccgctctggagcacagctcgcagagcaggaaggtccaggaacagtgcgcccgagctctcctaatcttggcagggcggttctcgtcttcaggagagcccgtagcagaagcgtggctgctaaagagagcgggcctagacgattccctctctgagtccttcaggagatcagaagtattcaaagataagagtgttcgagcggaggaagagaagctagtggaagaacggcagaagaacctcgccttgatgctactgaagagcgggggcagaaggttcctcacggcgctgtcgagctgcatatccgatggaaccccgagcctcagccggtcgtgcctcgtcagcgtggcatggatgagcagctccctctcgccgctgcgcggatgcaacgacttccagcccctggcatgctccgtcctcgcgtctaagcttttggacagcttgagctacgacagagtcctggaggagagggtgctcgcttcgctgtcgcttctgaacgtcgtgagacacccaggtcttcccgctgaagaaagaaaccatcgagtcactccaagatctcgcggaggtgacgtggactgcgaaggagctcctctttgcctgctgcagatgagatgcaagaccagatcgtcctcagcgatgaagaactagacaccagcatgtaattggaagtgattgttttgggagaagagtgatcgccactgctgtacacagattgtttcgtacttccgttgatatgtgaagccccacagatcctttccctcgtcatggactttggctttcgctgttgaattgaagcctgcacatggcttcctttcttcttcttctttagggcttgtttagattgccaggtatccatatcaatacacatccatgtgttgtacgttaacacacaacatactatattgagttggataatgatcatccaaataagtccttagttttacattatcctatacacgtggattgagttgaatatataatcacccaaatgtaagtcctcagtcgtagttcgttcccgtgataacatttttttgtctcca

SEQ ID NO: 49574 - DNA, 3419 bp, Zea Mays
atgttgccgccgccgccaccaccgtcctccttgcgcgaccttctctcgcgggagcgcgtcgacgaggacgaggcgccgcatctgtcgccgcgacgcgcctccgggcggtcacccccgcgccgcggggcgtcgtcgaggtcgtccaggcacacgtcgtcgccgccgctggccacgaccacgacaacgaccagggaggcggagggggaggccgccgccgccgacgcggtggtcgccgtgctgtccgcgtacgccgggaggctgctcagggacgcggaattcaggcgggcgctccgcgacaagtgcgccgcgtgcctcgcgcccgccgcgggcgcgggcgaggacgacgacgcggcggcaggccgccccgtgctggccaacctcgagctgggcatcgagagcatagagcgcctggccgcggacggctccgccgcgcagccacaggcgccgcgcgacgccaagatccggtcgctccgcaactccatccgcctcctcagcgtcgtcgcgtcgctccactcgccaccgccgccgccgcgccccggcgccgccgcgggggacggcggcggccgcacctgcggggtgcccaactcgcacctcgcagcctgcgcgcagctctacctcgccgtggtgtacaagatggagcgcaacgaccgcgtcgcggcgcgccacctcatgcaggtgttcgccgacgcgccgggcctcgcgcgcagggagctgctgccggacctctgggaccacgtgttcctgccccacctgctccacctcaaggtctggttcgccagggaggccgacgacctcgtcgctggccgggacgccgacgaccggcgcacgaggatgaaggccctgcagaggctctacagcgaccacatggacagcggcacggctcagttcgctgtgtactacaaggagtggctccagtcaggcgccgccgcgccgcctcccgtcccctcggtgccgttgccttcgacgcccaggagtttcgacgggcgcgagaagagctcggcttcggtgcacagaacctccatcaacagagacctgtataatgcggttttcgggacagctctcgctctcgggcaggaagacgtcaaggatacaaagctggacgatgggactggactagctctggatttggatgtcgaattggatcacgatgctgcgggcttcaagacacagaagcttgctcatacagagtaaaatggggctccaggaaaagcactcccgctctcggaaagaaggcgccgctctagcagaaacagcacctgcgcagcggaaatcatactcctttcgactgttctcgtgccaaggcgatataagcaggaacgtgatcagccatcccaaagcagcgaagaaggaacccgtggtgtctgtcgagaaagagctggacagcagcgagctagctcctgctgtcgtgcctctgctggaacgagcggtttccgtggtatccagttcggacagcctgagtcagtgcgaggacgccgtgcacgaggtcgccagagcatgctcggcctgggacccgagcctcgtgaacctgctgtcgtgcgcctctttcatccaaggccttctcgaggtcacgctgacctccaaagacgacgccgtgctggagtcggccatgtcgatcatggggaagctggttctggggaacgaggtgatcagacagctcgtgctcaacgcggacccgcagctggaggttttcctgaggctcctgaggagcagcgagctgttcctcaaggcggccgtggtgctctacatgatgaagcctaaggccaagcagatgctgtccctggactgggtgccgctcgtgctgcacgtactggagtgcggcgacgaggtgcagtctctgttctccgtaagatgcgcccccaagatcgccgcgttctatttcctggaccagctgctcatggggttcgacgttgacagaaacgtcgagaacgcgaagcagatgatcgctctcggtgggctggacctcctgatcggcaggcttggcgctggcgacgctcgcgagagcaggcactgcatcgctctcctgaccacgtgcgttcaggccgatggcagctgcaggcactacttggctgatagtctcaagaaggagcctctcgttcagcttcttgctggaaatcagaggaaagccagtgccgcgtcccttaacctgatgagtgaactcgtctgccttaacagaacaagcaaaatcgtggagttcgtcaaggagctgaagaacagcgggtgcttgaacacgatgcacgttctgctggtctacctccagcaggctcctctcgtccagcacccgttagcagctaccatgctactccagctcgatctcctgggtgatccttcgcagtacagcgtgtacagggaggaggcgatcgaggccatcgtagccgctctggagcacagctcgcagagcaggaaggtccaggaacagtgcgcccgagctctcctaatcttggcagggcggttctcgtcttcaggagagcccgtagcagaagcgtggctgctaaagagagcgggcctagacgattccctctctgagtccttcaggagatcagaagtattcaaagataagagtgttcgagcggaggaagagaagctagtggaagaacggcagaagaacctcgccttgatgctactgaagagcgggggcagaaggttcctcacggcgctgtcgagctgcatatccgatggaaccccgagcctcagccggtcgtgcctcgtcagcgtggcatggatgagcagctccctctcgccgctgcgcggatgcaacgacttccagcccctggcatgctccgtcctcgcgtctaagcttttggacagcttgagctacgacagagtcctggaggagagggtgctcgcttcgctgtcgcttctgaacgtcgtgagacacccagaatgcatggagaaggtcttcccgctgaagaaagaaaccatcgagtcactccaagatctcgcggaggtgacgtggactgcgaaggagctcctctttgcctgctgcagatgagatgcaagaccagatcgtcctcagcgatgaagaactagacaccagcatgtaattggaagtgattgttttgggagaagagtgatcgccactgctgtacacagattgtttcgtacttccgttgatatgtgaagccccacagatcctttccctcgtcatggactttggctttcgctgttgaattgaagcctgcacatggcttcctttcttcttcttctttagggcttgtttagattgccaggtatccatatcaatacacatccatgtgttgtacgttaacacacaacatactatattgagttggataatgatcatccaaataagtccttagttttacattatcctatacacgtggattgagttgaatatataatcacccaaatgtaagtcctcagtcgtagttcgttcccgtgataacatttttttgtctcca

SEQ ID NO: 49575 - DNA, 2521 bp, Zea Mays
acgactcacgaattccgtcccattcccatccgcgcggacgtctcctcacgcaacctgtagccgagaccctctcacacgcttgcgatctccacctccgcggttgccggccgacctcttccccgccgcctccgccgcgcctcggggcaccggacccgtctccaacccctagatctcgcgccccctccgccccgccggccggtggtcacgccccgcctctcccgccgccggacgagctcgccgtggggcggagaggtcgccgccggcgacaggagccacgcgatgtccagggaatcctgccctttctcctcgcctcagtccttggggatccatccgtgctaatttccaccgttggcttgcagccttttgtatcgagcatgtgctaaattgggcacgcagaaatatcatcaagtatgctgatattaccgttccgaaacatcccaacttgccagcattggtcggggtaaatttgtcaagttatcaattgaagtgtgcttggttattgatttccattaaattgcagcatagcttgctcttcatctgaaagttttcgagggtagatgtttatcgtgcaccatggtcgttggtaatgacatagttgacatggttgggtgctaaaaggacgagaagggtttgaataaacggtccgatgaacattctacttgagcttaagcatctcaagctctttagcatgcccgcaagacctgtcatctgtaaaggccttctgatagtgattgcccttattttgttgagagcaattgtatctccttttcttgctatagattcatctgagaagaaagaattttacgagtccacagcccctgacttgcttcctagaattagacgagacaagtttcttgaggtcccacagatcatatgggggttgaacaatcagaagattgcattcgccagagcatgcttgactgcaagattcctgaacagatcccttctcatgccaagcttgagtgcttctctcttctacaaagaggttgacttgctgcagcctgtcagttttgacaaagtgtttgactttaacaagttcaatgcgcgttgccatggcttcgtaaggttagctcagtattcagaagtttcaaatcggacagagcccttcaaactccaaaaggggaccggtagaaggtggacggcagacagagatttggatcaactacagcaatccataggcagcaatgtggatgactctgaagtcattgaaatcgttgggaaaaatccatttctgtggcctgaccactggccagtcaaagactatgccaaaatcttcgattgccttgtcttagttcctgagatagaaaccgaagtggtcaaggtgatatccaagattagagaggcaggccaaagagcaagacatgaagctgggggttctcatagtaagcagaggagagatagctcaacgaatccgcctgtaccgtatgttgctgttcacatgagaatagaaaaagattggatgatacattgcaagaagtgggagcagcggtccaagtcacatgaaatctgcagtagtaaagaagagatcattcataaggtctcacagatcactgacctacgtcggccggttgttgtttatcttgcggtagctgacagccttcttgaagacgattcaataaccagtgggtggagagtgggtatggttgcttacgagaagaagaagcttggtgttactgacatctacgatcgtcagccatatcttataaagtctgccatcgacttcgaggtgtgctcgagagcagacgtgtttgtcggcaacagcttctcaacattctccaacctcgtagtgctgtccaggacagaaaggctgtacaacctgggaaaggcgagctcgtgtggcgagaacatcgggctttcgtcgtatgcgtacaatgtcatgggcgacgatggtggaccacagagatggatgacagatatgtcggacacaagcctgcagaggttaagttacggaacaaataacgtctcatgccactgactttgacgcatagcaaacttgactgaacatgatgtatacctgaggaagagtccttgcccgacttcgctttttatcggcaaaggaagcaataaacctccttgcaaaaaggaccagatgcttgctatttctccaggtttggaactgtgtgagaaataggggttggtgggaagattatttggcgatttttttttctcttccatccgatttttatataatatgaggatagcctgtgtagcagtgagagctatctttattgagtaaccagatcatgcagtcttttcgtatttgcgggatgaagacaatgcggggtgaacacaatgcaaagtgaagattttgtttgctttatgaccattagagtttatattagagcctctggcacttctgtttttctttaaaactagaatcttgataaatgtaactgaatttctatctcctggttcaaatgtaaatgcaatgggcatcttgccctgtttaatcatttttgaagtgcgtgtagatttagctaaagtttttgacagaattgaatggaacttaattatgtctgct

SEQ ID NO: 49576 - DNA, 2707 bp, Zea Mays
acgactcacgaattccgtcccattcccatccgcgcggacgtctcctcacgcaacctgtagccgagaccctctcacacgcttgcgatctccacctccgcggttgccggccgacctcttccccgccgcctccgccgcgcctcggggcaccggacccgtctccaacccctagatctcgcgccccctccgccccgccggccggtggtcacgccccgcctctcccgccgccggacgagctcgccgtggggcggagaggtcgccgccggcgacaggagccacgcgatgtccagggaatcctgccctttctcctcgcctcagtccttggggatccatccgtgctaatttccaccgttggcttgcagccttttgtatcgagcatgtgctaaattgggcacgcagaaatatcatcaacatagcttgctcttcatctgaaagttttcgagggtagatgtttatcgtgcaccatggtcgttggtaatgacatagttgacatggttgggtgctaaaaggacgagaagggtttgaataaacggtccgatgaacattctacttgagcttaagcatctcaagctctttagcatgcccgcaagacctgtcatctgtaaaggccttctgatagtgattgcccttattttgttgagagcaattgtatctccttttcttgctatagattcatctgagaagaaagaattttacgagtccacagcccctgacttgcttcctagaattagacgagacaagtttcttgaggtcccacagatcatatgggggttgaacaatcagaagattgcattcgccagagcatgcttgactgcaagattcctgaacagatcccttctcatgccaagcttgagtgcttctctcttctacaaagaggttgacttgctgcagcctgtcagttttgacaaagtgtttgactttaacaagttcaatgcgcgttgccatggcttcgtaaggttagctcagtattcagaagtttcaaatcggacagagcccttcaaactccaaaaggggaccggtagaaggtggacggcagacagagatttggatcaactacagcaatccataggcagcaatgtggatgactctgaagtcattgaaatcgttgggaaaaatccatttctgtggcctgaccactggccagtcaaagactatgccaaaatcttcgattgccttgtcttagttcctgagatagaaaccgaagtggtcaaggtgatatccaagattagagaggcaggccaaagagcaagacatgaagctgggggttctcatagtaagcagaggagagatagctcaacgaatccgcctgtaccgtatgttgctgttcacatgagaatagaaaaagattggatgatacattgcaagaagtgggagcagcggtccaagtcacatgaaatctgcagtagtaaagaagagatcattcataaggtctcacagatcactgacctacgtcggccggttgttgtttatcttgcggtagctgacagccttcttgaagacgattcaataaccagtgggtggagagtgggtatggttgcttacgagaagaagaagcttggtgttactgacatctacgatcgtcagccatatcttataaagtctgccatcgacttcgaggtgtgctcgagagcagacgtgtttgtcggcaacagcttctcaacattctccaacctcgtagtgctgtccaggacagaaaggctgtacaacctgggaaaggcgagctcgtgtggcgagaacatcgggctttcgtcgtatgcgtacaatgtcatgggcgacgatggtggaccacagagatggatgacagatatgtcggacacaagcctgcagaggttaagttacggaacaaataacgtctcatgccactgactttgacgcatagcaaacttgactgaacatgatgtatacctgaggaagagtccttgcccgacttcgctttttatcggcaaaggaagcaagtatgtgcagctaatttgacgtgcttctgtgttcgaagctagagcccacatgtcgcacttgtgaaggactatggccaagagtttagatgtgcttaaaagtgttgacagtgttgggcagtttgtagtttgtataacgctgaatgctgcgcgatggcttttacctgggacccttttgtttttttatggtttcagaatcagacctacacattcaagtgtattttgttcacatgcagcgtgtgtgtttttaagatggtttgctgtgttctgactttttttatttcaatcgccctcaatgcagtaaacctccttgcaaaaaggaccagatgcttgctatttctccaggtttggaactgtgtgagaaataggggttggtgggaagattatttggcgatttttttttctcttccatccgatttttatataatatgaggatagcctgtgtagcagtgagagctatctttattgagtaaccagatcatgcagtcttttcgtatttgcgggatgaagacaatgcggggtgaacacaatgcaaagtgaagattttgtttgctttatgaccattagagtttatattagagcctctggcacttctgtttttctttaaaactagaatcttgataaatgtaactgaatttctatctcctggttcaaatgtaaatgcaatgggcatcttgccctgtttaatcatttttgaagtgcgtgtagatttagctaaagtttttgacagaattgaatggaacttaattatgtctgct

SEQ ID NO: 49577 - DNA, 895 bp, Zea Mays
aagcgttataggcaaaagtgttccaattggattaattctggactagaaagagcgaaagagctggatgcactaaatctaggcttgaaacagttcctggcttggaactgttcctatgctgccgaagcttgattacgttgatggagtttgtcccaccaatgtcactgtaccgcataatctatgagctctctccaccttcatcatcgagacttttctcaaacttctccggtgtacacttgggagacttgagtgatcctaaaactttggactaccttcagcatgctcaagcttgccaaggaggccagcaggcgacaacatcctgttcaactacctcatcccaccgatgcggatggacaagtgcatcgcgaatggacaagtgtagcgtgaacagcgtggacagcaacaacgtacacaaggcgggcatggtgatgaaagggttgcccatcaatgtgtacgcatcagagacgttggggtgtgcggcggccatgtccacatacggttgatgagcaagatgcttgggcgtattggggattcaccgctgattaggttcgacacatacacatgcggcgcgtgcgtcgtgtcgtgcacgctcaagtgggacatgtccaatgtcatggagtacaagggcctacccctgcagtaggccgtcgactacatgtcaggggcacgatgcagaatatccgaagacaactattatcaataattagccaatataaactatttacaaatctttactaatgtttacaaaatagcatatccctatatcattgtttttgaggaaaaaatggcgtattagtattgacacatcgtgtatccatagaaagtctcgtaattgattaataacatcttgttgaccacaggtgtagctattagacaatatatgagtttgatatatgaa

SEQ ID NO: 49578 - DNA, 983 bp, Zea Mays
aaaacatgatgcttgcatgattccatatggagtatctgtcctcgttgaaccacgaggataccagactagctgtcacatgcgaaagagaattcttggcagttcttgatggcaactgccgaactccaattgcggcctatgcttaccgtgacaaggacgggaactgctcattccggggcctactgtcttcaccagacggatctaaagtatttgagacggcaagaagtggaccgtactctttcgacgacatggtcgagatgggcaaagacgctggccacgagctgaaggcgaaggctgggcctggcttcttcgatagccttcaatgaacagaatgtgcggccatgcgcgatttcagttggcaccctttcggttgaaaacgagggccaaagtaggttgttgaggggtttgtttttgtttcttctttttttctcctactactagttcctgctagagccttgtactaccactcatgttgagcagccccattcagcttttgttgtttctcatgttcttttagcactctgggttagagagagccggtatctgcacagctatgttgtgtcgaagttgatgtgactctgcagatagttgttgtttcaagaatatttgagcgagctcatgataaccatgggagtaagattcgatgttcctattcttcggaaaattagccttgttgattgattctcagatgaacctgatgaatgtcacatccctctttgggggaaatgagaatggagaaacctgcctctttcatgaatgtcacatacacccctaaatgttccagtttttttttttaaaaaaattaaacaaatatgattcctttttattattattttctgcaatcacatagaggcaagatgaacacaaaggcaacaccggcactctttcacaatattggagataactgatagtctgatacaggtcccaatctaaattacccagacattttcagatgctactgaacaaggatctcctgaagcatctta

SEQ ID NO: 49579 - DNA, 213 bp, Zea Mays
gtcaatgggtcttgatcttcttcatttgtagaaccgaagtcatcctcgtccactgtttgtgtagaactccttgcatgcttgctattcatatgagctctccttggaaaattgcggcctagtagtgctttagctgcacccatagcttcatcaacaagctcccatgttagatctgacccatgaacaccttgagagggcacatgcaatgagtctgcc

SEQ ID NO: 49580 - DNA, 108 bp, Zea Mays
aagagctggatgtgtagatcacagagtacggctggatgtgcaaatgtcatggctgtttggatttcttctgacagtttgacaaaactgcacatcatgcaaagagtcagg

SEQ ID NO: 49581 - DNA, 463 bp, Zea Mays
aattcatccggtcaccttaaaggcgtgcatgcaatttggagagaatgtcggattttggcgcatctagttgcggttacactgattctatacagcttcactatcattcaggccaatcaacgtacattgctacgaatcgctgaagaaaaaggagaaaaaacacgcttccaactccaaaggtcccaaactgatgataaattcagaaatcttgtaggcttgaagaaggcagaaggaagaaagtgatgtcacctcggtagccatccggacctgtggccctaggcttgaagtagtcggatacgggggcgccgccgttctgcctgatgccgcagggcaggaggtgcgccccaccgaggtcggctgcgactagggagaggtcgatggtagcagtgacgccggcggcgggtgccggaggggtcgccggctccatgttgggctcacgttcgtggaatttccgcactcaacgagc

SEQ ID NO: 49582 - DNA, 355 bp, Zea Mays
ccggggtataaactggtcccgggtatcctctcccctagctcacccttgccaatttctctaggagccaccatcgccgtagaatttgcgcgcgcggcggaagaacctcgccagaccccgccgtcgtcgaccggcatccgcacgcgccgccccgacctcaacctgtgatcgggggtcgtctctgggttcgcaaaacctcgcgaccaagtgcccgagcgcggggttccgcgggtggccggaatttcgtcaccgtaccgtcgaatttgtcgcgacgcgtgaacagcctgtgtgcagcttcgttctcgaagagcctgtgactgaggatcctggtgcctagcagatagaagtagctgagcag

SEQ ID NO: 49583 - DNA, 1417 bp, Zea Mays
attcctactgttagttttgtgaattcggaggcgcagcgccaccaacttgcaccattttggcaaccccgcagggacaaaagaaaggcgaaacgaggccaccagctcaccgccgagcggaagcggcgccgagcaaccaacccctctcctcgtccgccgccgtctccccggaccatggccatggccgccgcctcctcccggctgttctgggcgtcccgcgccgccgcctacctcaggatctccaccttccccagggccttcgccaccgtgctgaaggatctgaagtatgctgacactcatgaatgggtgaaagttgagggtgattcagcaaccgtggggattactgaccatgcccaggttaacacgctcacatatttctattgctgtgagtttagagtgtgaggcaatactaggtgttagtgttaggccctccatatgtttaggttgtctggtgctgtagttcttatcaacactgatatgcatactgcatccaatctgttgccaagacatcaagttctaatatattatatcatgttcagtatacatatgttagtgaaagacagacctagtgtagtggtgagagctgtcttactgactcaccagtcgcgggtttcaagtggcctctctgcatttgtggaggaggttgcctcctccagcactaggtctcctcttttcagtatacatatgtgaggcttgcctcggtttatcacttccctagactccactcatgtgggagccctcgtcactaggtttgtccagtatataacattagggtttgcattgcttaaaatttgtttattgcttttggcgtccaggatcatttgggtgatgttgtttttgtggagctaccagaagttggcatcagtgtatcccagggaaagaactttggtgctgttgagagtgtgaaggcaaccagcgatatcaattcaccagtgtctggagaggtggttgaagtgaacgagaaactaagtgaggagcctggattggttaatgcaagtccatatgagaagggatggattatcaaggtcaagctcagcaattcaggtgacctcaattcgctcatggatgatgataagtactcgaaattctgtgaagaagaagacaaccattgaagaaatcagagtgtcttctaaacaccaggacctgtttttcaagctttatcactggttatggtctggagaccagctgtgacaaattggcaaggttcatcgcaaggaataaatgttaggatttgccaatcctacaagggcatgggaaatccaagtttgtgttgtcaatgacgtggtcatatttgatatttctttgtagttgtaatctcgtgaattccttcttttttcttaaaaaaagtactctttttgattccttcctatgcaaatttcttggtgctttcgcgaatggttcagattcttcagcattgtta

SEQ ID NO: 49584 - DNA, 1378 bp, Zea Mays
gtgttttgtcttaggcttggctggcctttctcaccaatatctactgtgtgctgcaatcacactacttgagatgtcatgttttaagggtttgggcggattggcaggttggtcctgcgaattgcaaccagcagagatgatattgaagttgtggctgtgaatgaccctttcattgatgctaagtacatggcctatatgttcaagtatgattccactcatggcccgtttaaaggttctattcgtgtcgtggatgattcaaccctcgagatcaatgggaagaaggtcacaattacaagcaaaagagatcctgcagagattccatggggtaactttggggctgaatatgttgttgaatcttctggtgtcttcacgacgactgataaagcatcagcacacttaaagggtggtgcaaagaaagtggtgatatctgcaccatcagctgatgctcccatgtttgtagttggagttaatgagaatagctatgatccaaagatgaatgttgtttctaatgcaagttgcactaccaactgccttgctccacttgccaaggttgtccatgaggaatttggcatcgtggagggccttatgacaactgttcatgcaacaacagctacccagaagaccgtcgatggtccttcgatgaaggattggagaggaggacgtggtgctgcccaaaacataattcccagctccactggtgcagcaaaggctgttggaaaagtcctgcctgagctgaatggaaaactcactggtatggccttccgagttccaacaccaaatgtctctgttgtggatttgacatgccggattgagaaaagcgcctcctatgatgatgtgaaagcagccatcaagacggcatcagagggtgcactcaaaggtattcttggctacacagacgaggatgttgtttccaatgattttgttggtgattcaaggtcaagcatctttgatgccaaggctggtattggactgagctcttccttcatgaagctcgtgtcttggtatgacaacgagtggggctacagcaaccgggttctggatctgatcgctcacatggctcttgtgagcgccaagcactgatgttcgtactcgttcctccagtaccagtagtagcctagataagaggctgcagttttgacggccattttcttttagctgttgtttggaataaaagaccaaatgttggaacacttggaactcgcgcaaaactggaatccgattcatgacctgtgttttagttgtagagggggcaaatttgcatcgtactatatgcgggattgttgatcggatgtcgtatggttcattgacttgatttattatgatgcgtggagggctgatttggtgatcagtgatcacggctctctatgagagagaaatctct

SEQ ID NO: 49585 - DNA, 1321 bp, Zea Mays
gttttacaaaggcagtttttagttcctgggtttgggcggattggcaggttggtcctgcgaattgcaaccagcagagatgatattgaagttgtggctgtgaatgaccctttcattgatgctaagtacatggcctatatgttcaagtatgattccactcatggcccgtttaaaggttctattcgtgtcgtggatgattcaaccctcgagatcaatgggaagaaggtcacaattacaagcaaaagagatcctgcagagattccatggggtaactttggggctgaatatgttgttgaatcttctggtgtcttcacgacgactgataaagcatcagcacacttaaagggtggtgcaaagaaagtggtgatatctgcaccatcagctgatgctcccatgtttgtagttggagttaatgagaatagctatgatccaaagatgaatgttgtttctaatgcaagttgcactaccaactgccttgctccacttgccaaggttgtccatgaggaatttggcatcgtggagggccttatgacaactgttcatgcaacaacagctacccagaagaccgtcgatggtccttcgatgaaggattggagaggaggacgtggtgctgcccaaaacataattcccagctccactggtgcagcaaaggctgttggaaaagtcctgcctgagctgaatggaaaactcactggtatggccttccgagttccaacaccaaatgtctctgttgtggatttgacatgccggattgagaaaagcgcctcctatgatgatgtgaaagcagccatcaagacggcatcagagggtgcactcaaaggtattcttggctacacagacgaggatgttgtttccaatgattttgttggtgattcaaggtcaagcatctttgatgccaaggctggtattggactgagctcttccttcatgaagctcgtgtcttggtatgacaacgagtggggctacagcaaccgggttctggatctgatcgctcacatggctcttgtgagcgccaagcactgatgttcgtactcgttcctccagtaccagtagtagcctagataagaggctgcagttttgacggccattttcttttagctgttgtttggaataaaagaccaaatgttggaacacttggaactcgcgcaaaactggaatccgattcatgacctgtgttttagttgtagagggggcaaatttgcatcgtactatatgcgggattgttgatcggatgtcgtatggttcattgacttgatttattatgatgcgtggagggctgatttggtgatcagtgatcacggctctctatgagagagaaatctct

SEQ ID NO: 49586 - DNA, 1853 bp, Zea Mays
tccccacatacggcgccctccatcacgccatcgccgcccttccccacgcgatccccatccccaagccttgcgccaccatcccgccttcaaagccgcgggtgtgcacaggggcgagtccatgccgtgcccgccacccccgccgtgatagccgcctacgcgtccgtcgcccctgcctgcccccacgatgcccacttcaagaacaacaaaaatcccaagaaccgcggaagcctgcccatcctctctctcccctcacagcgaagtcgtcgtctcctcccactcgatgccgcaacctcgtgagggcaagtgcacaggttccatgcccacgcccccgtcaatcacgcgatttccttgccgtgaatgtcgtccaatctctcctcgccgtcggcgttgcgcacccccacgctctcatccactccacgactcgcctgtcctccaagtaagtgggcacgtggcggatccggtgcagccgaccctgggaggagcgcatcgcggcctccacgccctcatccactcctacacgtgccggaggtggcgctggccaagttgtcggatgacgaggaaaacgacgacgcctactactacggcgccggtgacacgtcgtgttccacactgatgacttcgagcacggcggcgttgtctactcgctcctgttccttcttttcctcctgctctgctggtgcgtgcccgtggtcggctacaacatgaacttggcctctgtcggccagggtgcctccgacaagcagttcggcacgctgtcgcggtggcggttcaaggagcccgacgtggcaacgaatcgagagcgcgatgaccagtcgcgtgcttcgcggtgcctcactctgctgctacaccatcgccgccgccgcggtggctgagcagagccgcatcaaggcgcagaaccccatcatcgagatggacgaggatgagatgacagggtcatctagaagatgataaaggataagctcatcttcccatacctggagttggatgtgaagtattacgaccttagcaacaagggcaagtcttcactatgcaaacatatatatccactccagcggctggtagcgaagaggggcacattagtctgcatgttctagggagtcgatggtgaaactcacaaatggcgtccttctggggcagaccatggcttcaccttcctacactaacctcattgtcgcatatcacaggacaaatatcttggtacgctatggtggtcaaggaatccaaatggaggcaatctagaatctctcagatataagcaaggttacagagttgatgtggatattcttgaccaaacatgggtggaggcgtcaaaagctgagatcatggtgatttgtggttgtttggatattcctgaccaaacatggtgatttgtacttgtaaccaaatcttatgtctcacttagaaccagcgtatggtagtacaagtacaatacatcacattatgtccgaaaacatgcgactgaaaattgattggtaaagagtcctaaaacaaaagcaatcattatgccctaaaacaaaatggattccaaaaggagttgagggctacttcaacataacctgcaactaaagatctttgatacactaaataggtctccaacatacattaaaaaagttattgttaagttattgttaagaagatcacccaatgaagaagaaactagatggtggagtggagtctagagagtaggactagaaaaaagactcgagcatgacgagctggcttggactcgcggaggctcggctcggtgcttagaacaagctcgagccgagcctatttttctggctcaagaaaagagcgagctagtttggctcgcgagctggctcgacccaacaacattttgttacataaaattt

SEQ ID NO: 49587 - DNA, 3977 bp, Zea Mays
acggcgccctccatcacgccatcgccgcccttccccacgcgatccccatccccaagccttgcgccaccatcccgccttcaaagccgcgggtgtgcacaggggcgagtccatgccgtgcccgccacccccgccgtgatagccgcctacgcgtccgtcgcccctgcctgcccccacgatgcccacttcaagaacaacaaaaatcccaagaaccgcggaagcctgcccatcctctctctcccctcacagcgaagtcgtcgtctcctcccactcgatgccgcaacctcgtgagggcaagtgcacaggttccatgcccacgcccccgtcaatcacgcgatttccttgccgtgaatgtcgtccaatctctcctcgccgtcggcgttgcgcacccccacgctctcatccactccacgactcgcctgtcctccaagtaagtgggcacgtggcggatccggtgcagccgaccctgggaggagcgcatcgcggcctccacgccctcatccactcctacacgtgccggaggtggcgctggccaagttgtcggatgacgaggaaaacgacgacgcctactactacggcgccggtgacacgtcgtgttccacactgatgacttcgagcacggcggcgttgtctactcgctcctgttccttcttttcctcctgctctgctggtgcgtgcccgtggtcggctacaacatgaacttggcctctgtcggccagggtgcctccgacaagcagttcggcacgctgtcgcggtggcggttcaaggagcccgacgtggcaacgaatcgagagcgcgatgaccagcagtcgcgtgcttcgcggtgcctcactctgctgctacaccatcgccgccgccgcggtggctgagcagagccgcatcaaggcgcagaaccccatcatcgagatggacgaggatgagatgacagggtcatctagaagatgataaaggataagctcatcttcccatacctggagttggatgtgaagtattacgaccttagcaacaagggcaagtcttcactatgcaaacatgtacttgtacttcgggatagtgctattgtttccctgttgtttttttacttcagctacaatgtctccttcagtccaaaacaagctggctagcatgctacatattatttgattttgcaagttgtatgatctaagaccctcgagctttgaatttgccctgaatatttactttctagcagacccatcgaatctgagaagttgtacatcctgagatgcatgtcatattcatactgcttctcttttctttttcactttttgggggctctacttatcaaaatttgagctgtattttgggcaagcatgcctttttctatgggatgtggttttttatcttcttgattgatggcacataagtttctaataggccatcaaaaccaaaaatgagtaaaacataacacaaaacaagtaaatatgttctaatggtgattgcagatcaagactaaggatccactttgttgcattcaattgactacacaaaaaacatataagaaaggacatttggtatcaaagggggcaatggatatgcccccaaacatcatggcatgatgttgtttttagcagaagttttttggtagtccaaaatgcagtgtctaaaccaaattgggtaaaacataacacaaaacaagtaaatgtgttttattgttgattacagatcaagactatgcacccactttgttgcattttgttttggtgatttattgcgtttacctgtatgtgatctattgagtctaactatagcctgagtgattacaaaggtatggtgtatgggaagtactaaaattagaactgtaaattggactatattgtgttgtctgcaaacatctgtaccttaaatagatgctttcttaacaatgaaagtttagttatcctcctaccgggctgtggtgaagatggatagattctcgttgggccattcacctgattttggtttagtgaaacactttggcaaagttcctagatttccatgaccttagcaagctaggcacactcattgctcagcatttgctaaaaccttacctaagaaaaaggtacttccgcatttgatactgaagtagtggagaccatcatgtggaatggggcctcttccactaattaatataggcacaccctgtttattactgtttagtttgttattccgcgagtacgttgatgatcctttgttaccacagtaaggtttctgaaaagaatatggatcattgaatgacatctttgggttaagacactttgacgcgtgaccaagaacatatggtaaaatggaattccagttcaatggaagttagagttctaatgtgtgcaacaatagatttactttaactcagatggtacaaataagctccattggtgaatctattgtgctttttggcgtgcatgtaagatttaagctttacaaatatagcatgtccattatatttctctttcctcgagcgatctgttgtttccatttggggtaattgtactcaataaattaatttgttcctttgaaggttattgaccttcaggcatatgttgttaagggagttgggaaggttcaagccaagtggtctccagttggtacaatttctatagaatgctccatgagggaaaattgtttcactgttgcatttgcaataagatggttgaatgtaacatgtggagttagaattattgttatatgtttccctttcctatacgccatatgtctaatttttttgttatgttcatgctagctattatcatctttggttatttttatttttaattattctactttgatagatggatgtaacaaccccttttgttatttttacttattatatgcttgcatagtttcagcgggaagaagggataagaacctcaagatcatataactattcatcccaaataaaataaacatgtttcatatagctgcttttgtcaactgtttttagtgttcttattcacttgatttgtttctctagtggtaatgtgattttaaaactactgctacctattgtttgtagaggtgaaaattagtttttccatgcgcaactctgcacatacctcttccaaaggtgtcgatggcataatttcttgtttgcattacatgacattgttttatcctaagttcaattagaattcattgttgtaattgtcaatgctttctttttcaatcagatatatccactccagcggctggtagcgaagaggggcacattagtctgcatgttctagggagtcgatggtgaaactcacaaatggcgtccttctggggcagaccatggcttcaccttcctacactaacctcattgtcgcatatcacaggacaaatatcttggtacgctatggtggtcaaggaatccaaatggaggcaatctagaatctctcagatataagcaaggttacagagttgatgtggatattcttgaccaaacatgggtggaggcgtcaaaagctgagatcatggtgatttgtggttgtttggatattcctgaccaaacatggtgatttgtacttgtaaccaaatcttatgtctcacttagaaccagcgtatggtagtacaagtacaatacatcacattatgtccgaaaacatgcgactgaaaattgattggtaaagagtcctaaaacaaaagcaatcattatgccctaaaacaaaatggattccaaaaggagttgagggctacttcaacataacctgcaactaaagatctttgatacactaaataggtctccaacatacattaaaaaagttattgttaagttattgttaagaagatcacccaatgaagaagaaactagatggtggagtggagtctagagagtaggactagaaaaaagactcgagcatgacgagctggcttggactcgcggaggctcggctcggtgcttagaacaagctcgagccgagcctatttttctggctcaagaaaagagcgagctagtttggctcgcgagctggctcgacccaacaacattttgttacataaaattt

SEQ ID NO: 49588 - DNA, 3396 bp, Zea Mays
acggcgccctccatcacgccatcgccgcccttccccacgcgatccccatccccaagccttgcgccaccatcccgccttcaaagccgcgggtgtgcacaggggcgagtccatgccgtgcccgccacccccgccgtgatagccgcctacgcgtccgtcgcccctgcctgcccccacgatgcccacttcaagaacaacaaaaatcccaagaaccgcggaagcctgcccatcctctctctcccctcacagcgaagtcgtcgtctcctcccactcgatgccgcaacctcgtgagggcaagtgcacaggttccatgcccacgcccccgtcaatcacgcgatttccttgccgtgaatgtcgtccaatctctcctcgccgtcggcgttgcgcacccccacgctctcatccactccacgactcgcctgtcctccaagtaagtgggcacgtggcggatccggtgcagccgaccctgggaggagcgcatcgcggcctccacgccctcatccactcctacacgtgccggaggtggcgctggccaagttgtcggatgacgaggaaaacgacgacgcctactactacggcgccggtgacacgtcgtgttccacactgatgacttcgagcacggcggcgttgtctactcgctcctgttccttcttttcctcctgctctgctggtgcgtgcccgtggtcggctacaacatgaacttggcctctgtcggccagggtgcctccgacaagcagttcggcacgctgtcgcggtggcggttcaaggagcccgacgtggcaacgaatcgagagcgcgatgaccaggcagtcgcgtgcttcgcggtgcctcactctgctgctacaccatcgccgccgccgcggtggctgagcagagccgcatcaaggcgcagaaccccatcatcgagatggacgaggatgagatgacagggtcatctagaagatgataaaggataagctcatcttcccatacctggagttggatgtgaagtattacgaccttagcaacaagggcaagtcttcactatgcaaacatgtacttgtacttcgggatagtgctattgtttccctgttgtttttttacttcagctacaatgtctccttcagtccaaaacaagctggctagcatgctacatattatttgattttgcaagttgtatgatctaagaccctcgagctttgaatttgccctgaatatttactttctagcagacccatcgaatctgagaagttgtacatcctgagatgcatgtcatattcatactgcttctcttttctttttcactttttgggggctctacttatcaaaatttgagctgtattttgggcaagcatgcctttttctatgggatgtggttttttatcttcttgattgatggcacataagtttctaataggccatcaaaaccaaaaatgagtaaaacataacacaaaacaagtaaatatgttctaatggtgattgcagatcaagactaaggatccactttgttgcattcaattgactacacaaaaaacatataagaaaggacatttggtatcaaagggggcaatggatatgcccccaaacatcatggcatgatgttgtttttagcagaagttttttggtagtccaaaatgcagtgtctaaaccaaattgggtaaaacataacacaaaacaagtaaatgtgttttattgttgattacagatcaagactatgcacccactttgttgcattttgttttggtgatttattgcgtttacctgtatgtgatctattgagtctaactatagcctgagtgattacaaaggtatggtgtatgggaagtactaaaattagaactgtaaattggactatattgtgttgtctgcaaacatctgtaccttaaatagatgctttcttaacaatgaaagtttagttatcctcctaccgggctgtggtgaagatggatagattctcgttgggccattcacctgattttggtttagtgaaacactttggcaaagttcctagatttccatgaccttagcaagctaggcacactcattgctcagcatttgctaaaaccttacctaagaaaaaggtacttccgcatttgatactgaagtagtggagaccatcatgtggaatggggcctcttccactaattaatataggcacaccctgtttattactgtttagtttgttattccgcgagtacgttgatgatcctttgttaccacagtaaggtttctgaaaagaatatggatcattgaatgacatctttgggttaagacactttgacgcgtgaccaagaacatatggtaaaatggaattccagttcaatggaagttagagttctaatgtgtgcaacaatagatttactttaactcagatggtacaaataagctccattggtgaatctattgtgctttttggcgtgcatgtaagatttaagctttacaaatatagcatgtccattatatttctctttcctcgagcgatctgttgtttccatttggggtaattgtactcaataaattaatttgttcctttgaaggttattgaccttcaggcatatgttgttaagggagttgggaaggttcaagccaagtggtctccagttgatatatccactccagcggctggtagcgaagaggggcacattagtctgcatgttctagggagtcgatggtgaaactcacaaatggcgtccttctggggcagaccatggcttcaccttcctacactaacctcattgtcgcatatcacaggacaaatatcttggtacgctatggtggtcaaggaatccaaatggaggcaatctagaatctctcagatataagcaaggttacagagttgatgtggatattcttgaccaaacatgggtggaggcgtcaaaagctgagatcatggtgatttgtggttgtttggatattcctgaccaaacatggtgatttgtacttgtaaccaaatcttatgtctcacttagaaccagcgtatggtagtacaagtacaatacatcacattatgtccgaaaacatgcgactgaaaattgattggtaaagagtcctaaaacaaaagcaatcattatgccctaaaacaaaatggattccaaaaggagttgagggctacttcaacataacctgcaactaaagatctttgatacactaaataggtctccaacatacattaaaaaagttattgttaagttattgttaagaagatcacccaatgaagaagaaactagatggtggagtggagtctagagagtaggactagaaaaaagactcgagcatgacgagctggcttggactcgcggaggctcggctcggtgcttagaacaagctcgagccgagcctatttttctggctcaagaaaagagcgagctagtttggctcgcgagctggctcgacccaacaacattttgttacataaaattt

SEQ ID NO: 49589 - DNA, 3974 bp, Zea Mays
acggcgccctccatcacgccatcgccgcccttccccacgcgatccccatccccaagccttgcgccaccatcccgccttcaaagccgcgggtgtgcacaggggcgagtccatgccgtgcccgccacccccgccgtgatagccgcctacgcgtccgtcgcccctgcctgcccccacgatgcccacttcaagaacaacaaaaatcccaagaaccgcggaagcctgcccatcctctctctcccctcacagcgaagtcgtcgtctcctcccactcgatgccgcaacctcgtgagggcaagtgcacaggttccatgcccacgcccccgtcaatcacgcgatttccttgccgtgaatgtcgtccaatctctcctcgccgtcggcgttgcgcacccccacgctctcatccactccacgactcgcctgtcctccaagtaagtgggcacgtggcggatccggtgcagccgaccctgggaggagcgcatcgcggcctccacgccctcatccactcctacacgtgccggaggtggcgctggccaagttgtcggatgacgaggaaaacgacgacgcctactactacggcgccggtgacacgtcgtgttccacactgatgacttcgagcacggcggcgttgtctactcgctcctgttccttcttttcctcctgctctgctggtgcgtgcccgtggtcggctacaacatgaacttggcctctgtcggccagggtgcctccgacaagcagttcggcacgctgtcgcggtggcggttcaaggagcccgacgtggcaacgaatcgagagcgcgatgaccagtcgcgtgcttcgcggtgcctcactctgctgctacaccatcgccgccgccgcggtggctgagcagagccgcatcaaggcgcagaaccccatcatcgagatggacgaggatgagatgacagggtcatctagaagatgataaaggataagctcatcttcccatacctggagttggatgtgaagtattacgaccttagcaacaagggcaagtcttcactatgcaaacatgtacttgtacttcgggatagtgctattgtttccctgttgtttttttacttcagctacaatgtctccttcagtccaaaacaagctggctagcatgctacatattatttgattttgcaagttgtatgatctaagaccctcgagctttgaatttgccctgaatatttactttctagcagacccatcgaatctgagaagttgtacatcctgagatgcatgtcatattcatactgcttctcttttctttttcactttttgggggctctacttatcaaaatttgagctgtattttgggcaagcatgcctttttctatgggatgtggttttttatcttcttgattgatggcacataagtttctaataggccatcaaaaccaaaaatgagtaaaacataacacaaaacaagtaaatatgttctaatggtgattgcagatcaagactaaggatccactttgttgcattcaattgactacacaaaaaacatataagaaaggacatttggtatcaaagggggcaatggatatgcccccaaacatcatggcatgatgttgtttttagcagaagttttttggtagtccaaaatgcagtgtctaaaccaaattgggtaaaacataacacaaaacaagtaaatgtgttttattgttgattacagatcaagactatgcacccactttgttgcattttgttttggtgatttattgcgtttacctgtatgtgatctattgagtctaactatagcctgagtgattacaaaggtatggtgtatgggaagtactaaaattagaactgtaaattggactatattgtgttgtctgcaaacatctgtaccttaaatagatgctttcttaacaatgaaagtttagttatcctcctaccgggctgtggtgaagatggatagattctcgttgggccattcacctgattttggtttagtgaaacactttggcaaagttcctagatttccatgaccttagcaagctaggcacactcattgctcagcatttgctaaaaccttacctaagaaaaaggtacttccgcatttgatactgaagtagtggagaccatcatgtggaatggggcctcttccactaattaatataggcacaccctgtttattactgtttagtttgttattccgcgagtacgttgatgatcctttgttaccacagtaaggtttctgaaaagaatatggatcattgaatgacatctttgggttaagacactttgacgcgtgaccaagaacatatggtaaaatggaattccagttcaatggaagttagagttctaatgtgtgcaacaatagatttactttaactcagatggtacaaataagctccattggtgaatctattgtgctttttggcgtgcatgtaagatttaagctttacaaatatagcatgtccattatatttctctttcctcgagcgatctgttgtttccatttggggtaattgtactcaataaattaatttgttcctttgaaggttattgaccttcaggcatatgttgttaagggagttgggaaggttcaagccaagtggtctccagttggtacaatttctatagaatgctccatgagggaaaattgtttcactgttgcatttgcaataagatggttgaatgtaacatgtggagttagaattattgttatatgtttccctttcctatacgccatatgtctaatttttttgttatgttcatgctagctattatcatctttggttatttttatttttaattattctactttgatagatggatgtaacaaccccttttgttatttttacttattatatgcttgcatagtttcagcgggaagaagggataagaacctcaagatcatataactattcatcccaaataaaataaacatgtttcatatagctgcttttgtcaactgtttttagtgttcttattcacttgatttgtttctctagtggtaatgtgattttaaaactactgctacctattgtttgtagaggtgaaaattagtttttccatgcgcaactctgcacatacctcttccaaaggtgtcgatggcataatttcttgtttgcattacatgacattgttttatcctaagttcaattagaattcattgttgtaattgtcaatgctttctttttcaatcagatatatccactccagcggctggtagcgaagaggggcacattagtctgcatgttctagggagtcgatggtgaaactcacaaatggcgtccttctggggcagaccatggcttcaccttcctacactaacctcattgtcgcatatcacaggacaaatatcttggtacgctatggtggtcaaggaatccaaatggaggcaatctagaatctctcagatataagcaaggttacagagttgatgtggatattcttgaccaaacatgggtggaggcgtcaaaagctgagatcatggtgatttgtggttgtttggatattcctgaccaaacatggtgatttgtacttgtaaccaaatcttatgtctcacttagaaccagcgtatggtagtacaagtacaatacatcacattatgtccgaaaacatgcgactgaaaattgattggtaaagagtcctaaaacaaaagcaatcattatgccctaaaacaaaatggattccaaaaggagttgagggctacttcaacataacctgcaactaaagatctttgatacactaaataggtctccaacatacattaaaaaagttattgttaagttattgttaagaagatcacccaatgaagaagaaactagatggtggagtggagtctagagagtaggactagaaaaaagactcgagcatgacgagctggcttggactcgcggaggctcggctcggtgcttagaacaagctcgagccgagcctatttttctggctcaagaaaagagcgagctagtttggctcgcgagctggctcgacccaacaacattttgttacataaaattt

SEQ ID NO: 49590 - DNA, 3980 bp, Zea Mays
acggcgccctccatcacgccatcgccgcccttccccacgcgatccccatccccaagccttgcgccaccatcccgccttcaaagccgcgggtgtgcacaggggcgagtccatgccgtgcccgccacccccgccgtgatagccgcctacgcgtccgtcgcccctgcctgcccccacgatgcccacttcaagaacaacaaaaatcccaagaaccgcggaagcctgcccatcctctctctcccctcacagcgaagtcgtcgtctcctcccactcgatgccgcaacctcgtgagggcaagtgcacaggttccatgcccacgcccccgtcaatcacgcgatttccttgccgtgaatgtcgtccaatctctcctcgccgtcggcgttgcgcacccccacgctctcatccactccacgactcgcctgtcctccaagtaagtgggcacgtggcggatccggtgcagccgaccctgggaggagcgcatcgcggcctccacgccctcatccactcctacacgtgccggaggtggcgctggccaagttgtcggatgacgaggaaaacgacgacgcctactactacggcgccggtgacacgtcgtgttccacactgatgacttcgagcacggcggcgttgtctactcgctcctgttccttcttttcctcctgctctgctggtgcgtgcccgtggtcggctacaacatgaacttggcctctgtcggccagggtgcctccgacaagcagttcggcacgctgtcgcggtggcggttcaaggagcccgacgtggcaacgaatcgagagcgcgatgaccagaagcagtcgcgtgcttcgcggtgcctcactctgctgctacaccatcgccgccgccgcggtggctgagcagagccgcatcaaggcgcagaaccccatcatcgagatggacgaggatgagatgacagggtcatctagaagatgataaaggataagctcatcttcccatacctggagttggatgtgaagtattacgaccttagcaacaagggcaagtcttcactatgcaaacatgtacttgtacttcgggatagtgctattgtttccctgttgtttttttacttcagctacaatgtctccttcagtccaaaacaagctggctagcatgctacatattatttgattttgcaagttgtatgatctaagaccctcgagctttgaatttgccctgaatatttactttctagcagacccatcgaatctgagaagttgtacatcctgagatgcatgtcatattcatactgcttctcttttctttttcactttttgggggctctacttatcaaaatttgagctgtattttgggcaagcatgcctttttctatgggatgtggttttttatcttcttgattgatggcacataagtttctaataggccatcaaaaccaaaaatgagtaaaacataacacaaaacaagtaaatatgttctaatggtgattgcagatcaagactaaggatccactttgttgcattcaattgactacacaaaaaacatataagaaaggacatttggtatcaaagggggcaatggatatgcccccaaacatcatggcatgatgttgtttttagcagaagttttttggtagtccaaaatgcagtgtctaaaccaaattgggtaaaacataacacaaaacaagtaaatgtgttttattgttgattacagatcaagactatgcacccactttgttgcattttgttttggtgatttattgcgtttacctgtatgtgatctattgagtctaactatagcctgagtgattacaaaggtatggtgtatgggaagtactaaaattagaactgtaaattggactatattgtgttgtctgcaaacatctgtaccttaaatagatgctttcttaacaatgaaagtttagttatcctcctaccgggctgtggtgaagatggatagattctcgttgggccattcacctgattttggtttagtgaaacactttggcaaagttcctagatttccatgaccttagcaagctaggcacactcattgctcagcatttgctaaaaccttacctaagaaaaaggtacttccgcatttgatactgaagtagtggagaccatcatgtggaatggggcctcttccactaattaatataggcacaccctgtttattactgtttagtttgttattccgcgagtacgttgatgatcctttgttaccacagtaaggtttctgaaaagaatatggatcattgaatgacatctttgggttaagacactttgacgcgtgaccaagaacatatggtaaaatggaattccagttcaatggaagttagagttctaatgtgtgcaacaatagatttactttaactcagatggtacaaataagctccattggtgaatctattgtgctttttggcgtgcatgtaagatttaagctttacaaatatagcatgtccattatatttctctttcctcgagcgatctgttgtttccatttggggtaattgtactcaataaattaatttgttcctttgaaggttattgaccttcaggcatatgttgttaagggagttgggaaggttcaagccaagtggtctccagttggtacaatttctatagaatgctccatgagggaaaattgtttcactgttgcatttgcaataagatggttgaatgtaacatgtggagttagaattattgttatatgtttccctttcctatacgccatatgtctaatttttttgttatgttcatgctagctattatcatctttggttatttttatttttaattattctactttgatagatggatgtaacaaccccttttgttatttttacttattatatgcttgcatagtttcagcgggaagaagggataagaacctcaagatcatataactattcatcccaaataaaataaacatgtttcatatagctgcttttgtcaactgtttttagtgttcttattcacttgatttgtttctctagtggtaatgtgattttaaaactactgctacctattgtttgtagaggtgaaaattagtttttccatgcgcaactctgcacatacctcttccaaaggtgtcgatggcataatttcttgtttgcattacatgacattgttttatcctaagttcaattagaattcattgttgtaattgtcaatgctttctttttcaatcagatatatccactccagcggctggtagcgaagaggggcacattagtctgcatgttctagggagtcgatggtgaaactcacaaatggcgtccttctggggcagaccatggcttcaccttcctacactaacctcattgtcgcatatcacaggacaaatatcttggtacgctatggtggtcaaggaatccaaatggaggcaatctagaatctctcagatataagcaaggttacagagttgatgtggatattcttgaccaaacatgggtggaggcgtcaaaagctgagatcatggtgatttgtggttgtttggatattcctgaccaaacatggtgatttgtacttgtaaccaaatcttatgtctcacttagaaccagcgtatggtagtacaagtacaatacatcacattatgtccgaaaacatgcgactgaaaattgattggtaaagagtcctaaaacaaaagcaatcattatgccctaaaacaaaatggattccaaaaggagttgagggctacttcaacataacctgcaactaaagatctttgatacactaaataggtctccaacatacattaaaaaagttattgttaagttattgttaagaagatcacccaatgaagaagaaactagatggtggagtggagtctagagagtaggactagaaaaaagactcgagcatgacgagctggcttggactcgcggaggctcggctcggtgcttagaacaagctcgagccgagcctatttttctggctcaagaaaagagcgagctagtttggctcgcgagctggctcgacccaacaacattttgttacataaaattt

SEQ ID NO: 49591 - DNA, 1850 bp, Zea Mays
cgccctccatcacgccatcgccgcccttccccacgcgatccccatccccaagccttgcgccaccatcccgccttcaaagccgcgggtgtgcacaggggcgagtccatgccgtgcccgccacccccgccgtgatagccgcctacgcgtccgtcgcccctgcctgcccccacgatgcccacttcaagaacaacaaaaatcccaagaaccgcggaagcctgcccatcctctctctcccctcacagcgaagtcgtcgtctcctcccactcgatgccgcaacctcgtgagggcaagtgcacaggttccatgcccacgcccccgtcaatcacgcgatttccttgccgtgaatgtcgtccaatctctcctcgccgtcggcgttgcgcacccccacgctctcatccactccacgactcgcctgtcctccaagtaagtgggcacgtggcggatccggtgcagccgaccctgggaggagcgcatcgcggcctccacgccctcatccactcctacacgtgccggaggtggcgctggccaagttgtcggatgacgaggaaaacgacgacgcctactactacggcgccggtgacacgtcgtgttccacactgatgacttcgagcacggcggcgttgtctactcgctcctgttccttcttttcctcctgctctgctggtgcgtgcccgtggtcggctacaacatgaacttggcctctgtcggccagggtgcctccgacaagcagttcggcacgctgtcgcggtggcggttcaaggagcccgacgtggcaacgaatcgagagcgcgatgaccagaagcagtcgcgtgcttcgcggtgcctcactctgctgctacaccatcgccgccgccgcggtggctgagcagagccgcatcaaggcgcagaaccccatcatcgagatggacgaggatgagatgacagggtcatctagaagatgataaaggataagctcatcttcccatacctggagttggatgtgaagtattacgaccttagcaacaagggcaagtcttcactatgcaaacatatatatccactccagcggctggtagcgaagaggggcacattagtctgcatgttctagggagtcgatggtgaaactcacaaatggcgtccttctggggcagaccatggcttcaccttcctacactaacctcattgtcgcatatcacaggacaaatatcttggtacgctatggtaggtggtcaaggaatccaaatggaggcaatctagaatctctcagatataagcaaggttacagagttgatgtggatattcttgaccaaacatgggtggaggcgtcaaaagctgagatcatggtgatttgtggttgtttggatattcctgaccaaacatggtgatttgtacttgtaaccaaatcttatgtctcacttagaaccagcgtatggtagtacaagtacaatacatcacattatgtccgaaaacatgcgactgaaaattgattggtaaagagtcctaaaacaaaagcaatcattatgccctaaaacaaaatggattccaaaaggagttgagggctacttcaacataacctgcaactaaagatctttgatacactaaataggtctccaacatacattaaaaaagttattgttaagttattgttaagaagatcacccaatgaagaagaaactagatggtggagtggagtctagagagtaggactagaaaaaagactcgagcatgacgagctggcttggactcgcggaggctcggctcggtgcttagaacaagctcgagccgagcctatttttctggctcaagaaaagagcgagctagtttggctcgcgagctggctcgacccaacaacattttgttacataaaattt

SEQ ID NO: 49592 - DNA, 1931 bp, Zea Mays
cgccctccatcacgccatcgccgcccttccccacgcgatccccatccccaagccttgcgccaccatcccgccttcaaagccgcgggtgtgcacaggggcgagtccatgccgtgcccgccacccccgccgtgatagccgcctacgcgtccgtcgcccctgcctgcccccacgatgcccacttcaagaacaacaaaaatcccaagaaccgcggaagcctgcccatcctctctctcccctcacagcgaagtcgtcgtctcctcccactcgatgccgcaacctcgtgagggcaagtgcacaggttccatgcccacgcccccgtcaatcacgcgatttccttgccgtgaatgtcgtccaatctctcctcgccgtcggcgttgcgcacccccacgctctcatccactccacgactcgcctgtcctccaagtaagtgggcacgtggcggatccggtgcagccgaccctgggaggagcgcatcgcggcctccacgccctcatccactcctacacgtgccggaggtggcgctggccaagttgtcggatgacgaggaaaacgacgacgcctactactacggcgccggtgacacgtcgtgttccacactgatgacttcgagcacggcggcgttgtctactcgctcctgttccttcttttcctcctgctctgctggtgcgtgcccgtggtcggctacaacatgaacttggcctctgtcggccagggtgcctccgacaagcagttcggcacgctgtcgcggtggcggttcaaggagcccgacgtggcaacgaatcgagagcgcgatgaccagtcgcgtgcttcgcggtgcctcactctgctgctacaccatcgccgccgccgcggtggctgagcagagccgcatcaaggcgcagaaccccatcatcgagatggacgaggatgagatgacagggtcatctagaagatgataaaggataaggtctatggattttataattgttttctggtggttttgatccatagtaacctctaatctgatcacttgatggtttgctgatgcgagtgggacataatgggattgaaatgtgtgtagctcatcttcccatacctggagttggatgtgaagtattacgaccttagcaacaaggatatatccactccagcggctggtagcgaagaggggcacattagtctgcatgttctagggagtcgatggtgaaactcacaaatggcgtccttctggggcagaccatggcttcaccttcctacactaacctcattgtcgcatatcacaggacaaatatcttggtacgctatggtggtcaaggaatccaaatggaggcaatctagaatctctcagatataagcaaggttacagagttgatgtggatattcttgaccaaacatgggtggaggcgtcaaaagctgagatcatggtgatttgtggttgtttggatattcctgaccaaacatggtgatttgtacttgtaaccaaatcttatgtctcacttagaaccagcgtatggtagtacaagtacaatacatcacattatgtccgaaaacatgcgactgaaaattgattggtaaagagtcctaaaacaaaagcaatcattatgccctaaaacaaaatggattccaaaaggagttgagggctacttcaacataacctgcaactaaagatctttgatacactaaataggtctccaacatacattaaaaaagttattgttaagttattgttaagaagatcacccaatgaagaagaaactagatggtggagtggagtctagagagtaggactagaaaaaagactcgagcatgacgagctggcttggactcgcggaggctcggctcggtgcttagaacaagctcgagccgagcctatttttctggctcaagaaaagagcgagctagtttggctcgcgagctggctcgacccaacaacattttgttacataaaattt

SEQ ID NO: 49593 - DNA, 1805 bp, Zea Mays
cgccgcccttccccacgcgatccccatccccaagccttgcgccaccatcccgccttcaaagccgcgggtgtgcacaggggcgagtccatgccgtgcccgccacccccgccgtgatagccgcctacgcgtccgtcgcccctgcctgcccccacgatgcccacttcaagaacaacaaaaatcccaagaaccgcggaagcctgcccatcctctctctcccctcacagcgaagtcgtcgtctcctcccactcgatgccgcaacctcgtgagggcaagtgcacaggttccatgcccacgcccccgtcaatcacgcgatttccttgccgtgaatgtcgtccaatctctcctcgccgtcggcgttgcgcacccccacgctctcatccactccacgactcgcctgtcctccaagtaagtgggcacgtggcggatccggtgcagccgaccctgggaggagcgcatcgcggcctccacgccctcatccactcctacacgtgccggaggtggcgctggccaagttgtcggatgacgaggaaaacgacgacgcctactactacggcgccggtgacacgtcgtgttccacactgatgacttcgagcacggcggcgttgtctactcgctcctgttccttcttttcctcctgctctgctggtgcgtgcccgtggtcggctacaacatgaacttggcctctgtcggccagggtgcctccgacaagcagttcggcacgctgtcgcggtggcggttcaaggagcccgacgtggcaacgaatcgagagcgcgatgaccagaagcagtcgcgtgcttcgcggtgcctcactctgctgctacaccatcgccgccgccgcggtggctgagcagagccgcatcaaggcgcagaaccccatcatcgagatggacgaggatgagatgacagggtcatctagaagatgataaaggataagctcatcttcccatacctggagttggatgtgaagtattacgaccttagcaacaaggatatatccactccagcggctggtagcgaagaggggcacattagtctgcatgttctagggagtcgatggtgaaactcacaaatggcgtccttctggggcagaccatggcttcaccttcctacactaacctcattgtcgcatatcacaggacaaatatcttggtacgctatggtggtcaaggaatccaaatggaggcaatctagaatctctcagatataagcaaggttacagagttgatgtggatattcttgaccaaacatgggtggaggcgtcaaaagctgagatcatggtgatttgtggttgtttggatattcctgaccaaacatggtgatttgtacttgtaaccaaatcttatgtctcacttagaaccagcgtatggtagtacaagtacaatacatcacattatgtccgaaaacatgcgactgaaaattgattggtaaagagtcctaaaacaaaagcaatcattatgccctaaaacaaaatggattccaaaaggagttgagggctacttcaacataacctgcaactaaagatctttgatacactaaataggtctccaacatacattaaaaaagttattgttaagttattgttaagaagatcacccaatgaagaagaaactagatggtggagtggagtctagagagtaggactagaaaaaagactcgagcatgacgagctggcttggactcgcggaggctcggctcggtgcttagaacaagctcgagccgagcctatttttctggctcaagaaaagagcgagctagtttggctcgcgagctggctcgacccaacaacattttgttacataaaattt

SEQ ID NO: 49594 - DNA, 1787 bp, Zea Mays
acgcgatccccatccccaagccttgcgccaccatcccgccttcaaagccgcgggtgtgcacaggggcgagtccatgccgtgcccgccacccccgccgtgatagccgcctacgcgtccgtcgcccctgcctgcccccacgatgcccacttcaagaacaacaaaaatcccaagaaccgcggaagcctgcccatcctctctctcccctcacagcgaagtcgtcgtctcctcccactcgatgccgcaacctcgtgagggcaagtgcacaggttccatgcccacgcccccgtcaatcacgcgatttccttgccgtgaatgtcgtccaatctctcctcgccgtcggcgttgcgcacccccacgctctcatccactccacgactcgcctgtcctccaagtaagtgggcacgtggcggatccggtgcagccgaccctgggaggagcgcatcgcggcctccacgccctcatccactcctacacgtgccggaggtggcgctggccaagttgtcggatgacgaggaaaacgacgacgcctactactacggcgccggtgacacgtcgtgttccacactgatgacttcgagcacggcggcgttgtctactcgctcctgttccttcttttcctcctgctctgctggtgcgtgcccgtggtcggctacaacatgaacttggcctctgtcggccagggtgcctccgacaagcagttcggcacgctgtcgcggtggcggttcaaggagcccgacgtggcaacgaatcgagagcgcgatgaccaggtgagtaaattaaattagattcgtctctccatcgtcgatgagtgccacgacctcgaggtccagctctctcctcctcattcccgcctgtccccagaagcagtcgcgtgcttcgcggtgcctcactctgctgctacaccatcgccgccgccgcggtggctgagcagagccgcatcaaggcgcagaaccccatcatcgagatggacgatatatccactccagcggctggtagcgaagaggggcacattagtctgcatgttctagggagtcgatggtgaaactcacaaatggcgtccttctggggcagaccatggcttcaccttcctacactaacctcattgtcgcatatcacaggacaaatatcttggtacgctatggtggtcaaggaatccaaatggaggcaatctagaatctctcagatataagcaaggttacagagttgatgtggatattcttgaccaaacatgggtggaggcgtcaaaagctgagatcatggtgatttgtggttgtttggatattcctgaccaaacatggtgatttgtacttgtaaccaaatcttatgtctcacttagaaccagcgtatggtagtacaagtacaatacatcacattatgtccgaaaacatgcgactgaaaattgattggtaaagagtcctaaaacaaaagcaatcattatgccctaaaacaaaatggattccaaaaggagttgagggctacttcaacataacctgcaactaaagatctttgatacactaaataggtctccaacatacattaaaaaagttattgttaagttattgttaagaagatcacccaatgaagaagaaactagatggtggagtggagtctagagagtaggactagaaaaaagactcgagcatgacgagctggcttggactcgcggaggctcggctcggtgcttagaacaagctcgagccgagcctatttttctggctcaagaaaagagcgagctagtttggctcgcgagctggctcgacccaacaacattttgttacataaaattt

SEQ ID NO: 49595 - DNA, 2514 bp, Zea Mays
agctggggcaagcccaatgggcttccatcactcatcacgcctctcaccaatcacgaccagatgcccagttgcccaccacggcgtccagtcatgtccagcaccaccgccgctgctttccgcctgggccagcgcgtgcacgccgccggcgacccccgccgcctaggcacggtgcgctacctgggccccgtagagggccacggcggagtctgggtcggcgtcgactgggatgatggcgctggcggccggcacgatggctcgctcgccggccgccgatactttgttgccgtgggagagtgctcggccaccttcgcgcgccccacggcgctcagcggagggatctcgctcccggacgcgctccgcctacgttaccgcgttcaggacttcaccaaggaggaacaggatgagatgtatgtcttctcgacaagccagaagcgggtctcggttgaatttgttggcacagacaaagttcaggagaagctcaacaacttcaatgagttggccagtgcatccgtttcttacatgggagtgagctcaattggagcgcccaatgaactaaacagtttggttccaaatctcaaacttcttgacttaactggaaatctgttctcacagtggcaagatatattctctctttgtcaagcactggcatccctggaagttcttaatttgacaaataataccatggagaatgatgttgtagaaactccaatgctcgagaatatccgaattcttgttctcaataactgtggtgtaacatgggaactggttgaaaagattaaagtttccttttcatgtatcagtgaactccacctgatgtcaaacaggcttaatatgatcatgaccctagatggaaagttcgtacaaggtttcaacacactgcggctcctaaatctagaagataatcatattgattcatgggatgaaattgtgaaactttcttacttaagaagtttggaacaactccatttgaacaaaaacaggttaaagcatgtgaaatatccatctaatctttcaccagatggacctattgatgatgcagctgctgtgccatttgaaaatttgcaagttcttttgttaggatctaatgacatagatgacttttcttcagtggattcacttaacctgttcccaagtttaagggatgtcaggctttctgacaatcctgtagctgatcctgccaagggtggtgctcctcgttttgtgcttgttgctcgacttggaaaagttggaatactaaatggcagtgagataagtccacgtgaacggagggaatctgaaatacgatatgtccgccttgttatgggaaaaatagaatcaaatgaccaagaagagatcagacggcttcaccctagattcgctgaactgaagtcctttcatggtattgaagatgagaagccaacttcaagcatatcagggccacagaagatggcttctggccttataagtattacgttgaaatgtgtgggtccatcaatgggtgagaagcaaccactgacaaagaaactgcctgcgacaacaactgtcgggaagttaaaatctttgtgcgaaagcttcttcaaactgaaggacataaaagtgaaactgttcgtcgaagaagagaacttcttacatggattaagcgatgtgttgagtgtacaaggaaggcattgaggaacaaagaagttgattgaggaccaagtaatgatatttccaacattcccaaccaggcaaccacgccattagatttaaagccatacttgggtgaggagcacacattagagtcgaggatgactctactgccagaaagggaggatgatgaagactgtactgatgaacttaattatcaggtgaactcgttccatgctgttgaagctaattcttctttaaatgaagtactaaagcattgcgatgaatttattatactcaggtatttgggaggtgaaccatcttggagtggagaaggcaataaggcaataaaagttgttgcacccgagaggatttcgtatctgcaacaagtgcatgtttaagagggcatatctttcaactcccaaggttgtttaatgcaaataagcacttgttggaaaggtatcttcgtctactttctagtggatcaagaatcaatgacagatcagacccgaagcatctatgaacgaccgagagaacttcgtgactccaccccgaggggattttttaactgcaacaagtacaagtttaaatggggcatatctttcaactcccaaggttgtttaatgcaaataattacttgttggaaaaatatctttgtctactttctaatggatcaagaatcaatgagagatcacaaccaaggcgtccaggaacgaccgagagaacttcatgactccatagagctccgcttttctatgcttctatctaagcatctagtagccacaaaagaacttgggttttgtttgatgtaagtttatcctttgctacttccttgtaaacgcgtgtgtcgactagaccactcggatacttgaaacatgaccccaactttatcagatccatgagtgtttg

SEQ ID NO: 49596 - DNA, 2085 bp, Zea Mays
gaccagatgcccagttgcccaccacggcgtccagtcatgtccagcaccaccgccgctgctttccgcctgggccagcgcgtgcacgccgccggcgacccccgccgcctaggcacggtgcgctacctgggccccgtagagggccacggcggagtctgggtcggcgtcgactgggatgatggcgctggcggccggcacgatggctcgctcgccggccgccgatactttgttgccgtgggagagtgctcggccaccttcgcgcgccccacggcgctcagcggagggatctcgctcccggacgcgctccgcctacgttaccgcgttcaggacttcaccaaggaggaacaggatgagatgtatgtcttctcgacaagccagaagcgggtctcggttgaatttgttggcacagacaaagttcaggagaagctcaacaacttcaatgagttggccagtgcatccgtttcttacatgggagtgagctcaattggagcgcccaatgaactaaacagtttggttccaaatctcaaacttcttgacttaactggaaatctgttctcacagtggcaagatatattctctctttgtcaagcactggcatccctggaagttcttaatttgacaaataataccatggagaatgatgttgtagaaactccaatgctcgagaatatccgaattcttgttctcaataactgtggtgtaacatgggaactggttgaaaagattaaagtttccttttcatgtatcagtgaactccacctgatgtcaaacaggcttaatatgatcatgaccctagatggaaagttcgtacaaggtttcaacacactgcggctcctaaatctagaagataatcatattgattcatgggatgaaattgtgaaactttcttacttaagaagtttggaacaactccatttgaacaaaaacaggttaaagcatgtgaaatatccatctaatctttcaccagatggacctattgatgatgcagctgctgtgccatttgaaaatttgcaagttcttttgttaggatctaatgacatagatgacttttcttcagtggattcacttaacctgttcccaagtttaagggctttctgacaatcctgtagctgatcctgccaagggtggtgctcctcgttttgtgcttgttgctcgacttggaaaagttggaatactaaatggcagtgagataagtccacgtgaacggagggaatctgaaatacgatatgtccgccttgttatgggaaaaatagaatcaaatgaccaagaagagatcagacggcttcaccctagattcgctgaactgaagtcctttcatggtattgaagatgagaagccaacttcaagcatatcagggccacagaagatggcttctggccttataagtattacgttgaaatgtgtgggtccatcaatgggtgagaagcaaccactgacaaagaaactgcctgcgacaacaactgtcgggaagttaaaatctttgtgcgaaagcttcttcaaactgaaggacataaaagtgaaactgttcgtcgaagaagagggatgccctctaccacaaccagtggaggaggacacggcctctctgatggagcttggaattggctcgggcgcaaccattgttgtggacgaagagagctagccagtcgtctttagagaagggccaactgtatggcgcaaactgacgcttcagctgttattaagttttcgaagagaagatagctgatgacgctcttcgttgcccttatatacttctttctgtgggaatatgcacgtgatgaatattggtgcgggtttgggcttcaaaatggactagcatagtaaaaacattgtgaggacggttgtttggttgggagaagttttctttttttattttcgtcaacgcaacgaactacgtcaaatttttttttgattactgtggtgtgtcgctgacgttttccacaactgaaaccactctgtcattgtgccacagataatttttctttttatttaataagcaaaagaaattagggcctccttccatacacgtagctaattaccattcaaattagttatagctagctagctagttatttaataattaattaagag

SEQ ID NO: 49597 - DNA, 2238 bp, Zea Mays
gaccagatgcccagttgcccaccacggcgtccagtcatgtccagcaccaccgccgctgctttccgcctgggccagcgcgtgcacgccgccggcgacccccgccgcctaggcacggtgcgctacctgggccccgtagagggccacggcggagtctgggtcggcgtcgactgggatgatggcgctggcggccggcacgatggctcgctcgccggccgccgatactttgttgccgtgggagagtgctcggccaccttcgcgcgccccacggcgctcagcggagggatctcgctcccggacgcgctccgcctacgttaccgcgttcaggacttcaccaaggaggaacaggatgagatgtatgtcttctcgacaagccagaagcgggtctcggttgaatttgttggcacagacaaagttcaggagaagctcaacaacttcaatgagttggccagtgcatccgtttcttacatgggagtgagctcaattggagcgcccaatgaactaaacagtttggttccaaatctcaaacttcttgacttaactggaaatctgttctcacagtggcaaaccctagatggaaagttcgtacaaggtttcaacacactgcggctcctaaatctagaagataatcatattgattcatgggatgaaattgtgaaactttcttacttaagaagtttggaacaactccatttgaacaaaaacaggttaaagcatgtgaaatatccatctaatctttcaccagatggacctattgatgatgcagctgctgtgccatttgaaaatttgcaagttcttttgttaggatctaatgacatagatgacttttcttcagtggattcacttaacctgttcccaagtttaagggatgtcaggctttctgacaatcctgtagctgatcctgccaagggtggtgctcctcgttttgtgcttgttgctcgacttggaaaagttggaatactaaatggcagtgagataagtccacgtgaacggagggaatctgaaatacgatatgtccgccttgttatgggaaaaatagaatcaaatgaccaagaagagatcagacggcttcaccctagattcgctgaactgaagtcctttcatggtattgaagatgagaagccaacttcaagcatatcagggccacagaagatggcttctggccttataagtattacgttgaaatgtgtgggtccatcaatgggtgagaagcaaccactgacaaagaaactgcctgcgacaacaactgtcgggaagttaaaatctttgtgcgaaagcttcttcaaactgaaggacataaaagtgaaactgttcgtcgaagaagagaacttcttacatggattaagcgatgtgttgagtgtacaaggaaggcattgaggaacaaagaagttgattgaggaccaagtaatgatatttccaacattcccaaccaggcaaccacgccattagatttaaagccatacttgggtgaggagcacacattagagtcgaggatgactctactgccagaaagggaggatgatgaagactgtactgatgaacttaattatcaggtgaactcgttccatgctgttgaagctaattcttctttaaatgaagtactaaagcattgcgatgaatttattatactcaggtatttgggaggtgaaccatcttggagtggagaaggcaataaggcaataaaagttgttgcacccgagaggatttcgtatctgcaacaagtgcatgtttaagagggcatatctttcaactcccaaggttgtttaatgcaaataagcacttgttggaaaggtatcttcgtctactttctagtggatcaagaatcaatgacagatcagacccgaagcatctatgaacgaccgagagaacttcgtgactccaccccgaggggattttttaactgcaacaagtacaagtttaaatggggcatatctttcaactcccaaggttgtttaatgcaaataattacttgttggaaaaatatctttgtctactttctaatggatcaagaatcaatgagagatcacaaccaaggcgtccaggaacgaccgagagaacttcatgactccatagagctccgcttttctatgcttctatctaagcatctagtagccacaaaagaacttgggttttgtttgatgtaagtttatcctttgctacttccttgtaaacgcgtgtgtcgactagaccactcggatacttgaaacatgaccccaactttatcagatccatgagtgtttg

SEQ ID NO: 49598 - DNA, 1691 bp, Zea Mays
gttagtgcagtactgcagtgcgtgccgaccgacgcctcctgaatttgctgcctccacagttcctttgatccgatgagatgtatgtcttctcgacaagccagaagcgggtctcggttgaatttgttggcacagacaaagttcaggagaagctcaacaacttcaatgagttggccagtgcatccgtttcttacatgggagtgagctcaattggagcgcccaatgaactaaacagtttggttccaaatctcaaacttcttgacttaactggaaatctgttctcacagtggcaagatatattctctctttgtcaagcactggcatccctggaagttcttaatttgacaaataataccatggagaatgatgttgtagaaactccaatgctcgagaatatccgaattcttgttctcaataactgtggtgtaacatgggaactggttgaaaagattaaagtttccttttcatgtatcagtgaactccacctgatgtcaaacaggcttaatatgatcatgaccctagatggaaagttcgtacaaggtttcaacacactgcggctcctaaatctagaagataatcatattgattcatgggatgaaattgtgaaactttcttacttaagaaggatctaatgacatagatgacttttcttcagtggattcacttaacctgttcccaagtttaagggatgtcaggctttctgacaatcctgtagctgatcctgccaagggtggtgctcctcgttttgtgcttgttgctcgacttggaaaagttggaatactaaatggcagtgagataagtccacgtgaacggagggaatctgaaatacgatatgtccgccttgttatgggaaaaatagaatcaaatgaccaagaagagatcagacggcttcaccctagattcgctgaactgaagtcctttcatggtattgaagatgagaagccaacttcaagcatatcagggccacagaagatggcttctggccttataagtattacgttgaaatgtgtgggtccatcaatgggtgagaagcaaccactgacaaagaaactgcctgcgacaacaactgtcgggaagttaaaatctttgtgcgaaagcttcttcaaactgaaggacataaaagtgaaactgttcgtcgaagaagagggatgccctctaccacaaccagtggaggaggacacggcctctctgatggagcttggaattggctcgggcgcaaccattgttgtggacgaagagagctagccagtcgtctttagagaagggccaactgtatggcgcaaactgacgcttcagctgttattaagttttcgaagagaagatagctgatgacgctcttcgttgcccttatatacttctttctgtgggaatatgcacgtgatgaatattggtgcgggtttgggcttcaaaatggactagcatagtaaaaacattgtgaggacggttgtttggttgggagaagttttctttttttattttcgtcaacgcaacgaactacgtcaaatttttttttgattactgtggtgtgtcgctgacgttttccacaactgaaaccactctgtcattgtgccacagataatttttctttttatttaataagcaaaagaaattagggcctccttccatacacgtagctaattaccattcaaattagttatagctagctagctagttatttaataattaattaagag

SEQ ID NO: 49599 - DNA, 2394 bp, Zea Mays
ccggcccgccggccggcgaatggtcgcaagcacgcacggtggcgcgcgccgaaaacgtacaaacgcacgtgtcgtagaggtctccgtcgcccgatccgccgccgcgacgaccccgatccactcgccgccgtggctgtgcccctccaaaccacacagctctaagctaggcatgaaggcatctactagtatttcttttttccgcgaccgcgaggggattaggagaaagtaaaaaaaaaaaaaccgcgacaacatccaaattcacggcgcgcgccgcgccatccccgcagctcgtctcctgtgtgccccggcccagcgaccggtcccacttccacgagcgggccccggcccccggcgtccggtccgggaggagggacgcttcgtggaaacctgcacgagccatcgaccttccagaagacgacttggcgccgtgcgtcgcgcatccgacggcccggcgaccctcccaagcgcccccggtttgactcgtcgccgggggtggcaactataagtacctgccctccccgtccgtccaaagaactctaactcctctaccagccggcgcacgccgacgccgacgccgacgggcacagtactagcgaccgagctgcgagcgacgccagggcatgggtgacactggcgcgaacatggcccactggggcgggctctacggccggggcggcggcggcggggttgtcgcgccggcgacgacggagacggtgacgacggcaggaggcggcgggtcggtgtcgagcccgacgtcgggcgggtcgggcggcagcccgagccgcgcgcagctgcagcccggggtcggggtggagggcgggcgcgtgggcaagcccgcgcggcggcggtcgcgcgcgtcccgccgcgcgcccgtcacgctgctcaacaccgacacctccaacttccgcgccatggtgcagcagttcaccggcgtcccgcccgggccctacggccccggccccggcggcggcggggggcccgtcatcagcttcggcgccgagtacggcggcgcgcagctggtgcgcccgtcgccgacgtccgccgtcatgtcgttcgacccccagcaccaccaccaccggccgacggcggcgtcgtcgctgcagagccagctgttcaggccgcagcagcagcagcagtacggtgccgacgtcggcggctacggcgtgcacggcatggccatggcggcgccgtcctccttcctgcacggcgggttcgaggcctcgtcggaggaccggctgctgctgcagagcatgatgcaggcctcgacgatgcccaccggccacccgccccccactaacaacggcaatggataccacttcggctagctgatcgatccaccggtttgatccccaccgcacaaccgaggtaattaatataataagcggggagctagatcagggatccatggaacgaagaagccgtcgtcgatgaccacgagctgatgatgacgcgtgttctagcttgttgctgctgcttaagcagctaagcattttttttgttatgttttttttgctggcctcgcagaaggctagctaattacgagtaagtaactaagtatagttagtagtggtagtgttatcttgctgctttaactagaaaaggagttaagctaggtcgatgtaaatagttccctttcctttttttctttttctttttgaaaaaatatcaatcaagaagtttaattttggggccgtcgtcaggttgttggcgcgcgtgcgctttcggtgtgtgtacatacagctagtgcagctgatagcgaggaatcttttctagaagattgccttggttcggaagcaaagttcaagagggcttctctctctacccctcccctctctacttgtatgctagtacgtactgattaattatagtattattattatggtcccgccgctaattaatcgcacgttggtcaaatgagtgtggaacatatgctttttcttttacaataataaatcatcagacttgactttggaaacttgtctttagcgtcggattaaaacctcgaaaagagagattagaaggaaagtgccagtcaatctctacataaattggtagtgatatagacctccattgttgtttcttgtcactaaccaacggtggtatcctcttaattattaccggtccagaacattggtatggcaatactgttagtccaatacataagttgtgagtgttatatatatatgatcattgtcggcatgtatatcgagttggcgatgatcttgtcccgcttaattattatttcaatatttctattttagttttgtgttgtcattgttatttcctatggttactagatttatttgcatacacacaataaatccatcaagacttgtatattacaaacgttacagtagtaacgcatatatatgttataataaaaatgaacatatc

SEQ ID NO: 49600 - DNA, 1491 bp, Zea Mays
ctcatgcatatcgtagtgaaatgagtccgttctatggaaatttacttgtggcctgaatcgatttgtggtttctgatgaatttggcattccctatttggttatacctaccgtcagcgcttgagaaaggtcatacccctggctgccgctaagacacatttaaggcttccagtatagtaagctaccgcgaggcccgccgctcctagggccccatgccccgatggccaaggcagaggcttgaactggataacttgatactggggcaccccgaagtcataactacaccatagtgctgaagagcaagaaacaagtccattcaggttactgtatagtgggagcttctagcttttctgtgatattagtacctttcataagcaaccatgtggcctttatcagtttcttaagtgtgaagcttgatttagatctttaaaggtttccaaacacatatcttcttgttggatgctgcaatgatgagttgacacataaattcaaaggaagaactgttatgactgaggatgagcgatatgagtcacttcgtcattgcaagtgggttgatgaagtcattccagatgctccatgggtggtgacagaagagttcttggataagcataacattgattttgttgctcatgattctctgccgtatgctgatgctagtggagctggtaacgatgtttatgaacatgtaaaaaagcttggtaagtttaaggagactcagcgcactgatgggatatcaacatcggacattataatgcggattgttaaagattataatgagtatgttatgcggaatctggccaggggctacactagaaaggatcttggtgttagttatgtcaaggaaaaacgactgcgagtgaacatgggacttaaaaacctgcgtgacagagtgaaacagcaccaagaaaaagtaggggagaagtggagcacggttgcaaaactccaggaagagtgggtggaaaatgcagaccgctgggtggctggtttcttagagaagtttgaggaagggtgccactcaatggggacagccatcaaggagaggatccaggagaggctcatcaaggcacaatccagcgactttggcagcctcctacagtacgacagctacgattctgatgaagccaaagaaaacgacgaggacgaagacgaagatgaactctttgaagacgtcaaggaatagcacctccgtacatatacaatggttttgtagctgcaaattgtgttgtgagtcagttgcctctctctggttggtgatctttatatatggtctcaaaggtaggtcaggttgcaatgtttgtagctgctcttggtgtttgttcaggcaacgcatggttgtaaaagctgtggaaagactcttgtgcagtcaaggatacagattccgatggttacctttgggttagaacatatacggctgtaaaattggaagtcgaggtggttaaaactctgatatcttgtctgttttctttcaaaaaaggagaagaaaacaaattataa

SEQ ID NO: 49601 - DNA, 1082 bp, Zea Mays
caagaaacaagtccattcaggtttccaaacacatatcttcttgttggatgctgcaatgatgagttgacacataaattcaaaggaagaactgttatgactgaggatgagcgatatgagtcacttcgtcattgcaagtgggttgatgaagtcattccagatgctccatgggtggtgacagaagagttcttggataagcataacattgattttgttgctcatgattctctgccgtatgctgatgctagtggagctggtaacgatgtttatgaacatgtaaaaaagcttggtaagtttaaggagactcagcgcactgatgggatatcaacatcggacattataatgcggattgttaaagattataatgagtatgttatgcggaatctggccaggggctacactagaaaggatcttggtgttagttatgtcaaggaaaaacgactgcgagtgaacatgggacttaaaaacctgcgtgacagagtgaaacagcaccaagaaaaagtaggggagaagtggagcacggttgcaaaactccaggaagagtgggtggaaaatgcagaccgctgggtggctggtttcttagagaagtttgaggaagggtgccactcaatggggacagccatcaaggagaggatccaggagaggctcatcaaggcacaatccagcgactttggcagcctcctacagtacgacagctacgattctgatgaagccaaagaaaacgacgaggacgaagacgaagatgaactctttgaagacgtcaaggaatagcacctccgtacatatacaatggttttgtagctgcaaattgtgttgtgagtcagttgcctctctctggttggtgatctttatatatggtctcaaaggtaggtcaggttgcaatgtttgtagctgctcttggtgtttgttcaggcaacgcatggttgtaaaagctgtggaaagactcttgtgcagtcaaggatacagattccgatggttacctttgggttagaacatatacggctgtaaaattggaagtcgaggtggttaaaactctgatatcttgtctgttttctttcaaaaaaggagaagaaaacaaattataa

SEQ ID NO: 49602 - DNA, 598 bp, Zea Mays
atccacctgcaagcaagagactctgcagccatctgggcgaaaactcaagcacgcggcgatgctgcgccttcgcgcttgcggcggcacggcaccggcatcggtgcccgcgctcgtcaggtcccgcctctccaggagatcctcctccgcagcctacgccgccgctaccgtcgcttccgcttcctcctcttcgtccaccctggaagacctcgccgccgagcacagagagatcccacatgcgcacttaatatggaaagactgcttgaagcaaggatttcatccgctgttggtttgcggcacagtttgggtctcccttcagctgacacaaatgcttatcgcctcatcaacagtgaaggagacagattgtctggtctaatagtggacatctttgctgatgttgctgtcattgcttcatctgctgcttgggttgagaaatataggcaagaaatacaatttcttgttagcaaagttaatggcgtcagccatataaagtggaggccatcgacagatattttgaaagaagaaggattggatatatcagagcataaggagcctgcttcaacatgctcaactgtcaaggaaccaatgtgtctcttacggc

SEQ ID NO: 49603 - DNA, 1828 bp, Zea Mays
  misc_feature (1827)..(1828): n is a, c, g, or t
atccacctgcaagcaagagactctgcagccatctgggcgaaaactcaagcacgcggcgatgctgcgccttcgcgcttgcggcggcacggcaccggcatcggtgcccgcgctcgtcaggtcccgcctctccaggagatcctcctccgcagcctacgccgccgctaccgtcgcttccgcttcctcctcttcgtccaccctggaagacctcgccgccgagcacagaggtttggcaaaggtcattttaaagaaggggaagacccaaatattccgagatgggagcccaatggtgtatagcggtgctgttaataggataatcggtcgacctcctccgaaatctggcgatattgttctagtagctgatggaacagagaaacctattggatggggtctctataactctgtgtctatgttttgtgttcggttgatgcagctagaagaagaggcaagaaggtgacataggtaccagtttttacaatcacctacattttagcagctcaagctgacatattacttaccttctttcttttcagagatcccacatgcgcacttaatatggaaagactgcttgaagcaaggatttcatccgctgttggtttgcggcacagtttgggtctcccttcagctgacacaaatgcttatcgcctcatcaacagtgaaggagacagattgtctggtctaatagtggacatctttgctgatgttgctgtcattgcttcatctgctgcttgggttgagaaatataggcaagaaatacaatttcttgttagcaaagttaatggcgtcagccatataaagtggaggccatcgacagatattttgaaagaagaaggattggatatatcagagcataaggagcctgcttcaacatgctcaactgtcaaggtcatggagaatggcattgtctacttagtctcattagagggtcagaagacagggttttatgcagatcaacgggaaaaccgctatatcatatcattactttcaaaggatcaaagagtccttgacctttgctgctacagtggcggctttgctcttaacgcagctaagggtggcgctgataatgtcattggatcagcactagaccttgccaatgagaatattgttctcaatgagctaaaccaaggaaaagtctcatttgtaaaaggagatgcaactacattcatgaaaggagctatctcagaaaatgagctatgggacttggtaatccttgaccctccaaagttggcgccacgaaagaaggtatacataattgcttcctctgggcctggaggattaacttgttaacatctagtttgacttgaaatgaatctatgtttcatctgtgcatgtgaacgtggaagcatggtatatacagtgtttatgggttaacagttcatgactaacacgtgaatctactcaatttccctctttcttagtcctttttttgttgcatttatgtgacagaccttgtgttggcggcttccaaatatctggggtctatgaaagtaataactggggcaagccttacccctgcattttgtagagaggatgcatcaaacccaggacctttggctcagtgaaaaagcttctcaccactacgccaggcctgcccttcgcatttatgtcgtgccaatccaacagaattccctattttatttccccaaaaagtcccgtttctttcagtttttggaatgagatatttacgaaatccccatgaatagaataaaaccttgttttcatgctatttccataagattcctcttaaacatgccatgagctgcagccaatcctttgtcccaatttcaggcagctggtacatatttactcacactaatattatctaatcann

SEQ ID NO: 49604 - DNA, 1333 bp, Zea Mays
  misc_feature (1332)..(1333): n is a, c, g, or t
atccacctgcaagcaagagactctgcagccatctgggcgaaaactcaagcacgcggcgatgctgcgccttcgcgcttgcggcggcacggcaccggcatcggtgcccgcgctcgtcaggtcccgcctctccaggagatcctcctccgcagcctacgccgccgctaccgtcgcttccgcttcctcctcttcgtccaccctggaagacctcgccgccgagcacagagagatcccacatgcgcacttaatatggaaagactgcttgaagcaaggatttcatccgctgttggtttgcggcacagtttgggtctcccttcagctgacacaaatgcttatcgcctcatcaacagtgaaggagacagattgtctggtctaatagtggacatctttgctgatgttgctgtcattgcttcatctgctgcttgggttgagaaatataggcaagaaatacaatttcttgttagcaaagttaatggcgtcagccatataaagtggaggccatcgacagatattttgaaagaagaaggattggatatatcagagcataaggagcctgcttcaacatgctcaactgtcaaggtcatggagaatggcattgtctacttagtctcattagagggtcagaagacagggttttatgcagatcaacgggaaaaccgctatatcatatcattactttcaaaggatcaaagagtccttgacctttgctgctacagtggcggctttgctcttaacgcagctaagggtggcgctgataatgtcattggcattgattcatcaggatcagcactagaccttgccaatgagaatattgttctcaatgagctaaaccaaggaaaagtctcatttgtaaaaggagatgcaactacattcatgaaaggagctatctcagaaaatgagctatgggacttggtaatccttgaccctccaaagttggcgccacgaaagaagaccttgtgttggcggcttccaaatatctggggtctatgaaagtaataactggggcaagccttacccctgcattttgtagagaggatgcatcaaacccaggacctttggctcagtgaaaaagcttctcaccactacgccaggcctgcccttcgcatttatgtcgtgccaatccaacagaattccctattttatttccccaaaaagtcccgtttctttcagtttttggaatgagatatttacgaaatccccatgaatagaataaaaccttgttttcatgctatttccataagattcctcttaaacatgccatgagctgcagccaatcctttgtcccaatttcaggcagctggtacatatttactcacactaatattatctaatcann

SEQ ID NO: 49605 - DNA, 2395 bp, Zea Mays
  misc_feature (2394)..(2395): n is a, c, g, or t
cgagcacagaggtcgctcctttctgtttcacatatctctgcctatctctgccgcatactgtcgaacagttctcgcgccccagcttcatcccatgttgttgcttagagctagcgccgatttgtctccttcacctcattgtgtggtgcgcggcgcgagcggagttaaatcccgccaagaagatggcttggtgtgcctaccaacgcaactggcaacggccatgttgcttcctgtttactgaaatgcaaggggagagtgcattgctttcagtttttacgcagcagcgaaattaagtgctaggtttatgcgggcgaggcgtctgattgtagcttactagcttcagcttatagagcatctgccaataaaaggttcgctcctgtaagaactgagaactgcctttgctaagattgcttctcttatggggtgttggtttgaggaaccactccatccaaaatgaaatggtgcatcatgggtccatttctcaaatttggtgggatgacttcattccacatattagtactaattaactaactatgaggaataaggtggtgatgtatcaactcatttcattccacaaaccaaacaaaaaagttaggagtgagaagatgatggactagctcattactcaaaccaaacaccccactaatcaccagggaccgggatttcttccaatccatcatatccttttccccggatatttattcaaaactctagtgctcctgggtggcatatatatttcgtgtcactttgttatttgatgcaacattaagaaacaatggtaccagcagcataaaagttattaataaatttctaaatcattttacaaaggtcagcctcctccatcggctggctagagctcatctcattcagaaattggcgcactgtaataccaaacatctttttgattggttaatagctatctgacttagtgacttcacttcaattgaagtaaagactagctttaaacatgcttccttgtttaggtttggcaaaggtcattttaaagaaggggaagacccaaatattccgagatgggagcccaatggtgtatagcggtgctgttaataggataatcggtcgacctcctccgaaatctggcgatattgttctagtagctgatggaacagagaaacctattggatggggtctctataactctgtgtctatgttttgtgttcggttgatgcagctagaagaagaggcaagaaggtgacataggtaccagtttttacaatcacctacattttagcagctcaagctgacatattacttaccttctttcttttcagagatcccacatgcgcacttaatatggaaagactgcttgaagcaaggatttcatccgctgttggtttgcggcacagtttgggtctcccttcagctgacacaaatgcttatcgcctcatcaacagtgaaggagacagattgtctggtctaatagtggacatctttgctgatgttgctgtcattgcttcatctgctgcttgggttgagaaatataggcaagaaatacaatttcttgttagcaaagttaatggcgtcagccatataaagtggaggccatcgacagatattttgaaagaagaaggattggatatatcagagcataaggagcctgcttcaacatgctcaactgtcaaggtcatggagaatggcattgtctacttagtctcattagagggtcagaagacagggttttatgcagatcaacgggaaaaccgctatatcatatcattactttcaaaggatcaaagagtccttgacctttgctgctacagtggcggctttgctcttaacgcagctaagggtggcgctgataatgtcattggcattgattcatcaggatcagcactagaccttgccaatgagaatattgttctcaatgagctaaaccaaggaaaagtctcatttgtaaaaggagatgcaactacattcatgaaaggagctatctcagaaaatgagctatgggacttggtaatccttgaccctccaaagttggcgccacgaaagaagaccttgtgttggcggcttccaaatatctggggtctatgaaagtaataactggggcaagccttacccctgcattttgtagagaggatgcatcaaacccaggacctttggctcagtgaaaaagcttctcaccactacgccaggcctgcccttcgcatttatgtcgtgccaatccaacagaattccctattttatttccccaaaaagtcccgtttctttcagtttttggaatgagatatttacgaaatccccatgaatagaataaaaccttgttttcatgctatttccataagattcctcttaaacatgccatgagctgcagccaatcctttgtcccaatttcaggcagctggtacatatttactcacactaatattatctaatcann

SEQ ID NO: 49606 - DNA, 1473 bp, Zea Mays
  misc_feature (1472)..(1473): n is a, c, g, or t
gcgaggcgtctgattgtagcttactagcttcagcttatagagcatctgccaataaaaggtttggcaaaggtcattttaaagaaggggaagacccaaatattccgagatgggagcccaatggtgtatagcggtgctgttaataggataatcggtcgacctcctccgaaatctggcgatattgttctagtagctgatggaacagagaaacctattggatggggtctctataactctgtgtctatgttttgtgttcggttgatgcagctagaagaagaggcaagaaggtgacataggtaccagtttttacaatcacctacattttagcagctcaagctgacatattacttaccttctttcttttcagagatcccacatgcgcacttaatatggaaagactgcttgaagcaaggatttcatccgctgttggtttgcggcacagtttgggtctcccttcagctgacacaaatgcttatcgcctcatcaacagtgaaggagacagattgtctggtctaatagtggacatctttgctgatgttgctgtcattgcttcatctgctgcttgggttgagaaatataggcaagaaatacaatttcttgttagcaaagttaatggcgtcagccatataaagtggaggccatcgacagatattttgaaagaagaaggattggatatatcagagcataaggagcctgcttcaacatgctcaactgtcaaggtcatggagaatggcattgtctacttagtctcattagagggtcagaagacagggttttatgcagatcaacgggaaaaccgctatatcatatcattactttcaaaggatcaaagagtccttgacctttgctgctacagtggcggctttgctcttaacgcagctaagggtggcgctgataatgtcattggcattgattcatcaggatcagcactagaccttgccaatgagaatattgttctcaatgagctaaaccaaggaaaagtctcatttgtaaaaggagatgcaactacattcatgaaaggagctatctcagaaaatgagctatgggacttggtaatccttgaccctccaaagttggcgccacgaaagaagaccttgtgttggcggcttccaaatatctggggtctatgaaagtaataactggggcaagccttacccctgcattttgtagagaggatgcatcaaacccaggacctttggctcagtgaaaaagcttctcaccactacgccaggcctgcccttcgcatttatgtcgtgccaatccaacagaattccctattttatttccccaaaaagtcccgtttctttcagtttttggaatgagatatttacgaaatccccatgaatagaataaaaccttgttttcatgctatttccataagattcctcttaaacatgccatgagctgcagccaatcctttgtcccaatttcaggcagctggtacatatttactcacactaatattatctaatcann

SEQ ID NO: 49607 - DNA, 2022 bp, Zea Mays
cgggaaacgtcaaaaaagtcactcgcgactcgcgagttggaactctggcgtccgccatcggcccatcgccactcgtcgtcttcctcgctcgcacacccgtcccatccagtttttaaatggcgacggcgatgatgactatgcgacgcgcggcggcgctcggcgcccgacacatcccgcccgccgccgccttctcccgccacatgagtgcggacgcgagcgccgcgatggagaagatccgcgccgcgggtctgctcaaaatccagcaactggtgaggtccttgcaaacgtgtcctttatgggcagcagagaaacatctgatgctattgcttctgctcacagtacattctattcttggagtaaactcactgcaagtgagagaggcaaggcactaagaaaatggtacgatctaattatttcacacaaggaagagcttgcacttctcatgacactggagcaggggaaacctatgaaagaagcccttggtgaggtcaattatggtgcaagtttcatagaatattttgcagaggaagcaaagcgcatatatggtgatataattcctccaactttatctgatcgtagattgttggttctgaagcagcctgttggggtagttggagctattacaccatggaattttccattagcaatgataacccgaaaggttggaccagctttggcctgtggctgcactgttgttgtcaagccatcagagttcacacctctgacatcattagctgcagcagatcttgctcttcaagctggaataccagcgggtgcactaaatgttgtgatgggcaatgctcctgagataggtgatgcattactgcagagtacacagaaagattacgttcactggatcaacagctgttggcaaaaaactgatggctgaatctgcaaatactgtgaaaaaggtctctttggaacttggtgggaatgcaccttgcattgtttttgatgatgcagacattgatgttgctgttaaaggcagtcttgctgccaagttccgtaacagtggacagacatgtgtttgtgcaaacaggatattggtgcaagaaggtatctacgagaagtttgcatctgcattcatcaaggctgttcagagtttgaaggttgggaatgggctagaagagagtacatctcagggtcctctgattaacgaagctgctgttcaaaaggtggagaagttcataaatgacgcgacttcaaagggagcaaatgtcatgctaggtggtaaaagacacagcctggggatgtcattttatgagccaactgtagtagggaatgtcagcaatgatatgcttcttttcagagaagaagtttttggtccagttgcaccccttataccattcaaaactgaggaagaagcagtccatatggccaacgatacaaacgcaggcttagctgcatacatatttaccaagagcatacctcgttcatggcgtgtatccgaatctcttgaatacggcttagttggggtaaacgaggggattatttcaacagaggtggcaccatttggcggagtaaagcagtctggtcttgggagagaaggatcgaagtacggcgtcgacgaatacttggagctcaagtacatctgcatgggcaacttgggttgagtcatgaaatcggcctcaggctagaaacgcatggaagagatgatgaaccgagagaccaagaaggcaggcgtctagctacaagaccggaggaacatggctgaaaggggccggccactggttgtgggggagcagttttcgaataaagcgaataagccgcggaacatgaacaaaagaagccgaaatgagttgtaaatgacgtgaactataaagtatggcttcgcctccggacttttgtatacgtaatcatggcactacttgtctatagtgtctccaaagacgtccatgttacagaataaaagcgtatagggtggatgctacgttacaggctgtcggtggtatgtacacctcgcctgattcctgacgaaataaagctggatactgcattcttgcggctcttgcctgcaggggt

SEQ ID NO: 49608 - DNA, 2304 bp, Zea Mays
cgggaaacgtcaaaaaagtcactcgcgactcgcgagttggaactctggcgtccgccatcggcccatcgccactcgtcgtcttcctcgctcgcacacccgtcccatccagtttttaaatggcgacggcgatgatgactatgcgacgcgcggcggcgctcggcgcccgacacatcccgcccgccgccgccttctcccgccacatgagtgcggacgcgagcgccgcgatggagaagatccgcgccgcgggtctgctcaagacgcaggggctcatcgccggacagtgggtcgacgcatacgatggcaagaccatcgaggtgcaaaatccagcaactggtgaggtccttgcaaacgtgtcctttatgggcagcagagaaacatctgatgctattgcttctgctcacagtacattctattcttggagtaaactcactgcaagtgagagaggcaaggcactaagaaaatggtacgatctaattatttcacacaaggaagagcttgcacttctcatgacactggagcaggggaaacctatgaaagaagcccttggtgaggtcaattatggtgcaagtttcatagaatattttgcagaggaagcaaagcgcatatatggtgatataattcctccaactttatctgatcgtagattgttggttctgaagcagcctgttggggtagttggagctattacaccatggaattttccattagcaatgataacccgaaaggttggaccagctttggcctgtggctgcactgttgttgtcaagccatcagagttcacacctctgacatcattagctgcagcagatcttgctcttcaagctggaataccagcgggtgcactaaatgttgtgatgggcaatgctcctgagataggtgatgcattactgcagagtacacaggtcagaaagattacgttcactggatcaacagctgttggcaaaaaactgatggctgaatctgcaaatactgtgaaaaaggtctctttggaacttggtgggaatgcaccttgcattgtttttgatgatgcagacattgatgttgctgttaaaggcagtcttgctgccaagttccgtaacagtggacagacatgtgtttgtgcaaacaggatattggtgcaagaaggtatctacgagaagtttgcatctgcattcatcaaggctgttcagagtttgaaggttgggaatgggctagaagagagtacatctcagggtcctctgattaacgaagctgctgttcaaaaggtggagaagttcataaatgacgcgacttcaaaggacgtgttggtctatctgcagttctgcactcaggacagaccagtttcttgaatttcttttggctgagatcagatcaacctgaattggttaatatgtgggtttaagttggaatatctggttctcgcttacttcattgagaccttaaacatggtttttggtgttttgttgcctctctttgtaatgcatgtgaagtaccctctaatctatttgtagggagcaaatgtcatgctaggtggtaaaagacacagcctggggatgtcattttatgagccaactgtagtagggaatgtcagcaatgatatgcttcttttcagagaagaagtttttggtccagttgcaccccttataccattcaaaactgaggaagaagcagtccatatggccaacgatacaaacgcaggcttagctgcatacatatttaccaagagcatacctcgttcatggcgtgtatccgaatctcttgaatacggcttagttggggtaaacgaggggattatttcaacagaggtggcaccatttggcggagtaaagcagtctggtcttgggagagaaggatcgaagtacggcgtcgacgaatacttggagctcaagtacatctgcatgggcaacttgggttgagtcatgaaatcggcctcaggctagaaacgcatggaagagatgatgaaccgagagaccaagaaggcaggcgtctagctacaagaccggaggaacatggctgaaaggggccggccactggttgtgggggagcagttttcgaataaagcgaataagccgcggaacatgaacaaaagaagccgaaatgagttgtaaatgacgtgaactataaagtatggcttcgcctccggacttttgtatacgtaatcatggcactacttgtctatagtgtctccaaagacgtccatgttacagaataaaagcgtatagggtggatgctacgttacaggctgtcggtggtatgtacacctcgcctgattcctgacgaaataaagctggatactgcattcttgcggctcttgcctgcaggggt

SEQ ID NO: 49609 - DNA, 1984 bp, Zea Mays
cgggaaacgtcaaaaaagtcactcgcgactcgcgagttggaactctggcgtccgccatcggcccatcgccactcgtcgtcttcctcgctcgcacacccgtcccatccagtttttaaatggcgacggcgatgatgactatgcgacgcgcggcggcgctcggcgcccgacacatcccgcccgccgccgccttctcccgccacatgagtgcggacgcgagcgccgcgatggagaagatccgcgccgcgggtctgctcaagacgcaggggctcatcgccggacagtgggtcgacgcatacgatggcaagaccatcgaggtgcaaaatccagcaactggtgaggtccttgcaaacgtgtcctttatgggcagcagagaaacatctgatgctattgcttctgctcacagtacattctattcttggagtaaactcactgcaagtgagagaggcaaggcactaagaaaatggtacgatctaattatttcacacaaggaagagcttgcacttctcatgacactggagcaggggaaacctatgaaagaagcccttggtgaggtcaattatggtgcaagtttcatagaatattttgcagaggaagcaaagcgcatatatggtgatataattcctccaactttatctgatcgtagattgttggttctgaagcagcctgttggggtagttggagctattacaccatggaattttccattagcaatgataacccgaaaggttggaccagctttggcctgtggctgcactgttgttgtcaagccatcagagttcacacctctgacatcattagctgcagcagatcttgctcttcaagctggaataccagcgggtgcactaaatgttgtgatgggcaatgctcctgagataggtgatgcattactgcagagtacacaggtcagaaagattacgttcactggatcaacagctgttggcaaaaaactgatggctgaatctgcaaatactgtgaaaaaggtctctttggaacttggtgggaatgcaccttgcattgtttttgatgatgcagacattgatgttgctgttaaaggcagtcttgctgccaagttccgtaacagtggacagacatgtgtttgtgcaaacaggatattggtgcaagaaggtatctacgagaagtttgcatctgcattcatcaaggctgttcagagtttgaaggttgggaatgggctagaagagagtacatctcagggtcctctgattaacgaagctgctgttcaaaaggtggagaagttcataaatgacgcgacttcaaagggagcaaatgtcatgctaggtggtaaaagacacagcctggggatgtcattttatgagccaactgtagtagggaatgtcagcaatgatatgcttcttttcagagaagaagtttttggtccagttgcaccccttataccattcaaaactgaggaagaagcagtccatatggccaacgatacaaacgcaggtggcaccatttggcggagtaaagcagtctggtcttgggagagaaggatcgaagtacggcgtcgacgaatacttggagctcaagtacatctgcatgggcaacttgggttgagtcatgaaatcggcctcaggctagaaacgcatggaagagatgatgaaccgagagaccaagaaggcaggcgtctagctacaagaccggaggaacatggctgaaaggggccggccactggttgtgggggagcagttttcgaataaagcgaataagccgcggaacatgaacaaaagaagccgaaatgagttgtaaatgacgtgaactataaagtatggcttcgcctccggacttttgtatacgtaatcatggcactacttgtctatagtgtctccaaagacgtccatgttacagaataaaagcgtatagggtggatgctacgttacaggctgtcggtggtatgtacacctcgcctgattcctgacgaaataaagctggatactgcattcttgcggctcttgcctgcaggggt

SEQ ID NO: 49610 - DNA, 448 bp, Zea Mays
gtgacagtacatgcttcagcgaacaacaaacacattgtttgttacaaatatatacattctgatttattcaaattgcgaagtttggcatggctcgcctggaccactgaggctgcacccagtccaggtcctccatttcagttatctgaatcatcactgtcgctcctctcaggatcagcttcctctccattcgcggcgggctcctgaaccccaggctgctttgctgcacgagctactggaggtttcttacgatcaccaccttcttcgcctcctgtcgcactggcgttctggtctactagtagtcaaggaaaaatgccatctacagagttcgcaaaaaacggtgaaacaaagctgtaggcagagaatccttcaaccaacagaccaaatgcatgtcagacttatcgatgttataagcaaccaattcagaagtataactggtgttcaagtgtag

SEQ ID NO: 49611 - DNA, 1792 bp, Zea Mays
ctccctccttcccctctcctagtctcctttcgcctccgaattccgatcaccaaaaaaaggcctttcttttcttttcgtcgccctctcggtgctctgcttcgctgcgtcgcccgcccgtctctaaaagccttgtgtggatcgtggacgccgacgcggccgcagcagcagccacgggacgggagtagaggcgcagagagagagaaagagagaaagagagagaggttgtgctcgctgcctgccgctgagagacggatgaagaagtgcccatcggagctggagctggaggctttcctccgcggccgggaggacgccacggcggcggcggcggcggcggtggccgagcagaagcctacgcacgacatcgctgcgctggcgccgttcggcgccggtggcgtgttcccctccagcgatctgtccgccttcagcttcgctgactcgaacaccctcaatggaactggaaacatccataatcacctttggtcccataaccacaacgtcaggcatcccgcagtctccacgacgatcgagtcgcagtcgtcgatctgtgctgcagcagcaagtccaacatcggctaccaacctgtacctgaaagagagccaggctctgggcggcacgagtggttccgactccgacagcgattcgctgctggacatcgagggtggcccgtgcgagcagagcacgaacccacaggacgtgaagaggatgcgacggatggtgtcgaaccgtgagtctgctcgacggtccaggaagaggaagcaagcccacctagctgaccttgagacacaggtcgaccagctgcgaggcgagaacgcgtcgctcttcaagcagctgacggacgccaaccagcagttcacgaccgcggtcacggacaacaggatcctcaagtcggacgtggaggccctcagagtcaaggtgaagctggcggaggacatggtggcgcgcggcgcgctgtcgtgcgggctgggcagcctggggctgtcgccggcgctgaacccgcggcaggcgtgccgcggccccgacgtgctgtccgtgtccggcctggacttccccggcgccgacgacgcctgcttcacggggctgtccccggcggagcagctgcagctccagagctcccccctgcagagcatcgccgccagcctcgagagcctggacaaccggatggccagcgaggtcaccagctgcggggggcccggcgtcgacgtctggccgtgggaccaccactccaacggcggcctgtccaagtgaagccggagacgccgggtgggagtggggtgagactcgcgccgctcgccgacggcacctatcctgtcctagtgtatgcgtatatcgatatgcatggcgggcgctagctatgaccatgagccgccgttatttctgtgttcgctggagtggtgaaagtgaacggacttgagtttttcagagtccctcgtctccgtcggtacatttactagttctgtaatagaactgactagcttaagctcgtgctactacatatatatatgtatgctgagagactgaactcgaagcataatcatgctaccatattatgtcatcattacatttctatctctagtctgattgtgttaggtgctgtgattcagatgagggccggtttctatttctagtctgagtgcgttaggtgttgtgactctatgagacacatgcaagggaagctcaggtaagtgaacagagagccacatactattctgaatatttcatatcagtaaaatctctgaaaactcccatgcactgtacattcttgtctgtatacattttctccttttttttaaca

SEQ ID NO: 49612 - DNA, 1674 bp, Zea Mays
cctctcctagtctcctttcgcctccgaattccgatcaccaaaaaaaggcctttcttttcttttcgtcgccctctcggtgctctgcttcgctgcgtcgcccgcccgtctctaaaagccttgtgtggatcgtggacgccgacgcggccgcagcagcagccacgggacgggagtagaggcgcagagagagagaaagagagaaagagagagaggttgtgctcgctgcctgccgctgagagacggatgaagaagtgcccatcggagctggagctggaggctttcctccgcggccgggaggacgccacggcggcggcggcggcggcggtggccgagcagaagcctacgcacgacatcgctgcgctggcgccgttcggcgccggtggcgtgttcccctccagcgatctgtccgccttcagcttcgctgactcgcagctgcagcagcaagtccaacatcggctaccaacctgtacctgaaagagagccaggctctgggcggcacgagtggttccgactccgacagcgattcgctgctggacatcgagggtggcccgtgcgagcagagcacgaacccacaggacgtgaagaggatgcgacggatggtgtcgaaccgtgagtctgctcgacggtccaggaagaggaagcaagcccacctagctgaccttgagacacaggtcgaccagctgcgaggcgagaacgcgtcgctcttcaagcagctgacggacgccaaccagcagttcacgaccgcggtcacggacaacaggatcctcaagtcggacgtggaggccctcagagtcaaggtgaagctggcggaggacatggtggcgcgcggcgcgctgtcgtgcgggctgggcagcctggggctgtcgccggcgctgaacccgcggcaggcgtgccgcggccccgacgtgctgtccgtgtccggcctggacttccccggcgccgacgacgcctgcttcacggggctgtccccggcggagcagctgcagctccagagctcccccctgcagagcatcgccgccagcctcgagagcctggacaaccggatggccagcgaggtcaccagctgcggggggcccggcgtcgacgtctggccgtgggaccaccactccaacggcggcctgtccaagtgaagccggagacgccgggtgggagtggggtgagactcgcgccgctcgccgacggcacctatcctgtcctagtgtatgcgtatatcgatatgcatggcgggcgctagctatgaccatgagccgccgttatttctgtgttcgctggagtggtgaaagtgaacggacttgagtttttcagagtccctcgtctccgtcggtacatttactagttctgtaatagaactgactagcttaagctcgtgctactacatatatatatgtatgctgagagactgaactcgaagcataatcatgctaccatattatgtcatcattacatttctatctctagtctgattgtgttaggtgctgtgattcagatgagggccggtttctatttctagtctgagtgcgttaggtgttgtgactctatgagacacatgcaagggaagctcaggtaagtgaacagagagccacatactattctgaatatttcatatcagtaaaatctctgaaaactcccatgcactgtacattcttgtctgtatacattttctccttttttttaaca

SEQ ID NO: 49613 - DNA, 2412 bp, Zea Mays
acgagactctgctccatataaaatggagccaaataaaaatcgacgacgacatctatttaaggctgaatctacctcgcctgcgtggccctcccctcctccccatcgcgtcctctccgctacacctcgccgatcggatcgcgacgagacgccgcgcgatccgacctaggctgacgccaacgaccactctcgccgccggcggtcatggcgtacggcgaccgcgttaccaccttcgaggactcagagaaggagagcgagtacggctatgtccgcaaggtctctggacctgtggttgttgctgatggaatgggtggtgctgccatgtatgaacttgtccgcgtcgggcatgataacctcatcggggaaattatccgtcttgagggcgattcagctacaatccaagtttatgaggaaacagctggactgatggttaatgaccctgttttgagaacgagaaagcctctatcagttgaattgggacctggaattcttggaaatatttttgatggtatccagcgccctctaaaaaccattgccattaagtcaggagatgtgtatattcctcgtggtgtttcagttcctgcccttgacaaagatgcattatgggaatttcagccaaagaaactaggtgttggagatgtcatcacaggtggagatctatacgctactgtctttgagaacacattgatgcagcaccatgttgctcttccaccgggttctatggggaaaataagttacattgcaccagctggtcagtacaaccttcaggacacagtgctagaattggaatttcagggcataaaaaagaattttaccatgcttcagacatggcctgtgcgttcaccaaggcctgttgcgtcgaagcttgctgcggatacacctcttctgacagggcagcgtgtactggatgcactattcccctcagttctgggaggcacttgtgctattccaggggcatttggttgtggtaaaactgtcattagtcaggcactttccaagtactccaattctgaagctgtggtttatgtgggctgtggtgaacgaggaaatgagatggctgaggttctcatggacttcccccagttgacgatgacattgcctgatggccgtgaggagtcagtcatgaagagaacaaccttggtggctaacacatcaaatatgcctgttgctgctcgtgaagcctccatttatacaggaattacaattgccgagtattttcgtgatatgggctacaacgttagtatgatggctgactccacctcacgatgggctgaggctttgcgtgagatctcagggcgtttggctgaaatgcctgctgatagtggttacccagcttacttggctgcgcgtttggcatccttttatgaacgtgctggtaaggtgaaatgcctgggaagtccagacaggactggcagtgtcacaattgttggagccgtctctcctccaggtggtgatttttcagaccctgttacctctgcaaccctcagtattgttcaggtcttctggggtttagataaaaagctcgctcaaaggaagcatttcccatctgtgaattggctcatttcctattcgaaatactccaaggcccttgagtccttttatgagaagtttgatccagatttcattgatattaggacaaaagcacgtgaggtgttgcagagggaggacgatctaaatgaaattgtgcagcttgttggtaaagatgcgctggcagaatctgacaagattacactggagacagcaaagctactgagagaagattatttggcacaaaatgcatttaccccatatgataagttctgcccattctacaaatccgtttggatgatgcgcaatattattcacttcaacacattggcaaatcaggctgtggagcgggcagctggtactgatggccaaaagataacatacggtgtcataaaacaccgtttgggcgatctattttatcgcctagtatctcaaaagttcgaggatcctgccgaaggtgaagaagctttggtcggcaaatttaagaaactgtatgatgacctcaccactggtttccgcaatctcgaagacgaggcacggtgaactagtgtagattctgtgtaaacaaggactgccaaatgttttataagatacataaattgtagattgagatcatctgtaagaattattcccaccgttgcaccatctcttcgccaccactgttttagtcatcggtgcctgatgggcaccctgtttatttcatgtatcatttattgctgtcattgtaataagcgatgggcatgattgtagttgaataagtacaatgtccatgtattcagacaccagtatcgtgcttatttgtttgttaaaaaaactatgttgcctttttgggatttgttcgtgcttattgcatatgatggtttaaaaaagactaacgtatgagtaaat

SEQ ID NO: 49614 - DNA, 782 bp, Zea Mays
ggacaaaagcacgtgaggtgttgcagagggaggacgatctaaatgaaattgtgcagcttgttggtaaagatgcgctggcagaatctgacaagattacactggagacagcaaagctactgagagaagattatttggcacaaaatgcatttaccccatatgataagttctgcccattctacaaatccgtttggatgatgcgcaatattattcacttcaacacattggcaaatcaggctgtggagcgggcagctggtactgatggccaaaagataacatacggtgtcataaaacaccgtttgggcgatctattttatcgcctagtatctcaaaagttcgaggatcctgccgaaggtgaagaagctttggtcggcaaatttaagaaactgtatgatgacctcaccactggtttccgcaatctcgaagacgaggcacggtgaactagtgtagattctgtgtaaacaaggactgccaaatgttttataagatacataaattgtagattgagatcatctgtaagaattattcccaccgttgcaccatctcttcgccaccactgttttagtcatcggtgcctgatgggcaccctgtttatttcatgtatcatttattgctgtcattgtaataagcgatgggcatgattgtagttgaataagtacaatgtccatgtattcagacaccagtatcgtgcttatttgtttgttaaaaaaactatgttgcctttttgggatttgttcgtgcttattgcatatgatggtttaaaaaagactaacgtatgagtaaat

SEQ ID NO: 49615 - DNA, 693 bp, Zea Mays
cgaactcatcttcatcattttccttcggtggtatctgttcttgacctggtttgattatagcaaggatatgataagttctgcccattctacaaatccgtttggatgatgcgcaatattattcacttcaacacattggcaaatcaggctgtggagcgggcagctggtactgatggccaaaagataacatacggtgtcataaaacaccgtttgggcgatctattttatcgcctagtatctcaaaagttcgaggatcctgccgaaggtgaagaagctttggtcggcaaatttaagaaactgtatgatgacctcaccactggtttccgcaatctcgaagacgaggcacggtgaactagtgtagattctgtgtaaacaaggactgccaaatgttttataagatacataaattgtagattgagatcatctgtaagaattattcccaccgttgcaccatctcttcgccaccactgttttagtcatcggtgcctgatgggcaccctgtttatttcatgtatcatttattgctgtcattgtaataagcgatgggcatgattgtagttgaataagtacaatgtccatgtattcagacaccagtatcgtgcttatttgtttgttaaaaaaactatgttgcctttttgggatttgttcgtgcttattgcatatgatggtttaaaaaagactaacgtatgagtaaat

SEQ ID NO: 49616 - DNA, 664 bp, Zea Mays
tttcaggcaaaagggagcatagtccttttatccacgatatgataagttctgcccattctacaaatccgtttggatgatgcgcaatattattcacttcaacacattggcaaatcaggctgtggagcgggcagctggtactgatggccaaaagataacatacggtgtcataaaacaccgtttgggcgatctattttatcgcctagtatctcaaaagttcgaggatcctgccgaaggtgaagaagctttggtcggcaaatttaagaaactgtatgatgacctcaccactggtttccgcaatctcgaagacgaggcacggtgaactagtgtagattctgtgtaaacaaggactgccaaatgttttataagatacataaattgtagattgagatcatctgtaagaattattcccaccgttgcaccatctcttcgccaccactgttttagtcatcggtgcctgatgggcaccctgtttatttcatgtatcatttattgctgtcattgtaataagcgatgggcatgattgtagttgaataagtacaatgtccatgtattcagacaccagtatcgtgcttatttgtttgttaaaaaaactatgttgcctttttgggatttgttcgtgcttattgcatatgatggtttaaaaaagactaacgtatgagtaaat

SEQ ID NO: 49617 - DNA, 695 bp, Zea Mays
accctatcgcagtaattacagacaacactatgttctgcagcgattcactctctgcttgccctttcggatatgataagttctgcccattctacaaatccgtttggatgatgcgcaatattattcacttcaacacattggcaaatcaggctgtggagcgggcagctggtactgatggccaaaagataacatacggtgtcataaaacaccgtttgggcgatctattttatcgcctagtatctcaaaagttcgaggatcctgccgaaggtgaagaagctttggtcggcaaatttaagaaactgtatgatgacctcaccactggtttccgcaatctcgaagacgaggcacggtgaactagtgtagattctgtgtaaacaaggactgccaaatgttttataagatacataaattgtagattgagatcatctgtaagaattattcccaccgttgcaccatctcttcgccaccactgttttagtcatcggtgcctgatgggcaccctgtttatttcatgtatcatttattgctgtcattgtaataagcgatgggcatgattgtagttgaataagtacaatgtccatgtattcagacaccagtatcgtgcttatttgtttgttaaaaaaactatgttgcctttttgggatttgttcgtgcttattgcatatgatggtttaaaaaagactaacgtatgagtaaat

SEQ ID NO: 49618 - DNA, 1779 bp, Zea Mays
ggactagccataagctcatacgccttttaacagaatagttaaatccactccgccattaattaacctctctccttcctcgccccttcccctccacgactccactaccaccaccttcaccttgtctcccacaaccgccgcgcgcaagccctagcccgatctcgccggcgacagacaccagatctcgccgcccgttgcgcgccgatacgcgccccgccggattcaccgctcctcgcgctgcagcacgcccgggcctgggttactgcgtgacatgtagtattgtataattggaggttgtcaccatcaccacaaagcatatgttgtgatttgtcgatggcgaggagatgaaacaggtgtaggggcggagcagcaaggacatgacagccatgccgcatccgcgccaccgaggcgctgctaagaagcccatgtggatcatagtgctattgtctttggtttgtgttgcacttatgggggcctatgtctacccaccacggcgctactccgcatgctacttctttgcttcgagtgtctgtactccgttcaaggattggctacctgctgttgctcgtgagcgaactgatgaagagatagtttcatcggtggttattagggatcttctttcaatgcctatggctatgtcaaagaacccaaagattgcctttatgttcttgacaccgggttcattgccttttgagaagttgtgggagaaatttttacagggtcatgatggccgatattctatctatatccatgcatctcgtgaaaaacctgtacattctagctctctttttgttgggcgtgaaattcacagtgaaaaggtagtatgggggaggatttcaatggttgatgcagagaagaggctgttaggaaatgcattggaagatgttgataatcaatttttcgtcttgctttctgacagctgtgttccactacatacatttgattacatatataattatctgatgggaaccaatgtcagtttcattgattgcttcttcgatcctggcccacatggaactggaaggtatacgatggaaatgcttcctgaaatagaacagagggacttcaggaagggtgcccagtggtttgctataacacgaaggcatgctttattgattctggcagacaacctttactacaataagttcaagctgtactgcaagtctgtcaatgagaatgttcacattacaagtgatgataaaaaagttgtgacacagaccccatgtatgtggaatggaacaaaaagaccctgctatctttttgctagaaagttttacccagaatctttgaacaacctgctgaagctattctccagttacacatcggcttgagttctacatgattcttttggcattttgcctaggagattcctctaggatttatctttttgtgcttcatgtaaattgtggaattgatacttagaggcttaacagagttacagatccagggccttgatgtaattctgagtcccttggtagggctgaggtgatgtttgtttattattgacgctgccctccctgtcattcgtggtgctctctgtatgactatgtttcttttagcccttcacttttttctcttctcttttattcttagattcctagctcccatattctgagtaacaggggttttgtcagttcttactgttattataagattatttttttgtagacacgaagatattatgaaatcagttacactaatagtttaacctggtcttgtgagttacagtgacagttttactcttgtgatgagtatgacagcatggttacattatagtacacc

SEQ ID NO: 49619 - DNA, 1816 bp, Zea Mays
cgccttttaacagaatagttaaatccactccgccattaattaacctctctccttcctcgccccttcccctccacgactccactaccaccaccttcaccttgtctcccacaaccgccgcgcgcaagccctagcccgatctcgccggcgacagacaccagatctcgccgcccgttgcgcgccgatacgcgccccgccggattcaccgctcctcgcgctgcagcacgcccgggcctgggttactgcgtgacatgtagtattgtataattggaggttgtcaccatcaccacaaagcatatgttgtgatttgtcgatggcgaggagatgaaacaggtgtaggggcggagcagcaaggacatgacagccatgccgcatccgcgccaccgaggcgctgctaagaagcccatgtggatcatagtgctattgtctttggtttgtgttgcacttatgggggcctatgtctacccaccacggcgctactccgcatgctacttctttgcttcgagtgtctgtactccgttcaaggattggctacctgctgttgctcgtgagcgaactgatgaagagatagtttcatcggtggttattagggatcttctttcaatgcctatggctatgtcaaagaacccaaagattgcctttatgttcttgacaccgggttcattgccttttgagaagttgtgggagaaatttttacagggtcatgatggccgatattctatctatatccatgcatctcgtgaaaaacctgtacattctagctctctttttgttgggcgtgaaattcacagtgaaaaggtagtatgggggaggatttcaatggttgatgcagagaagaggctgttaggaaatgcattggaagatgttgataatcaatttttcgtcttgctttctgacagctgtgttccactacatacatttgattacatatataattatctgatgggaaccaatgtcagtttcattgattgcttcttcgatcctggcccacatggaactggaaggtatacgatggaaatgcttcctgaaatagaacagagggacttcaggaagggtgcccagtggtttgctataacacgaaggcatgctttattgattctggcagacaacctttactacaataagttcaagctgtactgcaagccagcagaaggacgcaactgtattgctgatgagcattatttgccaaccctcttcaattctgtcaatgagaatgttcacattacaagtgatgataaaaaagttgtgacacagaccccatgtatgtggaatggaacaaaaagaccctgctatctttttgctagaaagttttacccagaatctttgaacaacctgctgaagctattctccagttacacatcggcttgagttctacatgattcttttggcattttgcctaggagattcctctaggatttatctttttgtgcttcatgtaaattgtggaattgatacttagaggcttaacagagttacagatccagggccttgatgtaattctgagtcccttggtagggctgaggtgatgtttgtttattattgacgctgccctccctgtcattcgtggtgctctctgtatgactatgtttcttttagcccttcacttttttctcttctcttttattcttagattcctagctcccatattctgagtaacaggggttttgtcagttcttactgttattataagattatttttttgtagacacgaagatattatgaaatcagttacactaatagtttaacctggtcttgtgagttacagtgacagttttactcttgtgatgagtatgacagcatggttacattatagtacacc

SEQ ID NO: 49620 - DNA, 1900 bp, Zea Mays
gttaaatccactccgccattaattaacctctctccttcctcgccccttcccctccacgactccactaccaccaccttcaccttgtctcccacaaccgccgcgcgcaagccctagcccgatctcgccggcgacagacaccagatctcgccgcccgttgcgcgccgatacgcgccccgccggattcaccgctcctcgcgctgcagcacgcccgggcctgggttactgcgtgacatgtagtattgtataattggaggttgtcaccatcaccacaaagcatatgttgtgatttgtcgatggcgaggagatgaaacaggtgtaggggcggagcagcaaggacatgacagccatgccgcatccgcgccaccgaggcgctgctaagaagcccatgtggatcatagtgctattgtctttggtttgtgttgcacttatgggggcctatgtctacccaccacggcgctactccgcatgctacttctttgcttcgagtgtctgtactccgttcaaggattggctacctgctgttgctcgtgagcgaactgatgaagagatagtttcatcggtggttattagggatcttctttcaatgcctatggctatgtcaaagaacccaaagattgcctttatgttcttgacaccgggttcattgccttttgagaagttgtgggagaaatttttacagggtcatgatggccgatattctatctatatccatgcatctcgtgaaaaacctgtacattctagctctctttttgttgggcgtgaaattcacagtgaaaaggtagtatgggggaggatttcaatggttgatgcagagaagaggctgttaggaaatgcattggaagatgttgataatcaatttttcgtcttgctttctgacagctgtgttccactacatacatttgattacatatataattatctgatgggaaccaatgtcagtttcattgattgcttcttcgatcctggcccacatggaactggaaggtatacgatggaaatgcttcctgaaatagaacagagggacttcaggaagggtgcccagtggtttgctataacacgaaggcatgctttattgattctggcagacaacctttactacaataagttcaagctgtactgcaagccagcagaaggacgcaactgtattgctgatgagcattatttgccaaccctcttcaatctaactggtcagtgactcatgttgattggtccgagggaaaatggcatccaaggtcatatagagctgcagatgttacatatcaactcttaaagaacataacgtctgtcaatgagaatgttcacattacaagtgatgataaaaaagttgtgacacagaccccatgtatgtggaatggaacaaaaagaccctgctatctttttgctagaaagttttacccagaatctttgaacaacctgctgaagctattctccagttacacatcggcttgagttctacatgattcttttggcattttgcctaggagattcctctaggatttatctttttgtgcttcatgtaaattgtggaattgatacttagaggcttaacagagttacagatccagggccttgatgtaattctgagtcccttggtagggctgaggtgatgtttgtttattattgacgctgccctccctgtcattcgtggtgctctctgtatgactatgtttcttttagcccttcacttttttctcttctcttttattcttagattcctagctcccatattctgagtaacaggggttttgtcagttcttactgttattataagattatttttttgtagacacgaagatattatgaaatcagttacactaatagtttaacctggtcttgtgagttacagtgacagttttactcttgtgatgagtatgacagcatggttacattatagtacacc

SEQ ID NO: 49621 - DNA, 1877 bp, Zea Mays
atccactccgccattaattaacctctctccttcctcgccccttcccctccacgactccactaccaccaccttcaccttgtctcccacaaccgccgcgcgcaagccctagcccgatctcgccggcgacagacaccagatctcgccgcccgttgcgcgccgatacgcgccccgccggattcaccgctcctcgcgctgcagcacgcccgggcctgggttactgcgtgacatgtagtattgtataattggaggttgtcaccatcaccacaaagcatatgttgtgatttgtcgatggcgaggagatgaaacaggtgtaggggcggagcagcaaggacatgacagccatgccgcatccgcgccaccgaggcgctgctaagaagcccatgtggatcatagtgctattgtctttggtttgtgttgcacttatgggggcctatgtctacccaccacggcgctactccgcatgctacttctttgcttcgagtgtctgtactccgttcaaggattggctacctgctgttgctcgtgagcgaactgatgaagagatagtttcatcggtggttattagggatcttctttcaatgcctatggctatgtcaaagaacccaaagattgcctttatgttcttgacaccgggttcattgccttttgagaagttgtgggagaaatttttacagggtcatgatggccgatattctatctatatccatgcatctcgtgaaaaacctgtacattctagctctctttttgttgggcgtgaaattcacagtgaaaaggtagtatgggggaggatttcaatggttgatgcagagaagaggctgttaggaaatgcattggaagatgttgataatcaatttttcgtcttgctttctgacagctgtgttccactacatacatttgattacatatataattatctgatgggaaccaatgtcagtttcattgattgcttcttcgatcctggcccacatggaactggaaggtatacgatggaaatgcttcctgaaatagaacagagggacttcaggaagggtgcccagtggtttgctataacacgaaggcatgctttattgattctggcagacaacctttactacaataagttcaagctgtactgcaagttgtgtttattctttagatggttgaccctggtggaatagctaactggtcagtgactcatgttgattggtccgagggaaaatggcatccaaggtcatatagagctgcagatgttacatatcaactcttaaagaacataacgtctgtcaatgagaatgttcacattacaagtgatgataaaaaagttgtgacacagaccccatgtatgtggaatggaacaaaaagaccctgctatctttttgctagaaagttttacccagaatctttgaacaacctgctgaagctattctccagttacacatcggcttgagttctacatgattcttttggcattttgcctaggagattcctctaggatttatctttttgtgcttcatgtaaattgtggaattgatacttagaggcttaacagagttacagatccagggccttgatgtaattctgagtcccttggtagggctgaggtgatgtttgtttattattgacgctgccctccctgtcattcgtggtgctctctgtatgactatgtttcttttagcccttcacttttttctcttctcttttattcttagattcctagctcccatattctgagtaacaggggttttgtcagttcttactgttattataagattatttttttgtagacacgaagatattatgaaatcagttacactaatagtttaacctggtcttgtgagttacagtgacagttttactcttgtgatgagtatgacagcatggttacattatagtacacc

SEQ ID NO: 49622 - DNA, 1899 bp, Zea Mays
cattaattaacctctctccttcctcgccccttcccctccacgactccactaccaccaccttcaccttgtctcccacaaccgccgcgcgcaagccctagcccgatctcgccggcgacagacaccagatctcgccgcccgttgcgcgccgatacgcgccccgccggattcaccgctcctcgcgctgcagcacgcccgggcctgggttactgcgtgacatgtagtattgtataattggaggttgtcaccatcaccacaaagcatatgttgtgatttgtcgatggcgaggagatgaaacaggtgtaggggcggagcagcaaggacatgacagccatgccgcatccgcgccaccgaggcgctgctaagaagcccatgtggatcatagtgctattgtctttggtttgtgttgcacttatgggggcctatgtctacccaccacggcgctactccgcatgctacttctttgcttcgagtgtctgtactccgttcaaggattggctacctgctgttgctcgtgagcgaactgatgaagagatagtttcatcggtggttattagggatcttctttcaatgcctatggctatgtcaaagaacccaaagattgcctttatgttcttgacaccgggttcattgccttttgagaagttgtgggagaaatttttacagggtcatgatggccgatattctatctatatccatgcatctcgtgaaaaacctgtacattctagctctctttttgttgggcgtgaaattcacagtgaaaaggtagtatgggggaggatttcaatggttgatgcagagaagaggctgttaggaaatgcattggaagatgttgataatcaatttttcgtcttgctttctgacagctgtgttccactacatacatttgattacatatataattatctgatgggaaccaatgtcagtttcattgattgcttcttcgatcctggcccacatggaactggaaggtatacgatggaaatgcttcctgaaatagaacagagggacttcaggaagggtgcccagtggtttgctataacacgaaggcatgctttattgattctggcagacaacctttactacaataagttcaagctgtactgcaagaaggacgcaactgtattgctgatgagcattatttgccaaccctcttcaatatggttgaccctggtggaatagctaactggtcagtgactcatgttgattggtccgagggaaaatggcatccaaggtcatatagagctgcagatgttacatatcaactcttaaagaacataacgtctgtcaatgagaatgttcacattacaagtgatgataaaaaagttgtgacacagaccccatgtatgtggaatggaacaaaaagaccctgctatctttttgctagaaagttttacccagaatctttgaacaacctgctgaagctattctccagttacacatcggcttgagttctacatgattcttttggcattttgcctaggagattcctctaggatttatctttttgtgcttcatgtaaattgtggaattgatacttagaggcttaacagagttacagatccagggccttgatgtaattctgagtcccttggtagggctgaggtgatgtttgtttattattgacgctgccctccctgtcattcgtggtgctctctgtatgactatgtttcttttagcccttcacttttttctcttctcttttattcttagattcctagctcccatattctgagtaacaggggttttgtcagttcttactgttattataagattatttttttgtagacacgaagatattatgaaatcagttacactaatagtttaacctggtcttgtgagttacagtgacagttttactcttgtgatgagtatgacagcatggttacattatagtacacc

SEQ ID NO: 49623 - DNA, 1953 bp, Zea Mays
cattaattaacctctctccttcctcgccccttcccctccacgactccactaccaccaccttcaccttgtctcccacaaccgccgcgcgcaagccctagcccgatctcgccggcgacagacaccagatctcgccgcccgttgcgcgccgatacgcgccccgccggattcaccgctcctcgcgctgcagcacgcccgggcctggaaaaagaggcaactctgggggaataacggatttcaccttgtttacaggttactgcgtgacatgtagtattgtataattggaggttgtcaccatcaccacaaagcatatgttgtgatttgtcgatggcgaggagatgaaacaggtgtaggggcggagcagcaaggacatgacagccatgccgcatccgcgccaccgaggcgctgctaagaagcccatgtggatcatagtgctattgtctttggtttgtgttgcacttatgggggcctatgtctacccaccacggcgctactccgcatgctacttctttgcttcgagtgtctgtactccgttcaaggattggctacctgctgttgctcgtgagcgaactgatgaagagatagtttcatcggtggttattagggatcttctttcaatgcctatggctatgtcaaagaacccaaagattgcctttatgttcttgacaccgggttcattgccttttgagaagttgtgggagaaatttttacagggtcatgatggccgatattctatctatatccatgcatctcgtgaaaaacctgtacattctagctctctttttgttgggcgtgaaattcacagtgaaaaggtagtatgggggaggatttcaatggttgatgcagagaagaggctgttaggaaatgcattggaagatgttgataatcaatttttcgtcttgctttctgacagctgtgttccactacatacatttgattacatatataattatctgatgggaaccaatgtcagtttcattgattgcttcttcgatcctggcccacatggaactggaaggtatacgatggaaatgcttcctgaaatagaacagagggacttcaggaagggtgcccagtggtttgctataacacgaaggcatgctttattgattctggcagacaacctttactacaataagttcaagctgtactgcaagccagcagaaggacgcaactgtattgctgatgagcattatttgccaaccctcttcaatatggttgaccctggtggaatagctaactggtcagtgactcatgttgattggtccgagggaaaatggcatccaaggtcatatagagctgcagatgttacatatcaactcttaaagaacataacgtctgtcaatgagaatgttcacattacaagtgatgataaaaaagttgtgacacagaccccatgtatgtggaatggaacaaaaagaccctgctatctttttgctagaaagttttacccagaatctttgaacaacctgctgaagctattctccagttacacatcggcttgagttctacatgattcttttggcattttgcctaggagattcctctaggatttatctttttgtgcttcatgtaaattgtggaattgatacttagaggcttaacagagttacagatccagggccttgatgtaattctgagtcccttggtagggctgaggtgatgtttgtttattattgacgctgccctccctgtcattcgtggtgctctctgtatgactatgtttcttttagcccttcacttttttctcttctcttttattcttagattcctagctcccatattctgagtaacaggggttttgtcagttcttactgttattataagattatttttttgtagacacgaagatattatgaaatcagttacactaatagtttaacctggtcttgtgagttacagtgacagttttactcttgtgatgagtatgacagcatggttacattatagtacacc

SEQ ID NO: 49624 - DNA, 1872 bp, Zea Mays
cattaattaacctctctccttcctcgccccttcccctccacgactccactaccaccaccttcaccttgtctcccacaaccgccgcgcgcaagccctagcccgatctcgccggcgacagacaccagatctcgccgcccgttgcgcgccgatacgcgccccgccggattcaccgctcctcgcgctgcagcacgcccgggcctgggttactgcgtgacatgtagtattgtataattggaggttgtcaccatcaccacaaagcatatgttgtgatttgtcgatggcgaggagatgaaacaggtgtaggggcggagcagcaaggacatgacagccatgccgcatccgcgccaccgaggcgctgctaagaagcccatgtggatcatagtgctattgtctttggtttgtgttgcacttatgggggcctatgtctacccaccacggcgctactccgcatgctacttctttgcttcgagtgtctgtactccgttcaaggattggctacctgctgttgctcgtgagcgaactgatgaagagatagtttcatcggtggttattagggatcttctttcaatgcctatggctatgtcaaagaacccaaagattgcctttatgttcttgacaccgggttcattgccttttgagaagttgtgggagaaatttttacagggtcatgatggccgatattctatctatatccatgcatctcgtgaaaaacctgtacattctagctctctttttgttgggcgtgaaattcacagtgaaaaggtagtatgggggaggatttcaatggttgatgcagagaagaggctgttaggaaatgcattggaagatgttgataatcaatttttcgtcttgctttctgacagctgtgttccactacatacatttgattacatatataattatctgatgggaaccaatgtcagtttcattgattgcttcttcgatcctggcccacatggaactggaaggtatacgatggaaatgcttcctgaaatagaacagagggacttcaggaagggtgcccagtggtttgctataacacgaaggcatgctttattgattctggcagacaacctttactacaataagttcaagctgtactgcaagccagcagaaggacgcaactgtattgctgatgagcattatttgccaaccctcttcaattgactcatgttgattggtccgagggaaaatggcatccaaggtcatatagagctgcagatgttacatatcaactcttaaagaacataacgtctgtcaatgagaatgttcacattacaagtgatgataaaaaagttgtgacacagaccccatgtatgtggaatggaacaaaaagaccctgctatctttttgctagaaagttttacccagaatctttgaacaacctgctgaagctattctccagttacacatcggcttgagttctacatgattcttttggcattttgcctaggagattcctctaggatttatctttttgtgcttcatgtaaattgtggaattgatacttagaggcttaacagagttacagatccagggccttgatgtaattctgagtcccttggtagggctgaggtgatgtttgtttattattgacgctgccctccctgtcattcgtggtgctctctgtatgactatgtttcttttagcccttcacttttttctcttctcttttattcttagattcctagctcccatattctgagtaacaggggttttgtcagttcttactgttattataagattatttttttgtagacacgaagatattatgaaatcagttacactaatagtttaacctggtcttgtgagttacagtgacagttttactcttgtgatgagtatgacagcatggttacattatagtacacc

SEQ ID NO: 49625 - DNA, 597 bp, Zea Mays
gacgaagacagacgcgctccgccgtctctgccttgtgggccttacgtgggcctcatggcttaaaatgccatgccccagcaactacacgagtcaacacaggcccggcccggcccggcccggcccaagaacccccatctctcgattcctccaacaaattcccctttcccttactccccatccccacccacccacgccgacgagcaaaccctagcgagcgagagagcccggagccgagagaccagccagccatggcgctgcgtgccctgtacaacgagatccggagcatgaaggtccgcgacgtgccggcttacctgaagccgcgcttgacctgggacaacgtcaagaagagcgccgaccaggccgtcgaccgctacatcgagaagtacatcgacacgagctcgccggaccctctctaccacgtctgcatcggagggatgatcttctcctacttcgtcaatctgccctgggagcgcgcccacctcgcccacctcgaggagatggagaggaccggtgggaagcactagatccgctgccccgtccctcgccggcagcgcgggagtgcgcctttccctagaaattttgagctatccttcgcac

SEQ ID NO: 49626 - DNA, 768 bp, Zea Mays
tttactattttttgtggtgacatatgttttgacaaagaaaatttatttgaccaatcacatgtgtgcggattcaaggagcaagcaccagcgcgagacggccggagctcaggatgtcgagcagcagaggcacggatccgctgtagacacggagcagcagaggcacggagcagccggagatcgaccgcggatccgtccgcccggtaggccgccacgccggtgaagatccacccgcctggggaagaccggcacgcctgcctgctctagctcgaggagcgctggagatccacccgcctggagaagaccggtaggctgccgcgtctgcctgcctggacaaaaccggcaggccgctccgtcgaagaatcaggtcgctgtgccttcgaagaatcaggccgcggcgccggtgaagaagcaagccgcgacaccgaggatataccagggcaccaggcagcggagatccgtccacaaccggtaggccgcgcgccgaagatctgccaggcgccggagatccgttcgtccgcggatccgtccgctcggtaggccgctgcaggcctccgcgtcgtcgaagaagcaggccgccgcgccggtgaagaagcaggctgccacgctgccgaggatgtgccaggcgaaggagagagggagagttggagtcgggatcggagaagaagaggctgcgcaagcgcaggagagagtaaaaagtttgtagtgggcccgtcctgtaagtaatgttaaagtggacggagatgacgtctaagcgcatttctgagcaaa

SEQ ID NO: 49627 - DNA, 768 bp, Zea Mays
gctcgctacctccagccgcctgcgccgcccgccggccaccgccgcctcgtcgtcgcagaatttctcctcgcttatcttttctccatctctttcggattttgaatctgggaggaaattcgcggtccggtggaaaatctgttggatttgttcgtttgaaatttccatctgtgtttttcttttcggtatgaagtagttgcaaagatgtatgctttctgaattttttcgtctgaatcaaacccggctctatattatgagtcaacagcaggcgccgttcgatggcgtcctgactgccgcgtggagcccagagtgacgcccaagccaggagaagattgtttggagatccatcttccttttagttccaagccacaatacctggccacacctcggcgcaagctcgcctcgcccaagtagcttcgtctcttttgcgttcggaatccgagtttgttttggttttttgttttgtttttttgttttggtttcttggatctggttcttgggacggcatcattagacgaacgggtgccctccggcgatccatggaggtttttgccctttgcaaggtgcccagatagacgcctacacacgattggacgaggggcatcaagcgtcatctatgttcttcgatttcgatgaggctaagtaccacacaacccctatcaggtctccctcaaatcgtgtgaataatacgttgtacagggaaaactaaaattttctatgttatacatatgatttcgaattagttacttatggaaaactacgagatgatgc

SEQ ID NO: 49628 - DNA, 952 bp, Zea Mays
cctaaacctagggcagccgccgtttgttgtcgcgagcgcgttcctgccccgccacagccgaagctcccagcgtcctcctgcaggccgagctgaaggttcagcgcgccggtggagttcgacgacgaaactccgtcacgtcatacctctccacctcccgtcttccagacgtctccaatcgaggctcccagcgtctcggagaagaggagcagcacgacacggcggctgtggcgaggaaggctcctgtcccatcccaacccagttagcagccgtccaaggaggaggagatccaatcggcgtgcgggcgtccgcggtccatccatcgatccaattccaatctgcagatacgcggtctgggactgatacttggaactgaatttgtcgacaacaaatctccaaatgatccatttccagctgaatggggtgttggttcgatatttggcacggagtgcgagaagcgtgggatgctcatcagggtggctggggacaacatcatgctgtcacccccgctgatcatgactcccaatgaagtcgaagaaatcataagcaaattcggcgatgctctgaaggctacagaggaacggattggagaactgaaatccaggaagaattagccgatgctactggttgtaacgacgacatgcaattgaaaatgacaattgatcttttttatgggcgaagtgttgaagatggctttggtgaaggaaatgtcttgttagcatcaagtaagtggcgacatcacaacccctacaagcttgtgccttaaaacaaaaggatacaagaagttggagtgcttttgtgaaagcttttgcgaatcacttgaaacgttagtacttttgtgaatgattttgtaaagtgtttgcaaatatgtgcaaaacataataacatgtgtaggttttgtgaatgattttgttgtggtgcctgttgatggtttatgtatgtggatctatcatgg

SEQ ID NO: 49629 - DNA, 1043 bp, Zea Mays
cctaaacctagggcagccgccgtttgttgtcgcgagcgcgttcctgccccgccacagccgaagctcccagcgtcctcctgcaggccgagctgaaggttcagcgcgccggtggagttcgacgacgaaactccgtcacgtcatacctctccacctcccgtcttccagacgtctccaatcgaggctcccagcgtctcggagaagaggagcagcacgacacggcggctgtggcgaggaaggctcctgtcccatcccaacccagttagcagccgtccaaggaggaggagatccaatcggcgtgcgggcgtccgcggtccatccatcgatccaattccaatctgcagggaaaggaatattgtagaacacgttaacaaaattgctccaaggttccaggagggaatcaaggccttctcaggcagcccaattgttggggagatacgcggtctgggactgatacttggaactgaatttgtcgacaacaaatctccaaatgatccatttccagctgaatggggtgttggttcgatatttggcacggagtgcgagaagcgtgggatgctcatcagggtggctggggacaacatcatgctgtcacccccgctgatcatgactcccaatgaagtcgaagaaatcataagcaaattcggcgatgctctgaaggctacagaggaacggattggagaactgaaatccaggaagaattagccgatgctactggttgtaacgacgacatgcaattgaaaatgacaattgatcttttttatgggcgaagtgttgaagatggctttggtgaaggaaatgtcttgttagcatcaagtaagtggcgacatcacaacccctacaagcttgtgccttaaaacaaaaggatacaagaagttggagtgcttttgtgaaagcttttgcgaatcacttgaaacgttagtacttttgtgaatgattttgtaaagtgtttgcaaatatgtgcaaaacataataacatgtgtaggttttgtgaatgattttgttgtggtgcctgttgatggtttatgtatgtggatctatcatgg

SEQ ID NO: 49630 - DNA, 1683 bp, Zea Mays
cgacagcgggcgcgcgcggctgcgactgctgctgctgcttcttctccacttctccttccttcccctataaagcaaggaatagtcgcagcttgccccagcttcgcaagctttcctgctaatccctgccattagtagcaagcaagcaagaaagcagtggtagtaggtgccacccacacggttttcacggctgccggctgggagcgaccgaggagatcgtcgtcacgctcgatggaggccctggtggggaggtactggggtctggggggacggcggtgcggggcgtgcggcggatcgccggcggcggcgcactgccggacgtgcccgggcggcgcgtacctgtgcggggggtgcgacgcggggcacgcgcgggcggggcacgagcgggtgtgggtctgcgaggtgtgcgagtgcgcgccggccgccgtgacgtgccgcgccgacgccgccgcgctctgcgccgcgtgcgacgccgacatccacgacgccaacccgctggcgcgccgccacgagcgcgtccccgtgcagcccatcggcgccgccgctgatcccgccgcggagaaggcggcgctgctgttcggccttgccgcggaagggaaggacggcggcgacgcggccaaggtcgtcgtcgacgccagtaagctggacctcctgttcgcggacgacgtggtcgacccgttcctcgcccaagacttcgccaggttcccgcacgccgacagcgtcgtgccgaacgatggatccaactgcggcgccgctgtggacttcgactttggtggcggcgtcgccgtcgccgccaagcagccgtcctacagctcctacacggcggcgtcgctgggccacagcgctcgtcgtcggaggtcggcctggtcccagacgtgatgtgcggccgcggtgggagcgtgaccggcggcgtcatcgagctcgacttcgcgcagtccaaggcggcgtacctgccttacgctgcaactcctacccacagcctgtcgtctttggacgtgggcgccgtgccggagcgcagtgacggggtcatggcgggcaggctcgcgacgccgacgccggcgacggccacggagagcagggaggcgcggctgatgcgttaccgcgagaaacggaaaaaccggcggttcgagaagacgatccgctatgcgtcccggaaggcctacgcggagtcgcggccgcgcatcaagggccgcttcgccaagcgcgcggatgacaacgacgccgacgccgacctcgacgaggctgccgcgccggctccgccggcgcggtcgcagccgcagccgcagccgcagccatcgtaccgctacgtgctcgacttcgccgccggctacggcgtcgtgcccacattctgatgacgcgtgccgtgtgagtgttgccgcgcgcgtcgcgtgccccatgttttcacggattgggccggcgcgcgtgcgagccatgctgcatgcgcgcctacgtgtttgctggagcggcgagctcctagttggcgatcacatgccgttttgggctagccatggttaaattagcaggctagcgtgtactgctgctgcgtttgtttgctggggcgaccagttctactaatagtacgtagtaccgtgtaattttgggtcaggaagagatgcttagcatctgtttcgattgatcgatgtagtattatgctataattggaaaggcctctcgatctatttgcaa

SEQ ID NO: 49631 - DNA, 1691 bp, Zea Mays
gacagcgggcgcgcgcggctgcgactgctgctgctgcttcttctccacttctccttccttcccctataaagcaaggaatagtcgcagcttgccccagcttcgcaagctttcctgctaatccctgccattagtagcaagcaagcaagaaagcagtggtagtaggtgccacccacacggttttcacggctgccggctgggagcgaccgaggagatcgtcgtcacgctcgatggaggccctggtggggaggtactggggtctggggggacggcggtgcggggcgtgcggcggatcgccggcggcggcgcactgccggacgtgcccgggcggcgcgtacctgtgcggggggtgcgacgcggggcacgcgcgggcggggcacgagcgggtgtgggtctgcgaggtgtgcgagtgcgcgccggccgccgtgacgtgccgcgccgacgccgccgcgctctgcgccgcgtgcgacgccgacatccacgacgccaacccgctggcgcgccgccacgagcgcgtccccgtgcagcccatcggcgccgccgctgatcccgccgcggagaaggcggcgctgctgttcggccttgccgcggaagggaaggacggcggcgacgcggccaaggtcgtcgtcgacgccagtaagctggacctcctgttcgcggacgacgtggtcgacccgttcctcgcccaagacttcgccaggttcccgcacgccgacagcgtcgtgccgaacgatggatccaactgcggcgccgctgtggacttcgactttggtggcggcgtcgccgtcgccgccaagcagccgtcctacagctcctacacggcggcgtcgctgggccacagcggctcgtcgtcggaggtcggcctggtcccagacgtgatgtgcggccgcggtgggagcgtgaccggcggcgtcatcgagctcgacttcgcgcagtccaaggcggcgtacctgccttacgctgcaactcctacccacagcctgtcgtctttggacgtgggcgccgtgccggagcgcagtgacggggtcatggcgggcaggctcgcgacgccgacgccggcgacggccacggagagcagggaggcgcggctgatgcgttaccgcgagaaacggaaaaaccggcggttcgagaagacgatccgctatgcgtcccggaaggcctacgcggagtcgcggccgcgcatcaagggccgcttcgccaagcgcgcggatgacaacgacgccgacgccgacctcgacgaggctgccgcgccggctccgccggcgcggtcgcagccgcagccgcagccgcagccatcgtaccgctacgtgctcgacttcgccgccggctacggcgtcgtgcccacattctgatgacgcgtgccgtgtgagtgttgccgcgcgcgtcgcgtgccccatgttttcacggattgggccggcgcgcgtgcgagccatgctgcatgcgcgcctacgtgtttgctggagcggcgagctcctagttggcgatcacatgccgttttgggctagccatggttaaattagcaggctagcgtgtactgctgctgcgtttgtttgctggggcgaccagttctactaatagtacgtagtaccgtgtaattttgggtcaggaagagatgcttagcatctgtttcgattgatcgatgtagtattatgctataattggaaaggcctctcgatctatttgcaaaaaaataa

SEQ ID NO: 49632 - DNA, 3026 bp, Zea Mays
cactccctgtcttttctcccgacattcaccccgagtgcgcgcgcgctctcttccctcgctcgcccgctcgttcgcgacggcaactaggcgatcaacctcgccgcccgccgccctaatttacgtgcccaggtcttcgtccgtcccctctctaggacttcgccgatcctttctcaggcgacgggagccaaccaggttcacctgtagttaattttgtaaattattgttatatctgtagctgccccaatggaagttgagctgccaaacatccataaagctacttcgagtgaccattggagtttaaccagcagccaatacccgtctggtaaatttcctaaggtctcagtgggtatcatgattccgaaggcaggtagtataccaagagccagaggtggagatgctaccccaactcctacatttgacaggaacttgtctcaaggaactgatggtttatctagaccaaaaggtgataatacttcacttcgtgtttcacaagaagctctgaaccatgatgtatccactgaaggggctcctaaagctgatcctgttacgaaggtctctgtatcacaacctgatgacaatacatgtgagcaaacaggaaccttttcctttggaacaagaagagaacaaggcatcagcgttgaaaaattggagacacctgagtttttaagttcccaaagaaaacggaacacggagtctgcagataaagccaaacccaatagtgagatgctcaggatgaagttgtgggagatccttggtggcacttcacaaaacaagcaggccgctgcttcaccaaaccctgatgacatggagacacctgatcagcctaaaggtcaaactgtcaaaggaccatcttcagggaacaaggaggttttcacttcaccttttcttgataacatcaagacaccagatccactgaagcgtcaaacggtgaacttcacaaagtgtaaactgtcccttgatccaattgaatcagattctgatagtccaaaagttgatgaaagaagacctgttactcgctccttgggacgtaagaaagcactggcatcctccaagaagcagagccgaagttcaaagaaaccattatctacttttcagtctacacccaagaagaaaatgctggacaatgtgtttatctttaatgagaaatgcacacctaaaacagtggatcagggtgaaacaaataaagcgactgagtcacgtggtagcaggtctcctgattctgccaaaaaaagagtaaacaggaaacagccatacctttctccaactgaggatgaagggattaaaagttctgaaacaagttttgcaaaaggatataaatctcacaaatggccttcagatattgatgttcctgataaatctcctgttgagcatatgggtaggaaatcaaatctaaaagaggacagaatgagcaaaagacgcttatcttcagctgctccttttcccactgctgcaacacaagaaaatactgattctgataaagaacaagaacaatgcccggaaaacttcctaaccagggcttttgatcaagcctccaaggagctgagcaaaagcgcaaagaaaccattttctacttttcactctacacctaagaagaaaatgcaggaagaaagagaaaacagtaaacaaccatctcattcacccctttctccaactgaagatgaagggactcaagggagtaaaagttccgaacaaagctttgcaaaaggatataaatctcaaaaatggattccagatatcaagggcacagataaatctccccttgagtatgttggcaggaaaacaaaactaaaagaggatagaatgaacaaaagatacttatcttcacctactccttttgccacttctggaacacaagaaactatagtttctgacaaagatcaagaacaatgcccagaaaactacctaactagggcttttgatcaattgatagtggttctgggaaggtttcaaactaagatcaagtctgaaacaagcaagaaaagttctgagattcttgcagctactagagagactatatgtcagcaccttgagggggttgaggcgcagatgcaggctgacgtggacaaattggtcaatgcaggcaggtctaaaaggaaacgcctagaatctacatttgaagatcaacaagaaaagttaagaattcttcatgagaagttcaaggaggaggtcaacaagcagcttctgaattgcaggagttctcttgaggattttgaatcctaccatgcagaacttaagggagtagctgacaagcaaaaatcatcccacaagaagctcttagcaaatgccgagaaaacagtaggcgctcagctcaacgatgcagaaaccaaaatcgcagaggtccagaagagagcacgcaagaggatgaatggcctgaaatacgtgctcaaggagcttatcacagagactgttgattgactgatcgaagttgcttcactttgtccaagtacatatcaccggtgcgaagattaggatacgcaggatgcacatgcgaacacgtctagggttccatttgaaaggggtacaggagaatcatgatgcacataggttttgtcagaaatcgagatttgcaaaggctattttacttctagacgtccttagtattattttctgggtcgtaccttccgttagggtttttgctacctggtcgatgtgcacagtgcactgctgcactgcaacacccagacgtctttcagcgatatgcgacctgtaggatgtgtgtactgttcctcttcgttctagccaaaccctgttgctagctggaatactaatgaagaggtgtcttgatatttacgtgatttgacgcttgcttgatgctgtgcactggagtctaatggtgactggtttatgcacagatttacgatgtcgttgttccatctctctctcgctttttaactcgggaccgcaaccatggattggttggacgccaccaatcgtggcgcgttggagcggatcgtcccataagcccatttggatcgtccggcccactcctcggctcatggcaataggagtgagatctccaatttaag

SEQ ID NO: 49633 - DNA, 3102 bp, Zea Mays
ccgacattcaccccgagtgcgcgcgcgctctcttccctcgctcgcccgctcgttcgcgacggcaactaggcgatcaacctcgccgcccgccgccctaatttacgtgcccaggtcttcgtccgtcccctctctaggacttcgccgatcctttctcaggcgacgggagccaaccaggctacttcgagtgaccattggagtttaaccagcagccaatacccgtctggtaaatttcctaaggtctcagtgggtatcatgattccgaaggcaggtagtataccaagagccagaggtggagatgctaccccaactcctacatttgacaggaacttgtctcaaggaactgatggtttatctagaccaaaaggtgataatacttcacttcgtgtttcacaagaagctctgaaccatgatgtatccactgaaggggctcctaaagctgatcctgttacgaaggtctctgtatcacaacctgatgacaatacatgtgagcaaacaggaaccttttcctttggaacaagaagagaacaaggcatcagcgttgaaaaattggagacacctgagtttttaagttcccaaagaaaacggaacacggagtctgcagataaagccaaacccaatagtgagatgctcaggatgaagttgtgggagatccttggtggcacttcacaaaacaagcaggccgctgcttcaccaaaccctgatgacatggagacacctgatcagcctaaaggtcaaactgtcaaaggaccatcttcagggaacaaggaggttttcacttcaccttttcttgataacatcaagacaccagatccactgaagcgtcaaacggtgaacttcacaaagtgtaaactgtcccttgatccaattgaatcagattctgatagtccaaaagttgatgaaagaagacctgttactcgctccttgggacgtaagaaagcactggcatcctccaagaagcagagccgaagttcaaagaaaccattatctacttttcagtctacacccaagaagaaaatgctggacaatgtgtttatctttaatgagaaatgcacacctaaaacagtggatcagggtgaaacaaataaagcgactgagtcacgtggtagcaggtctcctgattctgccaaaaaaagagtaaacaggaaacagccatacctttctccaactgaggatgaagggattaaaagttctgaaacaagttttgcaaaaggatataaatctcacaaatggccttcagatattgatgttcctgataaatctcctgttgagcatatgggtaggaaatcaaatctaaaagaggacagaatgagcaaaagacgcttatcttcagctgctccttttcccactgctggtaaaagtgtttactttcattcattgagtatttgagtccatgttagcagtttttatcttttttgtttcagcaacacaagaaaatactgattctgataaagaacaagaacaatgcccggaaaacttcctaaccagggcttttgatcaagcctccaaggagctgagcaaaagcgcaaagaaaccattttctacttttcactctacacctaagaagaaaatgcagggtaatgtgtttaccttcaatgagaaacgcgcacctaaaacggtggatcaggacaaaatgaatcaaactactgagtcgcctggtagtgagtctcctggttctgcagaagaaagagaaaacagtaaacaaccatctcattcacccctttctccaactgaagatgaagggactcaagggagtaaaagttccgaacaaagctttgcaaaaggatataaatctcaaaaatggattccagatatcaagggcacagataaatctccccttgagtatgttggcaggaaaacaaaactaaaagaggatagaatgaacaaaagatacttatcttcacctactccttttgccacttctggaacacaagaaactatagtttctgacaaagatcaagaacaatgcccagaaaactacctaactagggcttttgatcaattgatagtggttctgggaaggtttcaaactaagatcaagtctgaaacaagcaagaaaagttctgagattcttgcagctactagagagactatatgtcagcaccttgagggggttgaggcgcagatgcaggctgacgtggacaaattggtcaatgcaggcaggtctaaaaggaaacgcctagaatctacatttgaagatcaacaagaaaagttaagaattcttcatgagaagttcaaggaggaggtcaacaagcagcttctgaattgcaggagttctcttgaggattttgaatcctaccatgcagaacttaagggagtagctgacaagcaaaaatcatcccacaagaagctcttagcaaatgccgagaaaacagtaggcgctcagctcaacgatgcagaaaccaaaatcgcagaggtccagaagagagcacgcaagaggatgaatggcctgaaatacgtgctcaaggagcttatcacagagactgttgattgactgatcgaagttgcttcactttgtccaagtacatatcaccggtgcgaagattaggatacgcaggatgcacatgcgaacacgtctagggttccatttgaaaggggtacaggagaatcatgatgcacataggttttgtcagaaatcgagatttgcaaaggctattttacttctagacgtccttagtattattttctgggtcgtaccttccgttagggtttttgctacctggtcgatgtgcacagtgcactgctgcactgcaacacccagacgtctttcagcgatatgcgacctgtaggatgtgtgtactgttcctcttcgttctagccaaaccctgttgctagctggaatactaatgaagaggtgtcttgatatttacgtgatttgacgcttgcttgatgctgtgcactggagtctaatggtgactggtttatgcacagatttacgatgtcgttgttccatctctctctcgctttttaactcgggaccgcaaccatggattggttggacgccaccaatcgtggcgcgttggagcggatcgtcccataagcccatttggatcgtccggcccactcctcggctcatggcaataggagtgagatctccaatttaag

SEQ ID NO: 49634 - DNA, 2938 bp, Zea Mays
cgctctcttccctcgctcgcccgctcgttcgcgacggcaactaggcgatcaacctcgccgcccgccgccctaatttacgtgcccaggtcttcgtccgtcccctctctaggacttcgccgatcctttctcaggcgacgggagccaaccaggttcacctgtagttaattttgtaaattattgttatatctgtagctgccccaatggaagttgagctgccaaacatccataaagctacttcgagtgaccattggagtttaaccagcagccaatacccgtctggtaaatttcctaaggtctcagtgggtatcatgattccgaaggcaggtagtataccaagagccagaggtggagatgctaccccaactcctacatttgacaggaacttgtctcaaggaactgatggtttatctagaccaaaaggaaccttttcctttggaacaagaagagaacaaggcatcagcgttgaaaaattggagacacctgagtttttaagttcccaaagaaaacggaacacggagtctgcagataaagccaaacccaatagtgagatgctcaggatgaagttgtgggagatccttggtggcacttcacaaaacaagcaggccgctgcttcaccaaaccctgatgacatggagacacctgatcagcctaaaggtcaaactgtcaaaggaccatcttcagggaacaaggaggttttcacttcaccttttcttgataacatcaagacaccagatccactgaagcgtcaaacggtgaacttcacaaagtgtaaactgtcccttgatccaattgaatcagattctgatagtccaaaagttgatgaaagaagacctgttactcgctccttgggacgtaagaaagcactggcatcctccaagaagcagagccgaagttcaaagaaaccattatctacttttcagtctacacccaagaagaaaatgctggacaatgtgtttatctttaatgagaaatgcacacctaaaacagtggatcagggtgaaacaaataaagcgactgagtcacgtggtagcaggtctcctgattctgccaaaaaaagagtaaacaggaaacagccatacctttctccaactgaggatgaagggattaaaagttctgaaacaagttttgcaaaaggatataaatctcacaaatggccttcagatattgatgttcctgataaatctcctgttgagcatatgggtaggaaatcaaatctaaaagaggacagaatgagcaaaagacgcttatcttcagctgctccttttcccactgctgcaacacaagaaaatactgattctgataaagaacaagaacaatgcccggaaaacttcctaaccagggcttttgatcaagcctccaaggagctgagcaaaagcgcaaagaaaccattttctacttttcactctacacctaagaagaaaatgcagggtaatgtgtttaccttcaatgagaaacgcgcacctaaaacggtggatcaggacaaaatgaatcaaactactgagtcgcctggtagtgagtctcctggttctgcagaagaaagagaaaacagtaaacaaccatctcattcacccctttctccaactgaagatgaagggactcaagggagtaaaagttccgaacaaagctttgcaaaaggatataaatctcaaaaatggattccagatatcaagggcacagataaatctccccttgagtatgttggcaggaaaacaaaactaaaagaggatagaatgaacaaaagatacttatcttcacctactccttttgccacttctgtttctgacaaagatcaagaacaatgcccagaaaactacctaactagggcttttgatcaattgatagtggttctgggaaggtttcaaactaagatcaagtctgaaacaagcaagaaaagttctgagattcttgcagctactagagagactatatgtcagcaccttgagggggttgaggcgcagatgcaggctgacgtggacaaattggtcaatgcaggcaggtctaaaaggaaacgcctagaatctacatttgaagatcaacaagaaaagttaagaattcttcatgagaagttcaaggaggaggtcaacaagcagcttctgaattgcaggagttctcttgaggattttgaatcctaccatgcagaacttaagggagtagctgacaagcaaaaatcatcccacaagaagctcttagcaaatgccgagaaaacagtaggcgctcagctcaacgatgcagaaaccaaaatcgcagaggtccagaagagagcacgcaagaggatgaatggcctgaaatacgtgctcaaggagcttatcacagagactgttgattgactgatcgaagttgcttcactttgtccaagtacatatcaccggtgcgaagattaggatacgcaggatgcacatgcgaacacgtctagggttccatttgaaaggggtacaggagaatcatgatgcacataggttttgtcagaaatcgagatttgcaaaggctattttacttctagacgtccttagtattattttctgggtcgtaccttccgttagggtttttgctacctggtcgatgtgcacagtgcactgctgcactgcaacacccagacgtctttcagcgatatgcgacctgtaggatgtgtgtactgttcctcttcgttctagccaaaccctgttgctagctggaatactaatgaagaggtgtcttgatatttacgtgatttgacgcttgcttgatgctgtgcactggagtctaatggtgactggtttatgcacagatttacgatgtcgttgttccatctctctctcgctttttaactcgggaccgcaaccatggattggttggacgccaccaatcgtggcgcgttggagcggatcgtcccataagcccatttggatcgtccggcccactcctcggctcatggcaataggagtgagatctccaatttaag

SEQ ID NO: 49635 - DNA, 2998 bp, Zea Mays
cgccgccctaatttacgtgcccaggtcttcgtccgtcccctctctaggacttcgccgatcctttctcaggcgacgggagccaaccagagtgtctccaccctgtggatcgtggttgaggaagacgatcactgtgcgctgctacctcatacagctacgttattgtggttcacctgtagttaattttgtaaattattgttatatctgtagctgccccaatggaagttgagctgccaaacatccataaagctacttcgagtgaccattggagtttaaccagcagccaatacccgtctggtaaatttcctaaggtctcagtgggtatcatgattccgaaggcaggtagtataccaagagccagaggtggagatgctaccccaactcctacatttgacaggaacttgtctcaaggaactgatggtttatctagaccaaaaggtgataatacttcacttcgtgtttcacaagaagctctgaaccatgatgtatccactgaaggggctcctaaagctgatcctgttacgaaggtctctgtatcacaacctgatgacaatacatgtgagcaaacaggaaccttttcctttggaacaagaagagaacaaggcatcagcgttgaaaaattggagacacctgagtttttaagttcccaaagaaaacggaacacggagtctgcagataaagccaaacccaatagtgagatgctcaggatgaagttgtgggagatccttggtggcacttcacaaaacaagcaggccgctgcttcaccaaaccctgatgacatggagacacctgatcagcctaaaggtcaaactgtcaaaggaccatcttcagggaacaaggaggttttcacttcaccttttcttgataacatcaagacaccagatccactgaagcgtcaaacggtgaacttcacaaagtgtaaactgtcccttgatccaattgaatcagattctgatagtccaaaagttgatgaaagaagacctgttactcgctccttgggacgtaagaaagcactggcatcctccaagaagcagagccgaagttcaaagaaaccattatctacttttcagtctacacccaagaagaaaatgctggacaatgtgtttatctttaatgagaaatgcacacctaaaacagtggatcagggtgaaacaaataaagcgactgagtcacgtggtagcaggtctcctgattctgccaaaaaaagagtaaacaggaaacagccatacctttctccaactgaggatgaagggattaaaagttctgaaacaagttttgcaaaaggatataaatctcacaaatggccttcagatattgatgttcctgataaatctcctgttgagcatatgggtaggaaatcaaatctaaaagaggacagaatgagcaaaagacgcttatcttcagctgctccttttcccactgctgcaacacaagaaaatactgattctgataaagaacaagaacaatgcccggaaaacttcctaaccagggcttttgatcaagcctccaaggagctgagcaaaagcgcaaagaaaccattttctacttttcactctacacctaagaagaaaatgcaggaagaaagagaaaacagtaaacaaccatctcattcacccctttctccaactgaagatgaagggactcaagggagtaaaagttccgaacaaagctttgcaaaaggatataaatctcaaaaatggattccagatatcaagggcacagataaatctccccttgagtatgttggcaggaaaacaaaactaaaagaggatagaatgaacaaaagatacttatcttcacctactccttttgccacttctggaacacaagaaactatagtttctgacaaagatcaagaacaatgcccagaaaactacctaactagggcttttgatcaattgatagtggttctgggaaggtttcaaactaagatcaagtctgaaacaagcaagaaaagttctgagattcttgcagctactagagagactatatgtcagcaccttgagggggttgaggcgcagatgcaggctgacgtggacaaattggtcaatgcaggcaggtctaaaaggaaacgcctagaatctacatttgaagatcaacaagaaaagttaagaattcttcatgagaagttcaaggaggaggtcaacaagcagcttctgaattgcaggagttctcttgaggattttgaatcctaccatgcagaacttaagggagtagctgacaagcaaaaatcatcccacaagaagctcttagcaaatgccgagaaaacagtaggcgctcagctcaacgatgcagaaaccaaaatcgcagaggtccagaagagagcacgcaagaggatgaatggcctgaaatacgtgctcaaggagcttatcacagagactgttgattgactgatcgaagttgcttcactttgtccaagtacatatcaccggtgcgaagattaggatacgcaggatgcacatgcgaacacgtctagggttccatttgaaaggggtacaggagaatcatgatgcacataggttttgtcagaaatcgagatttgcaaaggctattttacttctagacgtccttagtattattttctgggtcgtaccttccgttagggtttttgctacctggtcgatgtgcacagtgcactgctgcactgcaacacccagacgtctttcagcgatatgcgacctgtaggatgtgtgtactgttcctcttcgttctagccaaaccctgttgctagctggaatactaatgaagaggtgtcttgatatttacgtgatttgacgcttgcttgatgctgtgcactggagtctaatggtgactggtttatgcacagatttacgatgtcgttgttccatctctctctcgctttttaactcgggaccgcaaccatggattggttggacgccaccaatcgtggcgcgttggagcggatcgtcccataagcccatttggatcgtccggcccactcctcggctcatggcaataggagtgagatctccaatttaag

SEQ ID NO: 49636 - DNA, 3006 bp, Zea Mays
cccaggtcttcgtccgtcccctctctaggacttcgccgatcctttctcaggcgacgggagccaaccagagtgtctccaccctgtggatcgtggttgaggaagacgatcactgtgcgctgctacctcatacagctacgttattgtgctgccccaatggaagttgagctgccaaacatccataaagctacttcgagtgaccattggagtttaaccagcagccaatacccgtctggtaaatttcctaaggtctcagtgggtatcatgattccgaaggcaggtagtataccaagagccagaggtggagatgctaccccaactcctacatttgacaggaacttgtctcaaggaactgatggtttatctagaccaaaaggtgataatacttcacttcgtgtttcacaagaagctctgaaccatgatgtatccactgaaggggctcctaaagctgatcctgttacgaaggtctctgtatcacaacctgatgacaatacatgtgagcaaacaggaaccttttcctttggaacaagaagagaacaaggcatcagcgttgaaaaattggagacacctgagtttttaagttcccaaagaaaacggaacacggagtctgcagataaagccaaacccaatagtgagatgctcaggatgaagttgtgggagatccttggtggcacttcacaaaacaagcaggccgctgcttcaccaaaccctgatgacatggagacacctgatcagcctaaaggtcaaactgtcaaaggaccatcttcagggaacaaggaggttttcacttcaccttttcttgataacatcaagacaccagatccactgaagcgtcaaacggtgaacttcacaaagtgtaaactgtcccttgatccaattgaatcagattctgatagtccaaaagttgatgaaagaagacctgttactcgctccttgggacgtaagaaagcactggcatcctccaagaagcagagccgaagttcaaagaaaccattatctacttttcagtctacacccaagaagaaaatgctggacaatgtgtttatctttaatgagaaatgcacacctaaaacagtggatcagggtgaaacaaataaagcgactgagtcacgtggtagcaggtctcctgattctgccaaaaaaagagtaaacaggaaacagccatacctttctccaactgaggatgaagggattaaaagttctgaaacaagttttgcaaaaggatataaatctcacaaatggccttcagatattgatgttcctgataaatctcctgttgagcatatgggtaggaaatcaaatctaaaagaggacagaatgagcaaaagacgcttatcttcagctgctccttttcccactgctggtaaaagtgtttactttcattcattgagtatttgagtccatgttagcagtttttatcttttttgtttcagcaacacaagaaaatactgattctgataaagaacaagaacaatgcccggaaaacttcctaaccagggcttttgatcaagcctccaaggagctgagcaaaagcgcaaagaaaccattttctacttttcactctacacctaagaagaaaatgcaggaagaaagagaaaacagtaaacaaccatctcattcacccctttctccaactgaagatgaagggactcaagggagtaaaagttccgaacaaagctttgcaaaaggatataaatctcaaaaatggattccagatatcaagggcacagataaatctccccttgagtatgttggcaggaaaacaaaactaaaagaggatagaatgaacaaaagatacttatcttcacctactccttttgccacttctggaacacaagaaactatagtttctgacaaagatcaagaacaatgcccagaaaactacctaactagggcttttgatcaattgatagtggttctgggaaggtttcaaactaagatcaagtctgaaacaagcaagaaaagttctgagattcttgcagctactagagagactatatgtcagcaccttgagggggttgaggcgcagatgcaggctgacgtggacaaattggtcaatgcaggcaggtctaaaaggaaacgcctagaatctacatttgaagatcaacaagaaaagttaagaattcttcatgagaagttcaaggaggaggtcaacaagcagcttctgaattgcaggagttctcttgaggattttgaatcctaccatgcagaacttaagggagtagctgacaagcaaaaatcatcccacaagaagctcttagcaaatgccgagaaaacagtaggcgctcagctcaacgatgcagaaaccaaaatcgcagaggtccagaagagagcacgcaagaggatgaatggcctgaaatacgtgctcaaggagcttatcacagagactgttgattgactgatcgaagttgcttcactttgtccaagtacatatcaccggtgcgaagattaggatacgcaggatgcacatgcgaacacgtctagggttccatttgaaaggggtacaggagaatcatgatgcacataggttttgtcagaaatcgagatttgcaaaggctattttacttctagacgtccttagtattattttctgggtcgtaccttccgttagggtttttgctacctggtcgatgtgcacagtgcactgctgcactgcaacacccagacgtctttcagcgatatgcgacctgtaggatgtgtgtactgttcctcttcgttctagccaaaccctgttgctagctggaatactaatgaagaggtgtcttgatatttacgtgatttgacgcttgcttgatgctgtgcactggagtctaatggtgactggtttatgcacagatttacgatgtcgttgttccatctctctctcgctttttaactcgggaccgcaaccatggattggttggacgccaccaatcgtggcgcgttggagcggatcgtcccataagcccatttggatcgtccggcccactcctcggctcatggcaataggagtgagatctccaatttaag

SEQ ID NO: 49637 - DNA, 2916 bp, Zea Mays
cccctctctaggacttcgccgatcctttctcaggcgacgggagccaaccagtcaggttcacctgtagttaattttgtaaattattgttatatctgtagctgccccaatggaagttgagctgccaaacatccataaagctacttcgagtgaccattggagtttaaccagcagccaatacccgtctggtaaatttcctaaggtctcagtgggtatcatgattccgaaggcaggtagtataccaagagccagaggtggagatgctaccccaactcctacatttgacaggaacttgtctcaaggaactgatggtttatctagaccaaaaggtgataatacttcacttcgtgtttcacaagaagctctgaaccatgatgtatccactgaaggggctcctaaagctgatcctgttacgaaggtctctgtatcacaacctgatgacaatacatgtgagcaaacaggaaccttttcctttggaacaagaagagaacaaggcatcagcgttgaaaaattggagacacctgagtttttaagttcccaaagaaaacggaacacggagtctgcagataaagccaaacccaatagtgagatgctcaggatgaagttgtgggagatccttggtggcacttcacaaaacaagcaggccgctgcttcaccaaaccctgatgacatggagacacctgatcagcctaaaggtcaaactgtcaaaggaccatcttcagggaacaaggaggttttcacttcaccttttcttgataacatcaagacaccagatccactgaagcgtcaaacggtgaacttcacaaagtgtaaactgtcccttgatccaattgaatcagattctgatagtccaaaagttgatgaaagaagacctgttactcgctccttgggacgtaagaaagcactggcatcctccaagaagcagagccgaagttcaaagaaaccattatctacttttcagtctacacccaagaagaaaatgctggacaatgtgtttatctttaatgagaaatgcacacctaaaacagtggatcagggtgaaacaaataaagcgactgagtcacgtggtagcaggtctcctgattctgccaaaaaaagagtaaacaggaaacagccatacctttctccaactgaggatgaagggattaaaagttctgaaacaagttttgcaaaaggatataaatctcacaaatggccttcagatattgatgttcctgataaatctcctgttgagcatatgggtaggaaatcaaatctaaaagaggacagaatgagcaaaagacgcttatcttcagctgctccttttcccactgctggtaaaatttttatcttttttgtttcagcaacacaagaaaatactgattctgataaagaacaagaacaatgcccggaaaacttcctaaccagggcttttgatcaagcctccaaggagctgagcaaaagcgcaaagaaaccattttctacttttcactctacacctaagaagaaaatgcaggaagaaagagaaaacagtaaacaaccatctcattcacccctttctccaactgaagatgaagggactcaagggagtaaaagttccgaacaaagctttgcaaaaggatataaatctcaaaaatggattccagatatcaagggcacagataaatctccccttgagtatgttggcaggaaaacaaaactaaaagaggatagaatgaacaaaagatacttatcttcacctactccttttgccacttctggaacacaagaaactatagtttctgacaaagatcaagaacaatgcccagaaaactacctaactagggcttttgatcaattgatagtggttctgggaaggtttcaaactaagatcaagtctgaaacaagcaagaaaagttctgagattcttgcagctactagagagactatatgtcagcaccttgagggggttgaggcgcagatgcaggctgacgtggacaaattggtcaatgcaggcaggtctaaaaggaaacgcctagaatctacatttgaagatcaacaagaaaagttaagaattcttcatgagaagttcaaggaggaggtcaacaagcagcttctgaattgcaggagttctcttgaggattttgaatcctaccatgcagaacttaagggagtagctgacaagcaaaaatcatcccacaagaagctcttagcaaatgccgagaaaacagtaggcgctcagctcaacgatgcagaaaccaaaatcgcagaggtccagaagagagcacgcaagaggatgaatggcctgaaatacgtgctcaaggagcttatcacagagactgttgattgactgatcgaagttgcttcactttgtccaagtacatatcaccggtgcgaagattaggatacgcaggatgcacatgcgaacacgtctagggttccatttgaaaggggtacaggagaatcatgatgcacataggttttgtcagaaatcgagatttgcaaaggctattttacttctagacgtccttagtattattttctgggtcgtaccttccgttagggtttttgctacctggtcgatgtgcacagtgcactgctgcactgcaacacccagacgtctttcagcgatatgcgacctgtaggatgtgtgtactgttcctcttcgttctagccaaaccctgttgctagctggaatactaatgaagaggtgtcttgatatttacgtgatttgacgcttgcttgatgctgtgcactggagtctaatggtgactggtttatgcacagatttacgatgtcgttgttccatctctctctcgctttttaactcgggaccgcaaccatggattggttggacgccaccaatcgtggcgcgttggagcggatcgtcccataagcccatttggatcgtccggcccactcctcggctcatggcaataggagtgagatctccaatttaag

SEQ ID NO: 49638 - DNA, 2925 bp, Zea Mays
ctttctcaggcgacgggagccaaccagagctgccccaatggaagttgagctgccaaacatccataaagctacttcgagtgaccattggagtttaaccagcagccaatacccgtctggtaaatttcctaaggtctcagtgggtatcatgattccgaaggcaggtagtataccaagagccagaggtggagatgctaccccaactcctacatttgacaggaacttgtctcaaggaactgatggtttatctagaccaaaaggtgataatacttcacttcgtgtttcacaagaagctctgaaccatgatgtatccactgaaggggctcctaaagctgatcctgttacgaaggtctctgtatcacaacctgatgacaatacatgtgagcaaacaggaaccttttcctttggaacaagaagagaacaaggcatcagcgttgaaaaattggagacacctgagtttttaagttcccaaagaaaacggaacacggagtctgcagataaagccaaacccaatagtgagatgctcaggatgaagttgtgggagatccttggtggcacttcacaaaacaagcaggccgctgcttcaccaaaccctgatgacatggagacacctgatcagcctaaaggtcaaactgtcaaaggaccatcttcagggaacaaggaggttttcacttcaccttttcttgataacatcaagacaccagatccactgaagcgtcaaacggtgaacttcacaaagtgtaaactgtcccttgatccaattgaatcagattctgatagtccaaaagttgatgaaagaagacctgttactcgctccttgggacgtaagaaagcactggcatcctccaagaagcagagccgaagttcaaagaaaccattatctacttttcagtctacacccaagaagaaaatgctggacaatgtgtttatctttaatgagaaatgcacacctaaaacagtggatcagggtgaaacaaataaagcgactgagtcacgtggtagcaggtctcctgattctgccaaaaaaagagtaaacaggaaacagccatacctttctccaactgaggatgaagggattaaaagttctgaaacaagttttgcaaaaggatataaatctcacaaatggccttcagatattgatgttcctgataaatctcctgttgagcatatgggtaggaaatcaaatctaaaagaggacagaatgagcaaaagacgcttatcttcagctgctccttttcccactgctgcaacacaagaaaatactgattctgataaagaacaagaacaatgcccggaaaacttcctaaccagggcttttgatcaagcctccaaggagctgagcaaaagcgcaaagaaaccattttctacttttcactctacacctaagaagaaaatgcagggtaatgtgtttaccttcaatgagaaacgcgcacctaaaacggtggatcaggacaaaatgaatcaaactactgagtcgcctggtagtgagtctcctggttctgcagaagaaagagaaaacagtaaacaaccatctcattcacccctttctccaactgaagatgaagggactcaagggagtaaaagttccgaacaaagctttgcaaaaggatataaatctcaaaaatggattccagatatcaagggcacagataaatctccccttgagtatgttggcaggaaaacaaaactaaaagaggatagaatgaacaaaagatacttatcttcacctactccttttgccacttctggaacacaagaaactatagtttctgacaaagatcaagaacaatgcccagaaaactacctaactagggcttttgatcaattgatagtggttctgggaaggtttcaaactaagatcaagtctgaaacaagcaagaaaagttctgagattcttgcagctactagagagactatatgtcagcaccttgagggggttgaggcgcagatgcaggctgacgtggacaaattggtcaatgcaggcaggtctaaaaggaaacgcctagaatctacatttgaagatcaacaagaaaagttaagaattcttcatgagaagttcaaggaggaggtcaacaagcagcttctgaattgcaggagttctcttgaggattttgaatcctaccatgcagaacttaagggagtagctgacaagcaaaaatcatcccacaagaagctcttagcaaatgccgagaaaacagtaggcgctcagctcaacgatgcagaaaccaaaatcgcagaggtccagaagagagcacgcaagaggatgaatggcctgaaatacgtgctcaaggagcttatcacagagactgttgattgactgatcgaagttgcttcactttgtccaagtacatatcaccggtgcgaagattaggatacgcaggatgcacatgcgaacacgtctagggttccatttgaaaggggtacaggagaatcatgatgcacataggttttgtcagaaatcgagatttgcaaaggctattttacttctagacgtccttagtattattttctgggtcgtaccttccgttagggtttttgctacctggtcgatgtgcacagtgcactgctgcactgcaacacccagacgtctttcagcgatatgcgacctgtaggatgtgtgtactgttcctcttcgttctagccaaaccctgttgctagctggaatactaatgaagaggtgtcttgatatttacgtgatttgacgcttgcttgatgctgtgcactggagtctaatggtgactggtttatgcacagatttacgatgtcgttgttccatctctctctcgctttttaactcgggaccgcaaccatggattggttggacgccaccaatcgtggcgcgttggagcggatcgtcccataagcccatttggatcgtccggcccactcctcggctcatggcaataggagtgagatctccaatttaag

SEQ ID NO: 49639 - DNA, 2954 bp, Zea Mays
ctcaggcgacgggagccaaccagggttcacctgtagttaattttgtaaattattgttatatctgtagctgccccaatggaagttgagctgccaaacatccataaagctacttcgagtgaccattggagtttaaccagcagccaatacccgtctggtaaatttcctaaggtctcagtgggtatcatgattccgaaggcaggtagtataccaagagccagaggtggagatgctaccccaactcctacatttgacaggaacttgtctcaaggaactgatggtttatctagaccaaaaggtgataatacttcacttcgtgtttcacaagaagctctgaaccatgatgtatccactgaaggggctcctaaagctgatcctgttacgaaggtctctgtatcacaacctgatgacaatacatgtgagcaaacaggaaccttttcctttggaacaagaagagaacaaggcatcagcgttgaaaaattggagacacctgagtttttaagttcccaaagaaaacggaacacggagtctgcagataaagccaaacccaatagtgagatgctcaggatgaagttgtgggagatccttggtggcacttcacaaaacaagcaggccgctgcttcaccaaaccctgatgacatggagacacctgatcagcctaaaggtcaaactgtcaaaggaccatcttcagggaacaaggaggttttcacttcaccttttcttgataacatcaagacaccagatccactgaagcgtcaaacggtgaacttcacaaagtgtaaactgtcccttgatccaattgaatcagattctgatagtccaaaagttgatgaaagaagacctgttactcgctccttgggacgtaagaaagcactggcatcctccaagaagcagagccgaagttcaaagaaaccattatctacttttcagtctacacccaagaagaaaatgctggacaatgtgtttatctttaatgagaaatgcacacctaaaacagtggatcagggtgaaacaaataaagcgactgagtcacgtggtagcaggtctcctgattctgccaaaaaaagagtaaacaggaaacagccatacctttctccaactgaggatgaagggattaaaagttctgaaacaagttttgcaaaaggatataaatctcacaaatggccttcagatattgatgttcctgataaatctcctgttgagcatatgggtaggaaatcaaatctaaaagaggacagaatgagcaaaagacgcttatcttcagctgctccttttcccactgctgcaacacaagaaaatactgattctgataaagaacaagaacaatgcccggaaaacttcctaaccagggcttttgatcaagcctccaaggagctgagcaaaagcgcaaagaaaccattttctacttttcactctacacctaagaagaaaatgcagggtaatgtgtttaccttcaatgagaaacgcgcacctaaaacggtggatcaggacaaaatgaatcaaactactgagtcgcctggtagtgagtctcctggttctgcagaagaaagagaaaacagtaaacaaccatctcattcacccctttctccaactgaagatgaagggactcaagggagtaaaagttccgaacaaagctttgcaaaaggatataaatctcaaaaatggattccagatatcaagggcacagataaatctccccttgagtatgttggcaggaaaacaaaactaaaagaggatagaatgaacaaaagatacttatcttcacctactccttttgccacttctgaaactatagtttctgacaaagatcaagaacaatgcccagaaaactacctaactagggcttttgatcaattgatagtggttctgggaaggtttcaaactaagatcaagtctgaaacaagcaagaaaagttctgagattcttgcagctactagagagactatatgtcagcaccttgagggggttgaggcgcagatgcaggctgacgtggacaaattggtcaatgcaggcaggtctaaaaggaaacgcctagaatctacatttgaagatcaacaagaaaagttaagaattcttcatgagaagttcaaggaggaggtcaacaagcagcttctgaattgcaggagttctcttgaggattttgaatcctaccatgcagaacttaagggagtagctgacaagcaaaaatcatcccacaagaagctcttagcaaatgccgagaaaacagtaggcgctcagctcaacgatgcagaaaccaaaatcgcagaggtccagaagagagcacgcaagaggatgaatggcctgaaatacgtgctcaaggagcttatcacagagactgttgattgactgatcgaagttgcttcactttgtccaagtacatatcaccggtgcgaagattaggatacgcaggatgcacatgcgaacacgtctagggttccatttgaaaggggtacaggagaatcatgatgcacataggttttgtcagaaatcgagatttgcaaaggctattttacttctagacgtccttagtattattttctgggtcgtaccttccgttagggtttttgctacctggtcgatgtgcacagtgcactgctgcactgcaacacccagacgtctttcagcgatatgcgacctgtaggatgtgtgtactgttcctcttcgttctagccaaaccctgttgctagctggaatactaatgaagaggtgtcttgatatttacgtgatttgacgcttgcttgatgctgtgcactggagtctaatggtgactggtttatgcacagatttacgatgtcgttgttccatctctctctcgctttttaactcgggaccgcaaccatggattggttggacgccaccaatcgtggcgcgttggagcggatcgtcccataagcccatttggatcgtccggcccactcctcggctcatggcaataggagtgagatctccaatttaag

SEQ ID NO: 49640 - DNA, 405 bp, Zea Mays
gaaccgaaacccgatacatccaggcgtacagccctccgcctcgtgaaggcaaagcacgcgcaaagccaccacagcgtcttcatcttcgtctccagtccaagcaagcgaagagcacccctcgagatctctccctccccgcgccgccatggacgcagttgactcggtagtcgacccgctccgggagttcgccaaggacagcatccgcctcgtcaagcgctgccacaagccggaccgcaaggagttcaccaaggtcgccgcgcggactgcgatcggcttcgtcgtcatgggattcgtcggcttctttgtcaagctcatcttcatccctatcaacaacatcatcgtcggctccggctgatccgtaaacctcagtgactggctagtctgggtgccttttagatcattcgg

SEQ ID NO: 49641 - DNA, 428 bp, Zea Mays
gaaccgaaacccgatacatccaggcgtacagccctccgcctcgtgaaggcaaagcacgcgcaaagccaccacagcgtcttcatcttcgtctccagtccaagcaagcgaagagcacccctcgagatctctccctccccgcgccgccatggacgcagttgactcggtagtcgacccgctccgggagttcgccaaggacagcatccgcctcgtcaagcgctgccacaagccggaccgcaaggagttcaccaaggtcgccgcgcggactgcgatcggcttcgtcgtcatgggattcgtcggcttctttgtcaagctcatcttcatccctatcaacaacatcatcgtcggctccggctgatccgtaaacctcagttggcacagtggaaattttatatttgatatggtacagtgctagttttgcataatgttcc

SEQ ID NO: 49642 - DNA, 440 bp, Zea Mays
gaaccgaaacccgatacatccaggcgtacagccctccgcctcgtgaaggcaaagcacgcgcaaagccaccacagcgtcttcatcttcgtctccagtccaagcaagcgaagagcacccctcgagatctctccctccccgcgccgccatggacgcagttgactcggtagtcgacccgctccgggagttcgccaaggacagcatccgcctcgtcaagcgctgccacaagccggaccgcaaggagttcaccaaggtcgccgcgcggactgcgatcggcttcgtcgtcatgggattcgtcggcttctttgtcaagctcatcttcatccctatcaacaacatcatcgtcggctccggctgatccgtaaacctcaggatagtggagcagcagttcgtgcgtgcggcctccaagcgtagagtatactagatgattgttataaaagaat

SEQ ID NO: 49643 - DNA, 1045 bp, Zea Mays
gaaccgaaacccgatacatccaggcgtacagccctccgcctcgtgaaggcaaagcacgcgcaaagccaccacagcgtcttcatcttcgtctccagtccaagcaagcgaagagcacccctcgagatctctccctccccgcgccgccatggacgcagttgactcggtagtcgacccgctccgggagttcgccaaggacagcatccgcctcgtcaagcgctgccacaagccggaccgcaaggagttcaccaaggtcgccgcgcggactgcgatcggcttcgtcgtcatgggattcgtcggcttctttgtcaagctcatcttcatccctatcaacaacatcatcgtcggctccggctgatccgtaaacctcaggagtggacaatggcgtcactaccttggaggcagcaccgttttcagctctgatttccgcaaagcaattcctttaggacttgtgttgttaaagggcaactcccttatcttttcctctcttgaggtcgtgtggtagatctggaactcttttgtacctggtgtcgaatagtcttttgtggatcagcgggtgacaaaattaaatggttaccgttgtcttggggattgctttgtgcgtttgtggtgcggcaccgttcataatttaccttttgacgcagcgtagcagtctgaatatgtaattttcgtacgaaagctgccaaagctaagagactgcgtaccactactgaaatcatgccatgaataattatgacttattagttctagatattattgaagttatataactttcagcataacttataatatggataactatatgataacctcataattttaaagtagtatgattaattagaattagtttaaaagtcacaagttgatttcatgaatacatctcttttcctagttgatttcataaacataaacacgactaacagcatcaaaagagtcacaatatatataaaaaaacaagcacaaagttggtcaacaaacatatattttggttctccgacaaattatgatgagattatcatatatagtccaccaagaaaaggaaacaaaa

SEQ ID NO: 49644 - DNA, 2469 bp, Zea Mays
ggctgtctttgttttggccaccgccaccttcctctgctcataagtagaggcgagcgtggcgtcaggccgggagcgcgcggacgagacgagaggcgaagagagcagcccaaacacgactactgcattacacacacacacaggataggagtacgtgtctgcttctctctccccgctggcctcctcctccagtacttcagacagtgcaccgtgctgcggcctctttcatccctcaaggccggccgcccccagaaccagagtcggagcgaatccatggctcctccgcccctctcctcctggccatgggcaagcctcggccagtacaagtacgtgctgctggggcctctggtgtggaaggtgctgcaagaatggcgggagcaggcgggcctgccgctcggctcctggtggctgcacctgttgctgctgttcgcggcgcgcggcctcacctaccaattctggttcagctacggcaacatgctcttcttcacccgccgccgccgcgtcgtcgccgacggcgtcgacttccgccagatcgacgccgagtgggactgggacaactttctcgtgctgcaaacgctgattggggccacggtggtcaacagcccactgctcccgggcctgcggcagctctgcctgtgggacccgcgcgggtgggccgtcgccctgctgctgcatgtgggcttctcagagccggtcttctacctggcccaccgggccctccacagggccccgctcttcgcccgctaccacgccgcgcaccactcctcgggcgtcacccagccgctgacagccgggttcgggacgccgctggaggtcctgctgctgactctggtgatgggggccccgctggcaggggccttcctggtgggggccggctccataggcctggtctacgtgcacgccctcgccttcgactacctgcgcgccatgggttacagcaacgtggaggtcgtgtcgcccagggtcttcgaggcgttcccgctgctcagatacatcctctacacgccttcgtacctgagcctgcaccaccgcgagcggtgtcgcaacttctgcctgttcatgccggcgctggacctggcgggcgggacgctggacgagcgggcgtgggcgctgcagcgcgcggcgtacgacggggggccgggcggcggcgcgctggggacgccggagttcgtgttcctggcgcacgtggtggacatgatgtcgtcgatgcacgtgccgttcgcgctccggtcgctcagctccaccccgttcgccaaccacttcatcctgctcccgttctggcccgtcgccttcggcttcatgctgctcatgtggtgctgctccaagaccttcgtcgtcagcttctactacctccgcggccacctccaccagacctgtacttcctgccggcggcgaagaagggcatcaaccagcagatcgagctggccatcctgcgggccgacaggatgggcgtcaaggtgctcagcctcgccgcgctcaacaagaacgaggctctgaacggaggcggcaccctgttcgtgaacaagcacccggacctgcgcgtgagggtggtgcacggcaacacgctgacggcggccgtgatcctgaacgagatccccagcaacgtgagggaggtgttcctgaccggcgccacctccaagctcggcagggccatcgcgctctacctctgcaggaagaagatcagagtcctgatgttcacggtgtcgtcggagaggttcgtgaagatccagagggaggcgccgccggagtaccagcagtacctcgtgcaggtgaccaagtaccaggccgcacagaactgcaagacttggatcgtgggcaagtggctgtcgccgcgtgagcagcggtgggcgccgtccgggacgcacttccaccagttcgtggtgccgcccatcatcggcttccggcgggactgcacctacggcaagctggccgccatgaggctgcccaaggacgtgcagggcctcagctcctgcgagtacacgatggagcgcggggtggtgcacgcgtgccacgccggcggcgtggtgcacttcctggaaggctggggccaccacgaggtgggcgccatcgacgtcgaccggatcgacgtcgtctggaaggcggcgctcaagcacgggctggcgccggtgtgatcatatcgcatcgtcgagccgcaccgcgcgcgcggtttgttttgcagcggctacctacctagctgcatatgcttgccaggccggggtccagccgccgcggttctgtgtgcatgcatgcaacagcccagcagaccacgggctaccgtgcgtggctaattcttgtactagtactactcctgctgtatgtaccgtgccgatggggcgatgggttaattaaagtcctctcgactacgctacgacgatgcatggcttctttcgtgccaaatcgctggtttaaatcctcaccagaataagaaattaaacacagaggcttaagaaacaaattatttatatacaaaat

SEQ ID NO: 49645 - DNA, 439 bp, Zea Mays
aaaaaagctccaccaagcttgtcgagcatccaatgcttgggcgcattgagcctcttcaagtgcttcttcaatcccctagcctggattgcaaaataataatgatcaacaaaagcgcaacagattccagtatggcattcataggtgactcatccagattgcattagctgttaaaagtaacagcaactacacactacttgaaaacaaaagacccttttcatacatgtctatctctattacttatatatgagcagtgccatcgtcagcacctcctgtatgtatacctaggacgacatcagctggcgaggggcacggggacgcacgggcgtcttggacgggctcacccttattggcaaggatcccagtaccacaccgctacagtgagagcggcagtagcactttctgccttgaaaaaaaattgaggcccagtcttaaaacaact

SEQ ID NO: 49646 - DNA, 1327 bp, Zea Mays
acgtgatccacggtccgcccgccgcgcaagctgggccacgggctcgcgggcgggcatgcgccggttccgcgagcgaccaccccgccatccgcggagcctgccctgcgctgcccaccgctcctccgcctactccggcctcagctaataacgatgggtggtgggagccgagccctttccctctcctccctctgcgccaccaccctcgccgccgccaagcccccacagcaccccgtccccttcgccccggctcaccgcgcgctcccccaccgcctcgccgccgccatgtcctcctcttcctccccgacccccgccgcatcggtggacgccggtgccccggccccttcggcgtccaacgccatcgacttcctcacgctctgctaccgcctcaagacgaccaagagggcggggtgggtgaagcgcggggtgcaggcgcccgagtcggtggccgaccacatgtaccggatgggcgtcatggcgctcgtcgcggccgatctacccggcgtcaaccgcgacaggtgtgtcaagatggcgattgtgcacgacattgcagaagcaattgttggtgacatcaccccttctgataatgtacccaaggaagagaagaaccgcagggagaaagaagcattggaccatatgtgcgagctgcttggtggtggttcaagagcacaagaaattcgtgaactttggatggagtatgaggagaatgcgtctttggaagcgaaggttgtcaaagattttgacaaggttgagatgatacttcaagctctggagtatgaaaaggagcaaggacgggaccttgaagaattcttccaatcaacagcagacagacttgggaaaagcatgggcagcggagattgcatcgagaagaaaaacaaagtgatcaaacgatgctcattttaccacgtcggttccaagacaacttgctggcacagcatttctgttgaactttgcttttactagatgatacttcgaggtggcattgagacgtagggttgccttgggaatgtgaacttcaccacatttcttggtcctgccctgaccctgaggcatattgggcttgcgataccagggctctagataagtaagataacccactttgggtattggttgtagatgctcctgccaagggcagttagctggatccaacgggaaggttcagcaccagctggtggtgatgtaaaatccttcacttcatgaattactgtaccattaccgtttctcttgttaatccagcctcacggtttcggccttttttaatgtaattctattgttttcaagtataatgagcctgaatatttgctatatccattttggttgttgatgatga

SEQ ID NO: 49647 - DNA, 1323 bp, Zea Mays
acgtgatccacggtccgcccgccgcgcaagctgggccacgggctcgcgggcgggcatgcgccggttccgcgagcgaccaccccgccatccgcggagcctgccctgcgctgcccaccgctcctccgcctactccggcctcagctaataacgatgggtggtgggagccgagccctttccctctcctccctctgcgccaccaccctcgccgccgccaagcccccacagcaccccgtccccttcgccccggctcaccgcgcgctcccccaccgcctcgccgccgccatgtcctcctcttcctccccgacccccgccgcatcggtggacgccggtgccccggccccttcggcgtccaacgccatcgacttcctcacgctctgctaccgcctcaagacgaccaagagggcggggtgggtgaagcgcggggtgcaggcgcccgagtcggtggccgaccacatgtaccggatgggcgtcatggcgctcgtcgcggccgatctacccggcgtcaaccgcgacaggtgtgtcaagatggcgattgtgcacgacattgcagaagcaattgttggtgacatcaccccttctgataatgtacccaaggaagagaagaaccgcagggagaaagaagcattggaccatatgtgcgagctgcttggtggtggttcaagagcacaagaaattcgtgaactttggatggagtatgaggagaatgcgtctttggaagcgaaggttgtcaaagattttgacaaggttgagatgatacttcaagctctggagtatgaaaaggagcaaggacgggaccttgaagaattcttccaatcaacagcagacttgggaaaagcatgggcagcggagattgcatcgagaagaaaaacaaagtgatcaaacgatgctcattttaccacgtcggttccaagacaacttgctggcacagcatttctgttgaactttgcttttactagatgatacttcgaggtggcattgagacgtagggttgccttgggaatgtgaacttcaccacatttcttggtcctgccctgaccctgaggcatattgggcttgcgataccagggctctagataagtaagataacccactttgggtattggttgtagatgctcctgccaagggcagttagctggatccaacgggaaggttcagcaccagctggtggtgatgtaaaatccttcacttcatgaattactgtaccattaccgtttctcttgttaatccagcctcacggtttcggccttttttaatgtaattctattgttttcaagtataatgagcctgaatatttgctatatccattttggttgttgatgatga

SEQ ID NO: 49648 - DNA, 937 bp, Zea Mays
atggaccgcaagccgccggagcgcttcaggcgtaggtttatctcgtctatgatgcaccttttaactgtttccagttcctctgatggacacacccctgattgttttcagatagcatttactgttctgattagtacatgtaagaagtttggacgtgactggaagaagatcgaggagcatgtcggcaccaagacgacggtccagatacggagccacgcccagaaatacttcctcaaggtccagaagcttgggctggctgctgggctgccgccgatgaagcaagactggactgagatgaggcagcgctacgttcagagcaatatcggttttaatcatgcagtggatgtgttctcttttcggatagttttaaggaagatcttgactgttgaggaaccgtatgcaaatatgcattgtgatgctatcatagatcatgtttccttcaacactacaatgaactacgttgaggagaattgtgctccagcagtttatacaccagaattaagatacatgtgcattgctggaaggtacattcaaggtgctcctcttctggggaactccacagctgcttctgatgagatcctcgcagttgacactccttcagaaggaggcgatgctgttattgtcagtagcagtgacaattctacatctactgcatcagctgtctcgtggcgagcccggttcgttgggcaaggttacaagcaggtttgtgggcgagcagatgtgtggggtgacggcgttgttcctgagatggcagcgcatctggactacttatctattaatttcttgagaattaaagcaggaggtcttgaatatttgtccttaacagtttatattgtcagttttacaagagtagatatctcattacagatatctcattacactggttgttgttcttggatttgaaattttttgttggagttgttgtctggaaatgataaga

SEQ ID NO: 49649 - DNA, 1485 bp, Zea Mays
cagaggcaaagcgtgcgcgacagaggaaatccatgtgcccggctcggccctgccacggtcagtagccccacgcccgcgcacccctccagtcctcaccaagatttgccaccaataacccccgtcgtcgactcgtcctcttccctcgccgcgagctccgggttcccctgcgcatagctaggccaagccaggtataccccaaccatcgcatgggagccgcgactgccccgacgaagcggagacgcggccccagcaagacgcaggaggaggccatggcgcgcgcgagcccggaggcgcggcggcggccgcggccgcgcctggtgggctatgaggagctgccggagtacctcaaggacaacgagtacatccgcgggcactaccgcgccgagtggcccgtccgcgacgcgctcctcagcgccttcgcctggcacaacgagacgctcaacgtctggacgcatctgggagggttcctgttcttcctagcgctcgcggtcgccggaggacggaaggaggccgccgacggtgccgctccgggtatcatgagggccagccgaggcacgacgacgccggggcatcgctgcccagtgtgccgcggtggccgcggacggtgttcctggtgggggccatgtcgtgcctcgccatcagcgcggcggcgcacctgctggcgtgccactcgcggcgcgccagcgcggtgttctggcagctggactacgcgggcatctccgtgatgatcgtcgcctccttcgtgccgccggtgtactacgccttcctctgccacccgccggcgcgggcggcctacctgtgcgccatcgcggcgctgggcgcgctggtggtggccgcgctgctctccccgtcctgctcgtccccgcgctaccgccgcctccgcgcggcgctgttcctggccatgggcctgtcgggcgtcgtcccggcgctgcacgcgctctggctcaactggggccacgccgcctgctacctggcgctgggcatcgaggtcgtcatgggcctcacctacgccacgggcgcctggttctacgtcagccgcgtgccggagaagtggcgacccggggtgttcgacgtcgtcggccacagccaccagatcttccacgtcctcgtgctcgtcggcgccgtcacgcactacgtcgccgtcgccgtgctcatccactggcgggagaaggtggccgtcgcctgtggcgccgcgtcggcgtaggctcacctgtttggttggctcactcaacaaccattcgaatggcaaaccaagtagtcgcaacatagatcagctctagagtttgagtgtgaccttcgacgatttataatttaattgatggggtgattgagtatggtggttcattagttcatgagatttatctgtcgagtgagtgcgtgcctcagatttccagaccttttgtttccagcctactcaactttttgtcccgtcacgtgaatgtttggatgctatttagagtattgaatatagttggattgtaaaac

SEQ ID NO: 49650 - DNA, 1193 bp, Zea Mays
atggactccacggtgtttgaggttactgaattggatggagcaacaatgattgtcacacaaacaatgagttcgaagaaggttccgtaccacaagcatagggaggctgaggaggcgaggaagaagagggaggaagatgaagcagcacgtgtatatgcggaatttgttgagtccttcaaaggtgatagctcatctggggctaagtttatccgaggtggtgtgatcgaccccaatgcaaagctgaagactgactcggaaggtatgttccatccttcttgccaccatcatttgcaaaagagcctgagaaaaagaaggaaggggagaggccaaaggaaaaggaaaagggaaagccacgagtaatagatagattcttggaggaaatcaagcttgaacaagagcagcgagagaagcgccatcaagatcgagatcaccgccgtgaaggtcgccatggcgatagctccatgtcctcgagccggtttgatgaactaccagatgaatttgatccgactgggagatttccaggatcatttgatgatggtgatcctcaaaccaccaacttatatgttggcaatctatctcccaaggtcgatgagaattttcttttgaggacatttggtcggtttggacctattgctagtgtcaagattatgtggcctagaacagaagaggaacgcagaaggcaaagaaattgtggttttgttgccttcatgaatagaacagatggacaagcagcaaaggatgaaatgcaaggtgttattgtgtatgactatgaactcaagattgggtggggtaaatctgttgctcttccgtcacaggctttgcctgctcctcctccaggacacatggcaatcagaaataaggagggtggtacagctacagtcatactttctggtcctggtggccctgctgttgcatctattaaaccacaaacctcagagctggtccttacaccaaatgttcctgatattgtggttgctccacctgatgatgggcatcttcggcatgtgattgacacaatggctctgcacgtacttgatggtggatgtgcttttgaacaagctgtaatggagagagggcgaggaaatcctttatttgatttcttgttcaatcttaaatctaaagagcacacatattatgtttggaggctatactcatttgcccaggtacttgttgctgtctatagtacaaaattttaa

SEQ ID NO: 49651 - DNA, 1331 bp, Zea Mays
gtttgaaacccacccaattactcggttgctcccgttgtcctctccgcggggcgcggcctggcttttcccttctcggcttctgccgttcgcgtgcggccgtgcggcctctctctttctttcccagcgccaccgccgacctagccaggtgaccaggtcttcgtcaggcccatagccagcgacgaacacctaagtacccaacagatgagttcgaagaaggttccgtaccacaagcatagggaggctgaggaggcgaggaagaagagggaggaagatgaagcagcacgtgtatatgcggaatttgttgagtccttcaaaggtgatagctcatctggggctaagtttatccgaggtggtgtgatcgaccccaatgcaaagctgaagactgactcggaaggtatgttccatccttcttgccaccatcatttgcaaaagagcctgagaaaaagaaggaaggggagaggccaaaggaaaaggaaaagggaaagccacgagtaatagatagattcttggaggaaatcaagcttgaacaagagcagcgagagaagcgccatcaagatcgagatcaccgccgtgaaggtcgccatggcgatagctccatgtcctcgagccggtttgatgaactaccagatgaatttgatccgactgggagatttccaggatcatttgatgatggtgatcctcaaaccaccaacttatatgttggcaatctatctcccaaggtcgatgagaattttcttttgaggacatttggtcggtttggacctattgctagtgtcaagattatgtggcctagaacagaagaggaacgcagaaggcaaagaaattgtggttttgttgccttcatgaatagaacagatggacaagcagcaaaggatgaaatgcaaggtgttattgtgtatgactatgaactcaagattgggtggggtaaatctgttgctcttccgtcacaggctttgcctgctcctcctccaggacacatggcaatcagaaataaggagggtggtacagctacagtcatactttctggtcctggtggccctgctgttgcatctattaaaccacaaacctcagagctggtccttacaccaaatgttcctgatattgtggttgctccacctgatgatgggcatcttcggcatgtgattgacacaatggctctgcacgtacttgatggtggatgtgcttttgaacaagctgtaatggagagagggcgaggaaatcctttatttgatttcttgttcaatcttaaatctaaagagcacacatattatgtttggaggctatactcatttgcccaggtacttgttgctgtctatagtacaaaattttaa

SEQ ID NO: 49652 - DNA, 1349 bp, Zea Mays
ctcccgttgtcctctccgcggggcgcggcctggcttttcccttctcggcttctgccgttcgcgtgcggccgtgcggcctctctctttctttcccagcgccaccgccgacctagccaggtgaccaggtcttcgtcaggcccatagccagcgacgaacacctaagtacccaacagatgagttcgaagaaggttccgtaccacaagcatagggaggctgaggaggcgaggaagaagagggaggaagatgaagcagcacgtgtatatgcggaatttgttgagtccttcaaaggtgatagctcatctggggctaagtttatccgaggtggtgtgatcgaccccaatgcaaagctgaagactgactcggaaggtggaaaatccaaagatggggggtctgttccaaagaagggcagtaggtatgttccatccttcttgccaccatcatttgcaaaagagcctgagaaaaagaaggaaggggagaggccaaaggaaaaggaaaagggaaagccacgagtaatagatagattcttggaggaaatcaagcttgaacaagagcagcgagagaagcgccatcaagatcgagatcaccgccgtgaaggtcgccatggcgatagctccatgtcctcgagccggtttgatgaactaccagatgaatttgatccgactgggagatttccaggatcatttgatgatggtgatcctcaaaccaccaacttatatgttggcaatctatctcccaaggtcgatgagaattttcttttgaggacatttggtcggtttggacctattgctagtgtcaagattatgtggcctagaacagaagaggaacgcagaaggcaaagaaattgtggttttgttgccttcatgaatagaacagatggacaagcagcaaaggatgaaatgcaaggtgttattgtgtatgactatgaactcaagattgggtggggtaaatctgttgctcttccgtcacaggctttgcctgctcctcctccaggacacatggcaatcagaaataaggagggtggtacagctacagtcatactttctggtcctggtggccctgctgttgcatctattaaaccacaaacctcagagctggtccttacaccaaatgttcctgatattgtggttgctccacctgatgatgggcatcttcggcatgtgattgacacaatggctctgcacgtacttgatggtggatgtgcttttgaacaagctgtaatggagagagggcgaggaaatcctttatttgatttcttgttcaatcttaaatctaaagagcacacatattatgtttggaggctatactcatttgcccaggtacttgttgctgtctatagtacaaaattttaa

SEQ ID NO: 49653 - DNA, 1272 bp, Zea Mays
cctggcttttcccttctcggcttctgccgttcgcgtgcggccgtgcggcctctctctttctttcccagcgccaccgccgacctagccaggtgaccaggtcttcgtcaggcccatagccagcgacgaacacctaagtacccaacagatgagttcgaagaaggttccgtaccacaagcatagggaggctgaggaggcgaggaagaagagggaggaagatgaagcagcacgtgtatatgcggaatttgttgagtccttcaaaggtgatagctcatctggggctaagtttatccgaggtggtgtgatcgaccccaatgcaaagctgaagactgactcggaaggtatgttccatccttcttgccaccatcatttgcaaaagagcctgagaaaaaggaaggggagaggccaaaggaaaaggaaaagggaaagccacgagtaatagatagattcttggaggaaatcaagcttgaacaagagcagcgagagaagcgccatcaagatcgagatcaccgccgtgaaggtcgccatggcgatagctccatgtcctcgagccggtttgatgaactaccagatgaatttgatccgactgggagatttccaggatcatttgatgatggtgatcctcaaaccaccaacttatatgttggcaatctatctcccaaggtcgatgagaattttcttttgaggacatttggtcggtttggacctattgctagtgtcaagattatgtggcctagaacagaagaggaacgcagaaggcaaagaaattgtggttttgttgccttcatgaatagaacagatggacaagcagcaaaggatgaaatgcaaggtgttattgtgtatgactatgaactcaagattgggtggggtaaatctgttgctcttccgtcacaggctttgcctgctcctcctccaggacacatggcaatcagaaataaggagggtggtacagctacagtcatactttctggtcctggtggccctgctgttgcatctattaaaccacaaacctcagagctggtccttacaccaaatgttcctgatattgtggttgctccacctgatgatgggcatcttcggcatgtgattgacacaatggctctgcacgtacttgatggtggatgtgcttttgaacaagctgtaatggagagagggcgaggaaatcctttatttgatttcttgttcaatcttaaatctaaagagcacacatattatgtttggaggctatactcatttgcccaggtacttgttgctgtctatagtacaaaattttaa

SEQ ID NO: 49654 - DNA, 1489 bp, Zea Mays
tcgcagtatcactggaaggattactgctgaagccctgaaggagagggttatgaaagttctacaagtttgggcagactggttcctgttttctgatgcatttcttaatgggctgagggctacttttcttagatcaggcaactctggtgttgttccgtttcactcgttatgcggtgatgcacccgaaattgaaaagaaaggtagctctgaggatggaaatgatggatttaagcttaatgaagacggtgccttggctactggaaaggcagcagcgacaaaggagctattagggctcccactagctgaacttgaacgccgctgtagacataatggcctctctctgtgtggtggtaaagaaatgatggtcgccaggctgcttaacttggaagaggctgagaaggaacgaatatacgagaaagatgttgacatgaaatatgtgcagggtgaacagcatgtggttggaagagaggacagtggtgtgaatgctcatagtacttcaaggtttggtgaaggttctaatggtgatgaattagatgtctctcggaacagtacgagagctggtaaaggacgttctggtggatctgcttctgccgaacttgaatcatttccaagcaagaagccgaaatacgatcctgttttgccagcttctaaatggagtcgagaggatgacatcagtgacgatgaagataggaaaggtggccgaggcttgggattaagctattcatccggaagcgatattgctgatggtctcggaaaggtcgatacaacagaagctagtactgaccacacaagtcgtcatcatgatacgattgttgatgaagagcacaggcagaagttgaggcagattgaaatttctgtcatgcagtaccgtgaatctcttgaggaacagggtctgcgtgacttggatgagattgagaggaaggttgccagccatcgaagacgtctccagtcagaatatggtttatccactccagctgatggtgctaacagcaggcgatcttctgaaagaacatcatcgtcgtcggagcggaaagagaggcatcgcgatgcacatgatcatcctaggaaacggggccggagccagagtagaagcttgagccctccaaggaagtcacaggagagggatcgagagcacaatcgcggtagggaccggtctcatggcaacgacgtggggagggatagggtacgcgggaaaagtgcaagccaagggcgagacgaccaccacgacagaagccgagatagagagaaggacaggagaaaagggaggtgaccgacccgaaaaccctcgtcaccatgcaccatttgccctaagcgaagggcccaggagcattatttgagctgggctacacgcccaccagcatctccaacgatgtacccgatgtgtagtttatgctcaaaaccaatgtcgaatacagccagacccagaattgtcagtatcagacaaccgaggtatggactgcgattctgttcttccctggtggtgggctggtac

SEQ ID NO: 49655 - DNA, 1453 bp, Zea Mays
tctacaagtttgggcagactggttcctgttttctgatgcatttcttaatgggctgagggctacttttcttagatcaggcaactctggtgttgttccgtttcactcgttatgcggtgatgcacccgaaattgaaaagaaaggtagctctgaggatggaaatgatggatttaagcttaatgaagacggtgccttggctactggaaaggcagcagcgacaaaggagctattagggctcccactagctgaacttgaacgccgctgtagacataatggcctctctctgtgtggtggtaaagaaatgatggtcgccaggctgcttaacttggaagaggctgagaaggaacgaatatacgagaaagatgttgacatgaaatatgtgcagggtgaacagcatgtggttggaagagaggacagtggtgtgaatgctcatagtacttcaaggtttggtgaaggttctaatggtgatgaattagatgtctctcggaacagtacgagagctggtaaaggacgttctggtggatctgcttctgccgaacttgaatcatttccaagcaagaagccgaaatacgatcctgttttgccagcttctaaatggagtcgagaggatgacatcagtgacgatgaagataggaaaggtggccgaggcttgggattaagctattcatccggaagcgatattgctgatggtctcggaaaggtcgatacaacagaagctagtactgaccacacaagtcgtcatcatgatacgattgttgatgaagagcacaggcagaagttgaggcagattgaaatttctgtcatgcagtaccgtgaatctcttgaggaacagggtctgcgtgacttggatgagattgagaggaaggttgccagccatcgaagacgtctccagtcagaatatggtttatccactccagctgatggtgctaacagcaggcgatcttctgaaagaacatcatcgtcgtcggagcggaaagagaggcatcgcgatgcacatgatcatcctaggaaacggggccggagccagagtagaagcttgagccctccaaggaagtcacaggagagggatcgagagcacaatcgcggtagggaccggtctcatggcaacgacgtggggagggatagggtacgcgggaaaagtgcaagccaagggcgagacgaccaccacgacagaagccgagatagagagaaggacaggagaaaagggaggtgaccgacccgaaaaccctcgtcaccatgcaccatttgccctaagcgaagggcccaggagcattatttgagctgggctacacgcccaccagcatctccaacggtaaacatatcttcgcaccagatgtacccgatgtgtagtttatgctcaaaaccaatgtcgaatacagccagacccagaattgtcagtatcagacaaccgaggtatggactgcgattctgttcttccctggtggtgggctggtac

SEQ ID NO: 49656 - DNA, 886 bp, Zea Mays
ctgggctcatatatttatgcaatagggaaatcacatggttgcttatatttcctgttttctgtgatgagactgttgatgtgaagatatatcaattcaagcacacatagctttaaccttcataatttcttcaccagttataacagttttcatttttgagataccacatgtcttttaaacaacataacttccttttacccaattattggtttacacaactaatttttgcatttgcttctattactaaacttaaatttcacactcagccttgtgttaactaccttgaggtattatggtttatttctcgcattaggtattcttctgagtactggaataaggtcactttttcattaggaacttcctaagaggcttcttcttacatacaaacctgaagaatcggaggacattcctgagcctgcttctgttgaagaggaaaatgcaccagttgaagagcctgttctggtaccacctgttactgaagttgtttcacctcccaagaccgaggtggccgatactggtgacttactgggcttaaatgatccaaatcctgctgtatcagctatggaggaaagcaatgctcttgccttggctattgttccaacatatggggcttccacaactggtaacactgcatttcaagataaggggtttgatcctacatgatgggaactcgcccttgttaccgcaccgagcaacacgacttcatctgcgtctgtcggtcaattgtttgtgaacatgataacacgttagcccagagtttggatccgaacaacgaagggagaggagtattgcagttcaaaaccggttacatgcaagatatccttttctcaacttctacagtattggagaataaacttttgaattttcatactttgttggtaaaggccat

SEQ ID NO: 49657 - DNA, 3630 bp, Zea Mays
aaacgggccctttgtccggctagtttgaaacccaattgctcggttgctcccgttgtcctctccgcggggtgcggcctggcttttcccttctcggcttctgccgttcgcgtgcggccgtgcgtcctctctttctttctcggcgcctctgtttctggcggccgcgactggcccagcgccaccgccgacctagccaggtgaccaggtcttcgtcaggaccatagccagcgaagaacacccaagtacccaacagatgagttcgaagaaggttccgtaccacaagcatagggaggctgaggaggcgaggaagaagagggaggaagatgaagcagcacgtgtatatgcggaatttgttgagtccttcaaaggtgatagttcatctggggctaagtttatccgaggtggtgtgattgaccccaatgcaaagctgaagactgactcggaaggtatgttccatccttcttgccaccatcatttgcaaaagagcctgagaaaaagaaggaaggggagaggccaaaggaaaaggaaaaggaaaagggaaagccacgagtaatagatagattcttggaggaaatcaagcttgaacaagagcagcgagagaagcgccatcaggatcgagatcaccgccgtgaaggtcgccatggcgatagctccatgtcctcgagccggtttgatgaactaccagatgaatttgatccgactgggagatttccaggatcatttgatgatggtgatcctcaaaccaccaacttatatgttggcaatctatctcccaaggtcgatgagaattttcttttgaggacatttggtcggtttggacctattgctagtgtcaagattatgtggcctagaacagaagaggaacgcagaaggcaaagaaattgtggttttgttgccttcatgaatagaacagatggacaagcagcaaaggatgaaatgcaaggtgttattgtgtatgactatgaactgaagattgggtggggtaaatctgttgctcttccgtcacaggctttgcctgctcctcctccaggacacatggcaatcagaaataaggagggtggtacagctacagtcatactttctggtcctggcggccctgctgttgcatctattaaaccacaaacctcagagctggtccttacaccaaatgttcctgatattgtggttgctccacctgatgatgggcatcttcggcatgtgattgacacaatggctctgcacgtacttgatggtggatgtgcttttgaacaagctgtaatggagagagggcgaggaaatcctttatttgatttcttgttcaatcttaaatctaaagagcacacatattatgtttggaggctatactcatttgcccagggtgatactctacaacgatggagaacagaaccctacatcatgatcacaggaagtggaagatgggtcccacctcccttgtcgtccaacagaagccctgaacgtgaaaaggaatctacatttgctgctggtagaagcaggcgtgttgaagtggagcgtacattgactgactcacagcgtgatgaatttgaggacatgctgcgagctttgacattagagaggagccaaataaaagacgccatgggatttgccttggataatgctgatgcagctggcgagattgttgaggttcttacagaatccttgacactcaaggagacgtctattccaacaaaggttgctcggcttatgctagtgtctgacatccttcataacagtagcgctcctgtgaagaacgcatctgcattccgaacgaagtttgaagcttctttgccagatgttatggagagctttaatgacttgtatcgcagtatcactggaaggattactgctgaagctctgaaggagagggttatgaaagttctacaagtttgggcagactggttcctgttttctgatgcatttcttaatgggctgagggctacttttcttagatcaggcaactctggtgttgttccgtttcactcgttatgtggtgatgcacccgaaattgaaaagaaaggtagctctgaggacggaaatgatggatttaagcttaatgaagacggtgccttggctactggaaaggcagcagcgacaaaggagctattagggctcccgctagctgaacttgagcgccgctgtagacataatggcctctctctgtgcggtggtaaagaaatgatggtcgccaggctgcttaacttggaagaggctgagaaggaacgaatttacgagaaggatgttgacgtgaaatatgtgcagggtgaacagcatgtggttggaagagaggacagtggtgtgaatgctcatagtacttcaaggtttggtgaaggttctaatggtgatgaattagatgtctctcggaacagtatgagagctggtaaaggacgttctggaggatctgcttctgccgaacttgaatcatttccaagcaagaagccgaaatacgatcctgttttgccagcttctaaatggagtcgagaggatgacatcagtgacgatgaagataggaaaggtggccgaggcttgggattaagctattcgtccggaagcgatattgctgatggtctcggaaaggtcgatacaacagaagctagtactgaccacacaagtcatcatcatgatacgattgttgatgaagagcacaggcagaagttgaggcagattgaaatttctgtcatgcagtaccgtgaatctcttgaggagcagggtctgcgtgacttggatgagattgagaggaaggttgccagccatcgaagacgtctccagtcagaatatggtttatccactccaactgatggtgctaacagcaggcgatcttctgaaagaacatcatcgtcgtcggagcggaaagagaggcatggcgatgcacatgatcatcctaggaaacgtcgccggagccagagtagaagctgcagtcctccaaggaagtctcaggagagggatcgagagcacaatcgcagtagggaccgagatagggtacgcgagaaaagtgcaagccgagggcgagacgaccaccacgacagaagccgagatagagaggacaggagaaaggggaggtgaccgacccgaaaaacctcgtcactatgcaccatttgccctaaccgaagggcccaggagcatcatttgagctgggctacacgcccaccagcatctccatcggtaaacatatattccgcaccaggcaggttaccctggtctgctccatgcttcgtctgcaataggagtttttgaggattaagttgaggttttgtaaagaagacttgttcgttactttttttgtggattattaagatatatcctatgtgtagtttatgcttaaaatttaaaaccaatgttgaatacagccagacccagaattgtcagtatcagacaaccgaggtatggactgcgattctgttcttccctggtggtgggctgttacgtgtagatctttgcacggcgtgagaataccgtcggttgtgcgtgggcgcatgcgtcgacgacaatgcatgctgcttaacgtgctcacgtggacgagaatgtgttgcatcatgctctagcatgcgaacatgtgcggtactgacatggtgcgtagctaagctattgtacacttgctttttcatgatgcctcgtgttaacgttgtcagagatctgaaa

SEQ ID NO: 49658 - DNA, 3665 bp, Zea Mays
cctttgtccggctagtttgaaacccaattgctcggttgctcccgttgtcctctccgcggggtgcggcctggcttttcccttctcggcttctgccgttcgcgtgcggccgtgcgtcctctctttctttctcggcgcctctgtttctggcggccgcgactggcccagcgccaccgccgacctagccaggtgaccaggtcttcgtcaggaccatagccagcgaagaacacccaagtacccaacagatgagttcgaagaaggttccgtaccacaagcatagggaggctgaggaggcgaggaagaagagggaggaagatgaagcagcacgtgtatatgcggaatttgttgagtccttcaaaggtgatagttcatctggggctaagtttatccgaggtggtgtgattgaccccaatgcaaagctgaagactgactcggaaggtggaaaatccaaagatggggggtctgttccaaagaagggcagtaggtatgttccatccttcttgccaccatcatttgcaaaagagcctgagaaaaaggaaggggagaggccaaaggaaaaggaaaaggaaaagggaaagccacgagtaatagatagattcttggaggaaatcaagcttgaacaagagcagcgagagaagcgccatcaggatcgagatcaccgccgtgaaggtcgccatggcgatagctccatgtcctcgagccggtttgatgaactaccagatgaatttgatccgactgggagatttccaggatcatttgatgatggtgatcctcaaaccaccaacttatatgttggcaatctatctcccaaggtcgatgagaattttcttttgaggacatttggtcggtttggacctattgctagtgtcaagattatgtggcctagaacagaagaggaacgcagaaggcaaagaaattgtggttttgttgccttcatgaatagaacagatggacaagcagcaaaggatgaaatgcaaggtgttattgtgtatgactatgaactgaagattgggtggggtaaatctgttgctcttccgtcacaggctttgcctgctcctcctccaggacacatggcaatcagaaataaggagggtggtacagctacagtcatactttctggtcctggcggccctgctgttgcatctattaaaccacaaacctcagagctggtccttacaccaaatgttcctgatattgtggttgctccacctgatgatgggcatcttcggcatgtgattgacacaatggctctgcacgtacttgatggtggatgtgcttttgaacaagctgtaatggagagagggcgaggaaatcctttatttgatttcttgttcaatcttaaatctaaagagcacacatattatgtttggaggctatactcatttgcccagggtgatactctacaacgatggagaacagaaccctacatcatgatcacaggaagtggaagatgggtcccacctcccttgtcgtccaacagaagccctgaacgtgaaaaggaatctacatttgctgctggtagaagcaggcgtgttgaagtggagcgtacattgactgactcacagcgtgatgaatttgaggacatgctgcgagctttgacattagagaggagccaaataaaagacgccatgggatttgccttggataatgctgatgcagctggcgagattgttgaggttcttacagaatccttgacactcaaggagacgtctattccaacaaaggttgctcggcttatgctagtgtctgacatccttcataacagtagcgctcctgtgaagaacgcatctgcattccgaacgaagtttgaagcttctttgccagatgttatggagagctttaatgacttgtatcgcagtatcactggaaggattactgctgaagctctgaaggagagggttatgaaagttctacaagtttgggcagactggttcctgttttctgatgcatttcttaatgggctgagggctacttttcttagatcaggcaactctggtgttgttccgtttcactcgttatgtggtgatgcacccgaaattgaaaagaaaggtagctctgaggacggaaatgatggatttaagcttaatgaagacggtgccttggctactggaaaggcagcagcgacaaaggagctattagggctcccgctagctgaacttgagcgccgctgtagacataatggcctctctctgtgcggtggtaaagaaatgatggtcgccaggctgcttaacttggaagaggctgagaaggaacgaatttacgagaaggatgttgacgtgaaatatgtgcagggtgaacagcatgtggttggaagagaggacagtggtgtgaatgctcatagtacttcaaggtttggtgaaggttctaatggtgatgaattagatgtctctcggaacagtatgagagctggtaaaggacgttctggaggatctgcttctgccgaacttgaatcatttccaagcaagaagccgaaatacgatcctgttttgccagcttctaaatggagtcgagaggatgacatcagtgacgatgaagataggaaaggtggccgaggcttgggattaagctattcgtccggaagcgatattgctgatggtctcggaaaggtcgatacaacagaagctagtactgaccacacaagtcatcatcatgatacgattgttgatgaagagcacaggcagaagttgaggcagattgaaatttctgtcatgcagtaccgtgaatctcttgaggagcagggtctgcgtgacttggatgagattgagaggaaggttgccagccatcgaagacgtctccagtcagaatatggtttatccactccaactgatggtgctaacagcaggcgatcttctgaaagaacatcatcgtcgtcggagcggaaagagaggcatggcgatgcacatgatcatcctaggaaacgtcgccggagccagagtagaagctgcagtcctccaaggaagtctcaggagagggatcgagagcacaatcgcagtagggaccgagatagggtacgcgagaaaagtgcaagccgagggcgagacgaccaccacgacagaagccgagatagagaggacaggagaaaggggaggtgaccgacccgaaaaacctcgtcactatgcaccatttgccctaaccgaagggcccaggagcatcatttgagctgggctacacgcccaccagcatctccatcggtaaacatatattccgcaccaggcaggttaccctggtctgctccatgcttcgtctgcaataggagtttttgaggattaagttgaggttttgtaaagaagacttgttcgttactttttttgtggattattaagatatatcctatgtgtagtttatgcttaaaatttaaaaccaatgttgaatacagccagacccagaattgtcagtatcagacaaccgaggtatggactgcgattctgttcttccctggtggtgggctgttacgtgtagatctttgcacggcgtgagaataccgtcggttgtgcgtgggcgcatgcgtcgacgacaatgcatgctgcttaacgtgctcacgtggacgagaatgtgttgcatcatgctctagcatgcgaacatgtgcggtactgacatggtgcgtagctaagctattgtacacttgctttttcatgatgcctcgtgttaacgttgtcagagatctgaaa

SEQ ID NO: 49659 - DNA, 2778 bp, Zea Mays
tgaaacccaattgctcggttgctcccgttgtcctctccgcggggtgcggcctggcttttcccttctcggcttctgccgttcgcgtgcggccgtgcgtcctctctttctttctcggcgcctctgtttctggcggccgcgactggcccagcgccaccgccgacctagccaggtgaccaggtcttcgtcaggaccatagccagcgaagaacacccaagtacccaacagatgagttcgaagaaggttccgtaccacaagcatagggaggctgaggaggcgaggaagaagagggaggaagatgaagcagcacgtgtatatgcggaatttgttgagtccttcaaaggtgatagttcatctggggctaagtttatccgaggtggtgtgattgaccccaatgcaaagctgaagactgactcggaaggtatgttccatccttcttgccaccatcatttgcaaaagagcctgagaaaaagaaggaaggggagaggccaaaggaaaaggaaaaggaaaagggaaagccacgagtaatagatagattcttggaggaaatcaagcttgaacaagagcagcgagagaagcgccatcaggatcgagatcaccgccgtgaaggtcgccatggcgatagctccatgtcctcgagccggtttgatgaactaccagatgaatttgatccgactgggagatttccaggatcatttgatgatggtgatcctcaaaccaccaacttatatgttggcaatctatctcccaagtgtcaagattatgtggcctagaacagaagaggaacgcagaaggcaaagaaattgtggttttgttgccttcatgaatagaacagatggacaagcagcaaaggatgaaatgcaaggtgttattgtgtatgactatgaactgaagattgggtggggtaaatctgttgctcttccgtcacaggctttgcctgctcctcctccaggacacatggcaatcagaaataaggagggtggtacagctacagtcatactttctggtcctggcggccctgctgttgcatctattaaaccacaaacctcagagctggtccttacaccaaatgttcctgatattgtggttgctccacctgatgatgggcatcttcggcatgtgattgacacaatggctctgcacgtacttgatggtggatgtgcttttgaacaagctgtaatggagagagggcgaggaaatcctttatttgatttcttgttcaatcttaaatctaaagagcacacatattatgtttggaggctatactcatttgcccagggtgatactctacaacgatggagaacagaaccctacatcatgatcacaggaagtggaagatgggtcccacctcccttgtcgtccaacagaagccctgaacgtgaaaaggaatctacatttgctgctggtagaagcaggcgtgttgaagtggagcgtacattgactgactcacagcgtgatgaatttgaggacatgctgcgagctttgacattagagaggagccaaataaaagacgccatgggatttgccttggataatgctgatgcagctggcgagattgttgaggttcttacagaatccttgacactcaaggagacgtctattccaacaaaggttgctcggcttatgctagtgtctgacatccttcataacagtagcgctcctgtgaagaacgcatctgcattccgaacgaagtttgaagcttctttgccagatgttatggagagctttaatgacttgtatcgcagtatcactggaaggattactgctgaagctctgaaggagagggttatgaaagttctacaagtttgggcagactggttcctgttttctgatgcatttcttaatgggctgagggctacttttcttagatcaggcaactctggtgttgttccgtttcactcgttatgtggtgatgcacccgaaattgaaaagaaaggtagctctgaggacggaaatgatggatttaagcttaatgaagacggtgccttggctactggaaaggcagcagcgacaaaggagctattagggctcccgctagctgaacttgagcgccgctgtagacataatggcctctctctgtgcggtggtaaagaaatgatggtcgccaggctgcttaacttggaagaggctgagaaggaacgaatttacgagaaggatgttgacgtgaaatatgtgcagggtgaacagcatgtggttggaagagaggacagtggtgtgaatgctcatagtacttcaaggtttggtgaaggttctaatggtgatgaattagatgtctctcggaacagtatgagagctggtaaaggacgttctggaggatctgcttctgccgaacttgaatcatttccaagcaagaagccgaaatacgatcctgttttgccagcttctaaatggagtcgagaggatgacatcagtgacgatgaagataggaaaggtggccgaggcttgggattaagctattcgtccggaagcgatattgctgatggtctcggaaaggtcgatacaacagaagctagtactgaccacacaagtcatcatcatgatacgattgttgatgaagagcacaggtgcttgtccgttttcaatatttttttaccattgccatgctagtttttgtaagtgtctgccacagtgttattaaaactacgtttaaacgatgtttaaactacgtttaaacgtcaaaactctaattagagattgaaaccgcgttttagcgttttggcgttctaaactgtaaaacgtagtgctttatccattttagaccataagctacttttgggctca

SEQ ID NO: 49660 - DNA, 3545 bp, Zea Mays
tgaaacccaattgctcggttgctcccgttgtcctctccgcggggtgcggcctggcttttcccttctcggcttctgccgttcgcgtgcggccgtgcgtcctctctttctttctcggcgcctctgtttctggcggccgcgactggcccagcgccaccgccgacctagccaggtgaccaggtcttcgtcaggaccatagccagcgaagaacacccaagtacccaacagatgagttcgaagaaggttccgtaccacaagcatagggaggctgaggaggcgaggaagaagagggaggaagatgaagcagcacgtgtatatgcggaatttgttgagtccttcaaaggtgatagttcatctggggctaagtttatccgaggtggtgtgattgaccccaatgcaaagctgaagactgactcggaaggtatgttccatccttcttgccaccatcatttgcaaaagagcctgagaaaaagaaggaaggggagaggccaaaggaaaaggaaaaggaaaagggaaagccacgagtaatagatagattcttggaggaaatcaagcttgaacaagagcagcgagagaagcgccatcaggatcgagatcaccgccgtgaaggtcgccatggcgatagctccatgtcctcgagccggtttgatgaactaccagatgaatttgatccgactgggagatttccaggatcatttgatgatggtgatcctcaaaccaccaacttatatgttggcaatctatctcccaagattatgtggcctagaacagaagaggaacgcagaaggcaaagaaattgtggttttgttgccttcatgaatagaacagatggacaagcagcaaaggatgaaatgcaaggtgttattgtgtatgactatgaactgaagattgggtggggtaaatctgttgctcttccgtcacaggctttgcctgctcctcctccaggacacatggcaatcagaaataaggagggtggtacagctacagtcatactttctggtcctggcggccctgctgttgcatctattaaaccacaaacctcagagctggtccttacaccaaatgttcctgatattgtggttgctccacctgatgatgggcatcttcggcatgtgattgacacaatggctctgcacgtacttgatggtggatgtgcttttgaacaagctgtaatggagagagggcgaggaaatcctttatttgatttcttgttcaatcttaaatctaaagagcacacatattatgtttggaggctatactcatttgcccagggtgatactctacaacgatggagaacagaaccctacatcatgatcacaggaagtggaagatgggtcccacctcccttgtcgtccaacagaagccctgaacgtgaaaaggaatctacatttgctgctggtagaagcaggcgtgttgaagtggagcgtacattgactgactcacagcgtgatgaatttgaggacatgctgcgagctttgacattagagaggagccaaataaaagacgccatgggatttgccttggataatgctgatgcagctggcgagattgttgaggttcttacagaatccttgacactcaaggagacgtctattccaacaaaggttgctcggcttatgctagtgtctgacatccttcataacagtagcgctcctgtgaagaacgcatctgcattccgaacgaagtttgaagcttctttgccagatgttatggagagctttaatgacttgtatcgcagtatcactggaaggattactgctgaagctctgaaggagagggttatgaaagttctacaagtttgggcagactggttcctgttttctgatgcatttcttaatgggctgagggctacttttcttagatcaggcaactctggtgttgttccgtttcactcgttatgtggtgatgcacccgaaattgaaaagaaaggtagctctgaggacggaaatgatggatttaagcttaatgaagacggtgccttggctactggaaaggcagcagcgacaaaggagctattagggctcccgctagctgaacttgagcgccgctgtagacataatggcctctctctgtgcggtggtaaagaaatgatggtcgccaggctgcttaacttggaagaggctgagaaggaacgaatttacgagaaggatgttgacgtgaaatatgtgcagggtgaacagcatgtggttggaagagaggacagtggtgtgaatgctcatagtacttcaaggtttggtgaaggttctaatggtgatgaattagatgtctctcggaacagtatgagagctggtaaaggacgttctggaggatctgcttctgccgaacttgaatcatttccaagcaagaagccgaaatacgatcctgttttgccagcttctaaatggagtcgagaggatgacatcagtgacgatgaagataggaaaggtggccgaggcttgggattaagctattcgtccggaagcgatattgctgatggtctcggaaaggtcgatacaacagaagctagtactgaccacacaagtcatcatcatgatacgattgttgatgaagagcacaggcagaagttgaggcagattgaaatttctgtcatgcagtaccgtgaatctcttgaggagcagggtctgcgtgacttggatgagattgagaggaaggttgccagccatcgaagacgtctccagtcagaatatggtttatccactccaactgatggtgctaacagcaggcgatcttctgaaagaacatcatcgtcgtcggagcggaaagagaggcatggcgatgcacatgatcatcctaggaaacgtcgccggagccagagtagaagctgcagtcctccaaggaagtctcaggagagggatcgagagcacaatcgcagtagggaccgagatagggtacgcgagaaaagtgcaagccgagggcgagacgaccaccacgacagaagccgagatagagaggacaggagaaaggggaggtgaccgacccgaaaaacctcgtcactatgcaccatttgccctaaccgaagggcccaggagcatcatttgagctgggctacacgcccaccagcatctccatcggtaaacatatattccgcaccaggcaggttaccctggtctgctccatgcttcgtctgcaataggagtttttgaggattaagttgaggttttgtaaagaagacttgttcgttactttttttgtggattattaagatatatcctatgtgtagtttatgcttaaaatttaaaaccaatgttgaatacagccagacccagaattgtcagtatcagacaaccgaggtatggactgcgattctgttcttccctggtggtgggctgttacgtgtagatctttgcacggcgtgagaataccgtcggttgtgcgtgggcgcatgcgtcgacgacaatgcatgctgcttaacgtgctcacgtggacgagaatgtgttgcatcatgctctagcatgcgaacatgtgcggtactgacatggtgcgtagctaagctattgtacacttgctttttcatgatgcctcgtgttaacgttgtcagagatctgaaa

SEQ ID NO: 49661 - DNA, 3653 bp, Zea Mays
cccaattgctcggttgctcccgttgtcctctccgcggggtgcggcctggcttttcccttctcggcttctgccgttcgcgtgcggccgtgcgtcctctctttctttctcggcgcctctgtttctggcggccgcgactggcccagcgccaccgccgacctagccaggtgaccaggtcttcgtcaggaccatagccagcgaagaacacccaagtacccaacagatgagttcgaagaaggttccgtaccacaagcatagggaggctgaggaggcgaggaagaaggtcagggagggaggaagatgaagcagcacgtgtatatgcggaatttgttgagtccttcaaaggtgatagttcatctggggctaagtttatccgaggtggtgtgattgaccccaatgcaaagctgaagactgactcggaaggtggaaaatccaaagatggggggtctgttccaaagaagggcagtaggtatgttccatccttcttgccaccatcatttgcaaaagagcctgagaaaaagaaggaaggggagaggccaaaggaaaaggaaaaggaaaagggaaagccacgagtaatagatagattcttggaggaaatcaagcttgaacaagagcagcgagagaagcgccatcaggatcgagatcaccgccgtgaaggtcgccatggcgatagctccatgtcctcgagccggtttgatgaactaccagatgaatttgatccgactgggagatttccaggatcatttgatgatggtgatcctcaaaccaccaacttatatgttggcaatctatctcccaaggtcgatgagaattttcttttgaggacatttggtcggtttggacctattgctagtgtcaagattatgtggcctagaacagaagaggaacgcagaaggcaaagaaattgtggttttgttgccttcatgaatagaacagatggacaagcagcaaaggatgaaatgcaaggtgttattgtgtatgactatgaactgaagattgggtggggtaaatctgttgctcttccgtcacaggctttgcctgctcctcctccaggacacatggcaatcagaaataaggagggtggtacagctacagtcatactttctggtcctggcggccctgctgttgcatctattaaaccacaaacctcagagctggtccttacaccaaatgttcctgatattgtggttgctccacctgatgatgggcatcttcggcatgtgattgacacaatggctctgcacgtacttgatggtggatgtgcttttgaacaagctgtaatggagagagggcgaggaaatcctttatttgatttcttgttcaatcttaaatctaaagagcacacatattatgtttggaggctatactcatttgcccagggtgatactctacaacgatggagaacagaaccctacatcatgatcacaggaagtggaagatgggtcccacctcccttgtcgtccaacagaagccctgaacgtgaaaaggaatctacatttgctgctggtagaagcaggcgtgttgaagtggagcgtacattgactgactcacagcgtgatgaatttgaggacatgctgcgagctttgacattagagaggagccaaataaaagacgccatgggatttgccttggataatgctgatgcagctggcgagattgttgaggttcttacagaatccttgacactcaaggagacgtctattccaacaaaggttgctcggcttatgctagtgtctgacatccttcataacagtagcgctcctgtgaagaacgcatctgcattccgaacgaagtttgaagcttctttgccagatgttatggagagctttaatgacttgtatcgcagtatcactggaaggattactgctgaagctctgaaggagagggttatgaaagttctacaagtttgggcagactggttcctgttttctgatgcatttcttaatgggctgagggctacttttcttagatcaggcaactctggtgttgttccgtttcactcgttatgtggtgatgcacccgaaattgaaaagaaaggtagctctgaggacggaaatgatggatttaagcttaatgaagacggtgccttggctactggaaaggcagcagcgacaaaggagctattagggctcccgctagctgaacttgagcgccgctgtagacataatggcctctctctgtgcggtggtaaagaaatgatggtcgccaggctgcttaacttggaagaggctgagaaggaacgaatttacgagaaggatgttgacgtgaaatatgtgcagggtgaacagcatgtggttggaagagaggacagtggtgtgaatgctcatagtacttcaaggtttggtgaaggttctaatggtgatgaattagatgtctctcggaacagtatgagagctggtaaaggacgttctggaggatctgcttctgccgaacttgaatcatttccaagcaagaagccgaaatacgatcctgttttgccagcttctaaatggagtcgagaggatgacatcagtgacgatgaagataggaaaggtggccgaggcttgggattaagctattcgtccggaagcgatattgctgatggtctcggaaaggtcgatacaacagaagctagtactgaccacacaagtcatcatcatgatacgattgttgatgaagagcacaggcagaagttgaggcagattgaaatttctgtcatgcagtaccgtgaatctcttgaggagcagggtctgcgtgacttggatgagattgagaggaaggttgccagccatcgaagacgtctccagtcagaatatggtttatccactccaactgatggtgctaacagcaggcgatcttctgaaagaacatcatcgtcgtcggagcggaaagagaggcatggcgatgcacatgatcatcctaggaaacgtcgccggagccagagtagaagctgcagtcctccaaggaagtctcaggagagggatcgagagcacaatcgcagtagggaccgagatagggtacgcgagaaaagtgcaagccgagggcgagacgaccaccacgacagaagccgagatagagaggacaggagaaaggggaggtgaccgacccgaaaaacctcgtcactatgcaccatttgccctaaccgaagggcccaggagcatcatttgagctgggctacacgcccaccagcatctccatcggtaaacatatattccgcaccaggcaggttaccctggtctgctccatgcttcgtctgcaataggagtttttgaggattaagttgaggttttgtaaagaagacttgttcgttactttttttgtggattattaagatatatcctatgtgtagtttatgcttaaaatttaaaaccaatgttgaatacagccagacccagaattgtcagtatcagacaaccgaggtatggactgcgattctgttcttccctggtggtgggctgttacgtgtagatctttgcacggcgtgagaataccgtcggttgtgcgtgggcgcatgcgtcgacgacaatgcatgctgcttaacgtgctcacgtggacgagaatgtgttgcatcatgctctagcatgcgaacatgtgcggtactgacatggtgcgtagctaagctattgtacacttgctttttcatgatgcctcgtgttaacgttgtcagagatctgaaa

SEQ ID NO: 49662 - DNA, 3604 bp, Zea Mays
gtgcggcctggcttttcccttctcggcttctgccgttcgcgtgcggccgtgcgtcctctctttctttctcggcgcctctgtttctggcggccgcgactggcccagcgccaccgccgacctagccaggtgaccaggtcttcgtcaggaccatagccagcgaagaacacccaagtacccaacagatgagttcgaagaaggttccgtaccacaagcatagggaggctgaggaggcgaggaagaagagggaggaagatgaagcagcacgtgtatatgcggaatttgttgagtccttcaaaggtgatagttcatctggggctaagtttatccgaggtggtgtgattgaccccaatgcaaagctgaagactgactcggaaggtggaaaatccaaagatggggggtctgttccaaagaagggcagtatgttccatccttcttgccaccatcatttgcaaaagagcctgagaaaaagaaggaaggggagaggccaaaggaaaaggaaaaggaaaagggaaagccacgagtaatagatagattcttggaggaaatcaagcttgaacaagagcagcgagagaagcgccatcaggatcgagatcaccgccgtgaaggtcgccatggcgatagctccatgtcctcgagccggtttgatgaactaccagatgaatttgatccgactgggagatttccaggatcatttgatgatggtgatcctcaaaccaccaacttatatgttggcaatctatctcccaaggtcgatgagaattttcttttgaggacatttggtcggtttggacctattgctagtgtcaagattatgtggcctagaacagaagaggaacgcagaaggcaaagaaattgtggttttgttgccttcatgaatagaacagatggacaagcagcaaaggatgaaatgcaaggtgttattgtgtatgactatgaactgaagattgggtggggtaaatctgttgctcttccgtcacaggctttgcctgctcctcctccaggacacatggcaatcagaaataaggagggtggtacagctacagtcatactttctggtcctggcggccctgctgttgcatctattaaaccacaaacctcagagctggtccttacaccaaatgttcctgatattgtggttgctccacctgatgatgggcatcttcggcatgtgattgacacaatggctctgcacgtacttgatggtggatgtgcttttgaacaagctgtaatggagagagggcgaggaaatcctttatttgatttcttgttcaatcttaaatctaaagagcacacatattatgtttggaggctatactcatttgcccagggtgatactctacaacgatggagaacagaaccctacatcatgatcacaggaagtggaagatgggtcccacctcccttgtcgtccaacagaagccctgaacgtgaaaaggaatctacatttgctgctggtagaagcaggcgtgttgaagtggagcgtacattgactgactcacagcgtgatgaatttgaggacatgctgcgagctttgacattagagaggagccaaataaaagacgccatgggatttgccttggataatgctgatgcagctggcgagattgttgaggttcttacagaatccttgacactcaaggagacgtctattccaacaaaggttgctcggcttatgctagtgtctgacatccttcataacagtagcgctcctgtgaagaacgcatctgcattccgaacgaagtttgaagcttctttgccagatgttatggagagctttaatgacttgtatcgcagtatcactggaaggattactgctgaagctctgaaggagagggttatgaaagttctacaagtttgggcagactggttcctgttttctgatgcatttcttaatgggctgagggctacttttcttagatcaggcaactctggtgttgttccgtttcactcgttatgtggtgatgcacccgaaattgaaaagaaaggtagctctgaggacggaaatgatggatttaagcttaatgaagacggtgccttggctactggaaaggcagcagcgacaaaggagctattagggctcccgctagctgaacttgagcgccgctgtagacataatggcctctctctgtgcggtggtaaagaaatgatggtcgccaggctgcttaacttggaagaggctgagaaggaacgaatttacgagaaggatgttgacgtgaaatatgtgcagggtgaacagcatgtggttggaagagaggacagtggtgtgaatgctcatagtacttcaaggtttggtgaaggttctaatggtgatgaattagatgtctctcggaacagtatgagagctggtaaaggacgttctggaggatctgcttctgccgaacttgaatcatttccaagcaagaagccgaaatacgatcctgttttgccagcttctaaatggagtcgagaggatgacatcagtgacgatgaagataggaaaggtggccgaggcttgggattaagctattcgtccggaagcgatattgctgatggtctcggaaaggtcgatacaacagaagctagtactgaccacacaagtcatcatcatgatacgattgttgatgaagagcacaggcagaagttgaggcagattgaaatttctgtcatgcagtaccgtgaatctcttgaggagcagggtctgcgtgacttggatgagattgagaggaaggttgccagccatcgaagacgtctccagtcagaatatggtttatccactccaactgatggtgctaacagcaggcgatcttctgaaagaacatcatcgtcgtcggagcggaaagagaggcatggcgatgcacatgatcatcctaggaaacgtcgccggagccagagtagaagctgcagtcctccaaggaagtctcaggagagggatcgagagcacaatcgcagtagggaccgagatagggtacgcgagaaaagtgcaagccgagggcgagacgaccaccacgacagaagccgagatagagaggacaggagaaaggggaggtgaccgacccgaaaaacctcgtcactatgcaccatttgccctaaccgaagggcccaggagcatcatttgagctgggctacacgcccaccagcatctccatcggtaaacatatattccgcaccaggcaggttaccctggtctgctccatgcttcgtctgcaataggagtttttgaggattaagttgaggttttgtaaagaagacttgttcgttactttttttgtggattattaagatatatcctatgtgtagtttatgcttaaaatttaaaaccaatgttgaatacagccagacccagaattgtcagtatcagacaaccgaggtatggactgcgattctgttcttccctggtggtgggctgttacgtgtagatctttgcacggcgtgagaataccgtcggttgtgcgtgggcgcatgcgtcgacgacaatgcatgctgcttaacgtgctcacgtggacgagaatgtgttgcatcatgctctagcatgcgaacatgtgcggtactgacatggtgcgtagctaagctattgtacacttgctttttcatgatgcctcgtgttaacgttgtcagagatctgaaa

SEQ ID NO: 49663 - DNA, 2747 bp, Zea Mays
tcccttctcggcttctgccgttcgcgtgcggccgtgcgtcctctctttctttctcggcgcctctgtttctggcggccgcgactggcccagcgccaccgccgacctagccaggtgaccaggtcttcgtcaggaccatagccagcgaagaacacccaagtacccaacagatgagttcgaagaaggttccgtaccacaagcatagggaggctgaggaggcgaggaagaagagggaggaagatgaagcagcacgtgtatatgcggaatttgttgagtccttcaaaggtgatagttcatctggggctaagtttatccgaggtggtgtgattgaccccaatgcaaagctgaagactgactcggaaggtatgttccatccttcttgccaccatcatttgcaaaagagcctgagaaaaagaaggaaggggagaggccaaaggaaaaggaaaaggaaaagggaaagccacgagtaatagatagattcttggaggaaatcaagcttgaacaagagcagcgagagaagcgccatcaggatcgagatcaccgccgtgaaggtcgccatggcgatagctccatgtcctcgagccggtttgatgaactaccagatgaatttgatccgactgggagatttccaggatcatttgatgatgctttacatgctatggtgttaggtcgatgagaattttcttttgaggacatttggtcggtttggacctattgctagtgtcaagattatgtggcctagaacagaagaggaacgcagaaggcaaagaaattgtggttttgttgccttcatgaatagaacagatggacaagcagcaaaggatgaaatgcaaggtgttattgtgtatgactatgaactgaagattgggtggggtaaatctgttgctcttccgtcacaggctttgcctgctcctcctccaggacacatggcaatcagaaataaggagggtggtacagctacagtcatactttctggtcctggcggccctgctgttgcatctattaaaccacaaacctcagagctggtccttacaccaaatgttcctgatattgtggttgctccacctgatgatgggcatcttcggcatgtgattgacacaatggctctgcacgtacttgatggtggatgtgcttttgaacaagctgtaatggagagagggcgaggaaatcctttatttgatttcttgttcaatcttaaatctaaagagcacacatattatgtttggaggctatactcatttgcccagggtgatactctacaacgatggagaacagaaccctacatcatgatcacaggaagtggaagatgggtcccacctcccttgtcgtccaacagaagccctgaacgtgaaaaggaatctacatttgctgctggtagaagcaggcgtgttgaagtggagcgtacattgactgactcacagcgtgatgaatttgaggacatgctgcgagctttgacattagagaggagccaaataaaagacgccatgggatttgccttggataatgctgatgcagctggcgagattgttgaggttcttacagaatccttgacactcaaggagacgtctattccaacaaaggttgctcggcttatgctagtgtctgacatccttcataacagtagcgctcctgtgaagaacgcatctgcattccgaacgaagtttgaagcttctttgccagatgttatggagagctttaatgacttgtatcgcagtatcactggaaggattactgctgaagctctgaaggagagggttatgaaagttctacaagtttgggcagactggttcctgttttctgatgcatttcttaatgggctgagggctacttttcttagatcaggcaactctggtgttgttccgtttcactcgttatgtggtgatgcacccgaaattgaaaagaaaggtagctctgaggacggaaatgatggatttaagcttaatgaagacggtgccttggctactggaaaggcagcagcgacaaaggagctattagggctcccgctagctgaacttgagcgccgctgtagacataatggcctctctctgtgcggtggtaaagaaatgatggtcgccaggctgcttaacttggaagaggctgagaaggaacgaatttacgagaaggatgttgacgtgaaatatgtgcagggtgaacagcatgtggttggaagagaggacagtggtgtgaatgctcatagtacttcaaggtttggtgaaggttctaatggtgatgaattagatgtctctcggaacagtatgagagctggtaaaggacgttctggaggatctgcttctgccgaacttgaatcatttccaagcaagaagccgaaatacgatcctgttttgccagcttctaaatggagtcgagaggatgacatcagtgacgatgaagataggaaaggtggccgaggcttgggattaagctattcgtccggaagcgatattgctgatggtctcggaaaggtcgatacaacagaagctagtactgaccacacaagtcatcatcatgatacgattgttgatgaagagcacaggtgcttgtccgttttcaatatttttttaccattgccatgctagtttttgtaagtgtctgccacagtgttattaaaactacgtttaaacgatgtttaaactacgtttaaacgtcaaaactctaattagagattgaaaccgcgttttagcgttttggcgttctaaactgtaaaacgtagtgctttatccattttagaccataagctacttttgggctca

SEQ ID NO: 49664 - DNA, 3635 bp, Zea Mays
gcgtgcggccgtgcgtcctctctttctttctcggcgcctctgtttctggcggccgcgactggcccagcgccaccgccgacctagccaggtgaccaggtcttcgtcaggaccatagccagcgaagaacacccaagtacccaacagccatgtcctatactggctccgcccctgattttgatgcactgtgatgattgtgtgataatgcccagatgagttcgaagaaggttccgtaccacaagcatagggaggctgaggaggcgaggaagaagagggaggaagatgaagcagcacgtgtatatgcggaatttgttgagtccttcaaaggtgatagttcatctggggctaagtttatccgaggtggtgtgattgaccccaatgcaaagctgaagactgactcggaaggtggaaaatccaaagatggggggtctgttccaaagaagggcagtaggtatgttccatccttcttgccaccatcatttgcaaaagagcctgagaaaaagaaggaaggggagaggccaaaggaaaaggaaaaggaaaagggaaagccacgagtaatagatagattcttggaggaaatcaagcttgaacaagagcagcgagagaagcgccatcaggatcgagatcaccgccgtgaaggtcgccatggcgatagctccatgtcctcgagccggtttgatgaactaccagatgaatttgatccgactgggagatttccaggatcatttgatgatggtgatcctcaaaccaccaacttatatgttggcaatctatctcccaaggtcgatgagaattttcttttgaggacatttggtcggtttggacctattgctagtgtcaagattatgtggcctagaacagaagaggaacgcagaaggcaaagaaattgtggttttgttgccttcatgaatagaacagatggacaagcagcaaaggatgaaatgcaaggtgttattgtgtatgactatgaactgaagattgggtggggtaaatctgttgctcttccgtcacaggctttgcctgctcctcctccaggacacatggcaatcagaaataaggagggtggtacagctacagtcatactttctggtcctggcggccctgctgttgcatctattaaaccacaaacctcagagctggtccttacaccaaatgttcctgatattgtggttgctccacctgatgatgggcatcttcggcatgtgattgacacaatggctctgcacgtacttgatggtggatgtgcttttgaacaagctgtaatggagagagggcgaggaaatcctttatttgatttcttgttcaatcttaaatctaaagagcacacatattatgtttggaggctatactcatttgcccagggtgatactctacaacgatggagaacagaaccctacatcatgatcacaggaagtggaagatgggtcccacctcccttgtcgtccaacagaagccctgaacgtgaaaaggaatctacatttgctgctggtagaagcaggcgtgttgaagtggagcgtacattgactgactcacagcgtgatgaatttgaggacatgctgcgagctttgacattagagaggagccaaataaaagacgccatgggatttgccttggataatgctgatgcagctggcgagattgttgaggttcttacagaatccttgacactcaaggagacgtctattccaacaaaggttgctcggcttatgctagtgtctgacatccttcataacagtagcgctcctgtgaagaacgcatctgcattccgaacgaagtttgaagcttctttgccagatgttatggagagctttaatgacttgtatcgcagtatcactggaaggattactgctgaagctctgaaggagagggttatgaaagttctacaagtttgggcagactggttcctgttttctgatgcatttcttaatgggctgagggctacttttcttagatcaggcaactctggtgttgttccgtttcactcgttatgtggtgatgcacccgaaattgaaaagaaaggtagctctgaggacggaaatgatggatttaagcttaatgaagacggtgccttggctactggaaaggcagcagcgacaaaggagctattagggctcccgctagctgaacttgagcgccgctgtagacataatggcctctctctgtgcggtggtaaagaaatgatggtcgccaggctgcttaacttggaagaggctgagaaggaacgaatttacgagaaggatgttgacgtgaaatatgtgcagggtgaacagcatgtggttggaagagaggacagtggtgtgaatgctcatagtacttcaaggtttggtgaaggttctaatggtgatgaattagatgtctctcggaacagtatgagagctggtaaaggacgttctggaggatctgcttctgccgaacttgaatcatttccaagcaagaagccgaaatacgatcctgttttgccagcttctaaatggagtcgagaggatgacatcagtgacgatgaagataggaaaggtggccgaggcttgggattaagctattcgtccggaagcgatattgctgatggtctcggaaaggtcgatacaacagaagctagtactgaccacacaagtcatcatcatgatacgattgttgatgaagagcacaggcagaagttgaggcagattgaaatttctgtcatgcagtaccgtgaatctcttgaggagcagggtctgcgtgacttggatgagattgagaggaaggttgccagccatcgaagacgtctccagtcagaatatggtttatccactccaactgatggtgctaacagcaggcgatcttctgaaagaacatcatcgtcgtcggagcggaaagagaggcatggcgatgcacatgatcatcctaggaaacgtcgccggagccagagtagaagctgcagtcctccaaggaagtctcaggagagggatcgagagcacaatcgcagtagggaccgagatagggtacgcgagaaaagtgcaagccgagggcgagacgaccaccacgacagaagccgagatagagaggacaggagaaaggggaggtgaccgacccgaaaaacctcgtcactatgcaccatttgccctaaccgaagggcccaggagcatcatttgagctgggctacacgcccaccagcatctccatcggtaaacatatattccgcaccaggcaggttaccctggtctgctccatgcttcgtctgcaataggagtttttgaggattaagttgaggttttgtaaagaagacttgttcgttactttttttgtggattattaagatatatcctatgtgtagtttatgcttaaaatttaaaaccaatgttgaatacagccagacccagaattgtcagtatcagacaaccgaggtatggactgcgattctgttcttccctggtggtgggctgttacgtgtagatctttgcacggcgtgagaataccgtcggttgtgcgtgggcgcatgcgtcgacgacaatgcatgctgcttaacgtgctcacgtggacgagaatgtgttgcatcatgctctagcatgcgaacatgtgcggtactgacatggtgcgtagctaagctattgtacacttgctttttcatgatgcctcgtgttaacgttgtcagagatctgaaa

SEQ ID NO: 49665 - DNA, 3090 bp, Zea Mays
atgcccgacaccgcggggaatgggcagaagtggagtcgactgtggtggagctcatcctcgcagcgggggagcaacacggcggcgtcagaggcaccgtccactactgacatgctcagcacctctatcgctgtggttgtcgtgcacgcgcagcctagggacttccgcatcatcaggcaggagtggactgtcgtccgcatccagttcgccttccttgcattcctgtttgacgcaatccatggattcaataccaacaaaaccattggaggcacactggttcatgggcggctttggcgtaaagcgcctccgcttgcagagccacatcgagggttgttaaggcgtcgtcatcgtcggctcaaagtcggcacccagagtgagtgtttcgttgcatgtgtgtcagggtacctatccttttcaacctgcattggcttaatgaatgagagggaggcgaacaaggagatggttgtctaccttgtcgacgcctcgcctaaaatgttcacccctgccgccacccaggagacacatttccataccattgttaactgcatcacagagtctctgaagacacaaattattggtagatcttatgatgaagtcgcaatatgtttctttaacacttgccatgggttctgtaacactattaacttgccaaccaaagatgttgaacctgagaagccaagcagcccttctataaagagggcagaagagaaagaggtggttgttgttcatgaaaccaaatgcaaggtatcagtagagattgccaggaactcagaacctttcatcggtgagcagttagcttctctgctctacctggagccagacagtgaacttacggctatgctaatcgcagcagaggccaaacaacaggaggaaaaagcaaaaggagtcagtgccgacgagcatgatgaagccactaagggttggaaagacattggtgttggtcagctctctatcagaagtaaagaaggcacagagaaaacttacaaagaatctactcctaccattgttataagaaaccatgaaggtgttggtatttgtcgacaaggcaaacgatctgatgcagctagacagcaaggacagtccagttgtataaaacgcggttttttgcttcaaccctctgcagctgctgctgtcactactaacaaggccgtgctggactcggtcatcagcttggctgctgctaagaagcctgctcgcacaaatacttatgtagatatgcctgttatgaggaaggtttctcttcaccgcttcctcgagaagagaaaggatcgggagctgcgcctgcgcaattttcgcgcactggtggctagagagcctccaaatctcttctcctttccaggtggtgtgtacctggggtttgcagttggttgtcttttctggtcgctcaggtactgtatcgtgcaattattggttttggtatatcaaggcttccgtggatatacatatactggtctgagttgtcaagtccttgacctgatcatatcagttttgcttataaggatgggggtttacctcagtactccaaaaactgacaagctatctgaaaatggagaaaatgatagacttaagtttggtctttcatctatgcaaggatggcgagcaaccatggaagatgctcattcagcattgctagatcttgatagcgagacagcattctttggtgtttttgatggtcatggaggaagagtcgttgccaaattctgtgcaaaatatctgcatggtcaagtcctcaaaagcgaagcctattcaactggtgacctaggcactgctgtccatagagctttcttcagaatggatgaaatgatgcaaggacagagaggttggcgagaactatctgcacttggagacaaaataaacaagtttagtggtatgatagaaggattgatttggtctccaaggggcagtgattcaaataatcaacaagatgattgggcttcagaggagggacctcactctgactttgctgggccaacatgtgggagtacagcgtgtgtagcattaataagaaacacccaacttgttgtggcaaatgctggtgattcccgatgtgttatttcaaggggtgggaaggcatacaatttatcgagggaccacaaaccagagcttgcagctgagagagaaaggataatgaaagcagggggcttcatccatatgggacgagtaaatggaagtttaaacttgtcaagggcaattggagacgtggaattgaaacagaacaaattcctgcctcccgagaagcaaattgtgacggccaatcctgatatcaatgtcgtggagctctgcgatgatgacgactttgttgttgtagcatgtgatggcatttgggactgcatgtcaagccaacagctggtggattttatccacgagcgtataaacacggagagcagcctgtctgccgtgtgcgagagagtgctggacagatgcctggctccatcaacgatcgctggagacgggtgcgacaacatgaccatgatcctggtgcagttcaaaaaacctgtcgatcggaacaagaaggccgaagcagcagggcaatctgccagcaatgtggacgaagccaagagtcgtgttgctgaggagtgaagcatggctggcactcaccagggcgcaaccatttgctttcataaggcaggtgaaaaaaaggaacgaagaaacctgcagtgtacgtatctcaactgtacgtggcatgccatgcaaatcctgcctaagttaccccggacaatggcattgcctagtgcagtggtggatcttcagatcacaacctttcttgtgccagctttcggtcatctccactctccagccctcggaaccatggctgagtctgtctattctttgtgtggtgtgtagcattcctcgtgttttcgttgtccaaaatggtgtcaaatccagttttttgttgcgagaatgaaccgtgacgttagtgtgttttgctggcggttaggtgcaaaatactcgaaacctgaattgcccgctcgctatttcgggttgtaagtatatgatgaatctgattttagttgcatggtgtacccatcttatctgaaaataatgaaagatctgtttgtggttgactaattacgtgtgtgtttttttctaatg

SEQ ID NO: 49666 - DNA, 2692 bp, Zea Mays
ctcgagtctcgttctccactagtatacgggctactccaccggctgctccgcgagcagtcgaggttgacggctagtactagcaagcagtagtggtgtcgcatctgccgatctcctctgtccgagtcactcactcgtaggtggcttccacccatctccctcagcagtcagtcagcaggactcagcagcactatctcccaccccccatccttcgctactctttcgttccttctgatcgccgctatcctcttcagccccgactgaggaggcggccggcgctccccaggcacgcacgagttgacgggtccagcagcggcctcgggatcttgccgccagctgcagcggcaatccggtccgtccgcccaggaaaccagtgctgtcttaggtattgttgattcatgattcttgattccgggaggcggtttcgtgttgtgacagcccgatcttgcggttcagcagagagccaatccgctgggcttccgtggatatacatatactggtctgagttgtcaagtccttgacctgatcatatcagttttgcttataaggatgggggtttacctcagtactccaaaaactgacaagctatctgaaaatggagaaaatgatagacttaagtttggtctttcatctatgcaaggatggcgagcaaccatggaagatgctcattcagcattgctagatcttgatagcgagacagcattctttggtgtttttgatggtcatggaggaagagtcgttgccaaattctgtgcaaaatatctgcatggtcaagtcctcaaaagcgaagcctattcaactggtgacctaggcactgctgtccatagagctttcttcagaatggatgaaatgatgcaaggacagagaggttggcgagaactatctgcacttggagacaaaataaacaagtttagtggtatgatagaaggattgatttggtctccaaggggcagtgattcaaataatcaacaagatgattgggcttcagaggagggacctcactctgactttgctgggccaacatgtgggagtacagcgtgtgtagcattaataagaaacacccaacttgttgtggcaaatgctggtgattcccgatgtgttatttcaaggggtgggaaggcatacaatttatcgagggaccacaaaccagagcttgcagctgagagagaaaggataatgaaagcagggggcttcatccatatgggacgagtaaatggaagtttaaacttgtcaagggcaattggagacgtggaattgaaacagaacaaattcctgcctcccgagaagcaaattgtgacggccaatcctgatatcaatgtcgtggagctctgcgatgatgacgactttgttgttgtagcatgtgatggcatttgggactgcatgtcaagccaacagctggtggattttatccacgagcgtataaacacggagagcagcctgtctgccgtgtgcgagagagtgctggacagatgcctggctccatcaacgatcgctggagacgggtgcgacaacatgaccatgatcctggtgcagttcaaaaaacctgtcgatcggaacaagaaggccgaagcagcagggcaatctgccagcaatgtggacgaagccaagagtcgtgttgctgaggagtgaagcatggctggcactcaccagggcgcaaccatttgctttcataaggcaggtgaaaaaaaggaacgaagaaacctgcagtgtaatagaatgaacatagagggcgctttctgtttgccgtgttccacaaggaagagagcaagttatagacctttccgagtgtacagtttatttggagggaagaaggataaagatgagaatggtgatgaggcgccatcgaaagcaggaatttttggaaatatgcaaaatctctatgaaactgttaagaaggcccaaatggttgtccaagttgaggctgtccgggtgcaaaaggagcttgcagcgactgagattgatggttattgtgaaggcgaactaatcaaggttacactttctggaaaccagcaacctattagagttgaaatcacagaagctgcgatggagttgggtgctgaaaaactttccgggttggtcaacgatgcttacaaggatgcacaccaacggagcgtccaggccatgaaagagaggatggctgacttggcgcagagcctgggaatgcctgcgggcctcggcgatggtctcaagtgatgccgcaattcgggaaagctttccaataatcctttttcctcaattttgtatgctagccgtgtgagtagtaagcataacccctccgcgacctctcataagaagtgtacttgtgagcacttgttttctttcagctttagctgccatttgctgttctgcgcacgcagatatttgcacattaacttcacgtctggtctacaaagttgcaagatgcgggccatgatcttttgggcatttttccaacaagttgttgggctggcccagttgtagcccttcgaagatgagacaaccaagcccatatatataacacacaccgaaagccttcagaatctgtcgtgtgtgaccaaggataaatcatggctttggtgaacagtgatttaacagcaaataaaacactaagtgggtgttcggtttgaggaatcactctatccaaaatgtggtggtgtatcatgggtcaattcctcaaatttggtgggatgacctattccttatattagtactaact

SEQ ID NO: 49667 - DNA, 4884 bp, Zea Mays
tacgggctactccaccggctgctccgcgagcagtcgaggttgacggctagtactagcaagcagtagtggtgtcgcatctgccgatctcctctgtccgagtcactcactcgtaggtggcttccacccatctccctcagcagtcagtcagcaggactcagcagcactatctcccaccccccatccttcgctactctttcgttccttctgatcgccgctatcctcttcagccccgactgaggaggcggccggcgctccccaggcacgcacgagttgacgggtccagcagcggcctcgggatcttgccgccagctgcagcggcaatccggtccgtccgcccaggaaaccagtgctgtcttaggtattgttgattcatgattcttgattccgggaggcggtttcgtgttgtgacagcccgatcttgcggttcagcagagagccaatccgctgggcttccgtggatatacatatactggtctgagttgtcaagtccttgacctgatcatatcagttttgcttataaggatgggggtttacctcagtactccaaaaactgacaagctatctgaaaatggagaaaatgatagacttaagtttggtctttcatctatgcaaggatggcgagcaaccatggaagatgctcattcagcattgctagatcttgatagcgagacagcattctttggtgtttttgatggtcatggaggaagagtcgttgccaaattctgtgcaaaatatctgcatggtcaagtcctcaaaagcgaagcctattcaactggtgacctaggcactgctgtccatagagctttcttcagaatggatgaaatgatgcaaggacagagaggttggcgagaactatctgcacttggagacaaaataaacaagtttagtggtatgatagaaggattgatttggtctccaaggggcagtgattcaaataatcaacaagatgattgggcttcagaggagctgagcttttcgttggaaagagaaacccatgcaaatagaacttttgtgttatggcggcggctagggttgagggagcacaagggggccggctaagggccttgcccacagccgaacaagagggaagtgtttttcttcttaagtcttgcttgattatattgatacatctcctctccttatacgtagagccttacttgacctctaagaaaatattctaaccaactcaatctaactcatctcttttcttatcttaactaaccaaatatttccttattctaattaactaaatcaatctaatttactctatcctaatggctctactcaggggtggatctagaattttcctatgactcaggccaaacctactaaatttccttctcttccttttatcttaactattttatactagattaaataaatacttatgtagagtagttacatggatcaagccttgggccacggaccgggtggcccggggtgtagatccgcccctggttccacttgtcataacactactccactccatcatagctcttcctcggggttgtgctgttggtcatggctgcagatttcaatgttcccatggcgacatgtgtacaatctcacctagatcccatgacatagtctcgcgagtgtcaatacctaggagtggtcacaacaacaatcggcaaagacacccttgtggaggccggtgatgaaatgtggcagagctatgtagtgcacgcctaagggaccccatgccttcttctcgtcgaacggctgctagtcagcgccacaccgagaggagaggatcctcgatgtctgaggtaccctaggggttgatgccgaggtgccttggggtccgaaacatgtgcctcaagggtagaataggtgtccgaaggcgggaacagatgccccaagtggcggaacaggtgcctcgacggagggaacacgtgttcgaggccaggacaggtgccctggcggtgggaaccagtgccctaggggtcgagacaggtgctgcggaggcgggaattggtgccccgagggctggcagaaggagtgccctaggggccagatcaactagtgctccgaggggtggagcacacagtgcactaagttctaggggacgtggttgtcaagagtctaaggccaccatacgtgcctagagagatggggcgaagtcgatcaacgtcttggagattggatccggtgatggctcatcggtaccgaagcgtgagttgcaaagctctatgaagcgctactaggaaggctgtcatgtttacatcctgttcgagaatgtagtaccacgtctgcatcgcgccgtgtagatggtatgatgcaagccaatcacgatcagatgcgagcgtgtgttgccctcgaaaaaattgctcacaataggtgagccaaattacagggcaatcgagcttgcgggggatggcagtggtggttgagtaagttagaagcgctgttgggccgtactccaacatccgtagggaaagccttcaggcatgacacccgccgatgaggatgcctgatggctcttcacggtggccagccgtgagagtacatcgacctattgtgtgtcggaacctgagatctttgataccatatattattgcggagtgtcggaacctgagatctttggtaccagatattattgcggatgttatggcagcgactaaggttgaggtgacgcaaggggggcggccggagatcttgtccacaaccgagcaagaggaaaggattttcttacttaatgcttgctttattagattgatacatcttctctccttatagagagacttacttgacccctaaagaaatgtcttaacgaaatcaatttaacttatctcttcccttatcctaactaaccgaatattttatatcctaactaactaaatcaatttaacttattttttccttattctatcggctccacttgccataacatattgccatctagaaatgaacggtttgttgttaataatgatgtacatgtactatgagttgatttagatatatgaaaaatcagttttcaaatattagtttgtgtatcagttttcatgattgtttgaattatgatattaaatttgggaatctctcatagataatgtttttgttagggaagtcatcctgattttgtctgtggtagatggctactgctgttttcacttttctaaaatagatgcacatctgattttcttgcattaaaataaaggtaatgtcttttgaatgcttgcaagctgtgtcagatgtgaattgcaaataacatccgaatttttgtgtaaaaagaaatccatgtgaagagaaaacgggcacccaaacatggtagctgcaatgttactaatgatgtaatatgagttaattatgaaatgtaatattctgaagtctacgtctttattatcgtttgaactaaaaaaatggtagatccagtgccgtaggctaccacatgagagcttgtaccatataagagcttgttcggttaggagtggattgaaggagattggaggggattaaatccattcctagtcaaaattgaataagaggggatttaatcccctcaatccactccgatcctcatgcaaccaaacaagacctgagtggggtctgagaaatgaataaaccgagacaatcccacatgagtggggtctagggaagggataaatcgagataggccttcttagatgcggagagacagctctcaccgctacaccatgcttttccttactttattattgtttaaactatggtattaaattcatggagtatgtcacatgtataatcgtttatcagggacctcactctgactttgctgggccaacatgtgggagtacagcgtgtgtagcattaataagaaacacccaacttgttgtggcaaatgctggtgattcccgatgtgttatttcaaggggtgggaaggcatacaatttatcgagggaccacaaaccagagcttgcagctgagagagaaaggataatgaaagcagggggcttcatccatatgggacgagtaaatggaagtttaaacttgtcaagggcaattggagacgtggaattgaaacagaacaaattcctgcctcccgagaagcaaattgtgacggccaatcctgatatcaatgtcgtggagctctgcgatgatgacgactttgttgttgtagcatgtgatggcatttgggactgcatgtcaagccaacagctggtggattttatccacgagcgtataaacacggagagcagcctgtctgccgtgtgcgagagagtgctggacagatgcctggctccatcaacgatcgctggagacgggtgcgacaacatgaccatgatcctggtgcagttcaaaaaacctgtcgatcggaacaagaaggccgaagcagcagggcaatctgccagcaatgtggacgaagccaagagtcgtgttgctgaggagtgaagcatggctggcactcaccagggcgcaaccatttgctttcataaggcaggtgaaaaaaaggaacgaagaaacctgcagtgtacgtatctcaactgtacgtggcatgccatgcaaatcctgcctaagttaccccggacaatggcattgcctagtgcagtggtggatcttcagatcacaacctttcttgtgccagctttcggtcatctccactctccagccctcggaaccatggctgagtctgtctattctttgtgtggtgtgtagcattcctcgtgttttcgttgtccaaaatggtgtcaaatccagttttttgttgcgagaatgaaccgtgacgttagtgtgttttgctggcggttaggtgcaaaatactcgaaacctgaattgcccgctcgctatttcgggttgtaagtatatgatgaatctgattttagttgcatggtgtacccatcttatctgaaaataatgaaagatctgtttgtggttgactaattacgtgtgtgtttttttctaatg

SEQ ID NO: 49668 - DNA, 1861 bp, Zea Mays
gagcagtcgaggttgacggctagtactagcaagcagtagtggtgtcgcatctgccgatctcctctgtccgagtcactcactcccccgactgaggaggcggccggcgctccccaggcacgcacgagttgacgggtccagcagcggcctcgggatcttgccgccagctgcagcggcaatccggtccgtccgcccaggcttccgtggatatacatatactggtctgagttgtcaagtccttgacctgatcatatcagttttgcttataaggatgggggtttacctcagtactccaaaaactgacaagctatctgaaaatggagaaaatgatagacttaagtttggtctttcatctatgcaaggatggcgagcaaccatggaagatgctcattcagcattgctagatcttgatagcgagacagcattctttggtgtttttgatggtcatggaggaagagtcgttgccaaattctgtgcaaaatatctgcatggtcaagtcctcaaaagcgaagcctattcaactggtgacctaggcactgctgtccatagagctttcttcagaatggatgaaatgatgcaaggacagagaggttggcgagaactatctgcacttggagacaaaataaacaagtttagtggtatgatagaaggattgatttggtctccaaggggcagtgattcaaataatcaacaagatgattgggcttcagaggagggacctcactctgactttgctgggccaacatgtgggagtacagcgtgtgtagcattaataagaaacacccaacttgttgtggcaaatgctggtgattcccgatgtgttatttcaaggggtgggaaggcatacaatttatcgagggaccacaaaccagagcttgcagctgagagagaaaggataatgaaagcagggggcttcatccatatgggacgagtaaatggaagtttaaacttgtcaagggcaattggagacgtggaattgaaacagaacaaattcctgcctcccgagaagcaaattgtgacggccaatcctgatatcaatgtcgtggagctctgcgatgatgacgactttgttgttgtagcatgtgatggcatttgggactgcatgtcaagccaacagctggtggattttatccacgagcgtataaacacggagagcagcctgtctgccgtgtgcgagagagtgctggacagatgcctggctccatcaacgatcgctggagacgggtgcgacaacatgaccatgatcctggtgcagttcaaaaaacctgtcgatcggaacaagaaggccgaagcagcagggcaatctgccagcaatgtggacgaagccaagagtcgtgttgctgaggagtgaagcatggctggcactcaccagggcgcaaccatttgctttcataaggcaggtgaaaaaaaggaacgaagaaacctgcagtgtacgtatctcaactgtacgtggcatgccatgcaaatcctgcctaagttaccccggacaatggcattgcctagtgcagtggtggatcttcagatcacaacctttcttgtgccagctttcggtcatctccactctccagccctcggaaccatggctgagtctgtctattctttgtgtggtgtgtagcattcctcgtgttttcgttgtccaaaatggtgtcaaatccagttttttgttgcgagaatgaaccgtgacgttagtgtgttttgctggcggttaggtgcaaaatactcgaaacctgaattgcccgctcgctatttcgggttgtaagtatatgatgaatctgattttagttgcatggtgtacccatcttatctgaaaataatgaaagatctgtttgtggttgactaattacgtgtgtgtttttttctaatg

SEQ ID NO: 49669 - DNA, 1970 bp, Zea Mays
cgaggttgacggctagtactagcaagcagtagtggtgtcgcatctgccgatctcctctgtccgagtcactcactcccccgactgaggaggcggccggcgctccccaggcacgcacgagttgacgggtccagcagcggcctcgggatcttgccgccagctgcagcggcaatccggtccgtccgcccagtctccaggaaaccagtgctgtcttaggtattgttgattcatgattcttgattccgggaggcggtttcgtgttgtgacagcccgatcttgcggttcagcagagagccaatccgctgggcttccgtggatatacatatactggtctgagttgtcaagtccttgacctgatcatatcagttttgcttataaggatgggggtttacctcagtactccaaaaactgacaagctatctgaaaatggagaaaatgatagacttaagtttggtctttcatctatgcaaggatggcgagcaaccatggaagatgctcattcagcattgctagatcttgatagcgagacagcattctttggtgtttttgatggtcatggaggaagagtcgttgccaaattctgtgcaaaatatctgcatggtcaagtcctcaaaagcgaagcctattcaactggtgacctaggcactgctgtccatagagctttcttcagaatggatgaaatgatgcaaggacagagaggttggcgagaactatctgcacttggagacaaaataaacaagtttagtggtatgatagaaggattgatttggtctccaaggggcagtgattcaaataatcaacaagatgattgggcttcagaggagggacctcactctgactttgctgggccaacatgtgggagtacagcgtgtgtagcattaataagaaacacccaacttgttgtggcaaatgctggtgattcccgatgtgttatttcaaggggtgggaaggcatacaatttatcgagggaccacaaaccagagcttgcagctgagagagaaaggataatgaaagcagggggcttcatccatatgggacgagtaaatggaagtttaaacttgtcaagggcaattggagacgtggaattgaaacagaacaaattcctgcctcccgagaagcaaattgtgacggccaatcctgatatcaatgtcgtggagctctgcgatgatgacgactttgttgttgtagcatgtgatggcatttgggactgcatgtcaagccaacagctggtggattttatccacgagcgtataaacacggagagcagcctgtctgccgtgtgcgagagagtgctggacagatgcctggctccatcaacgatcgctggagacgggtgcgacaacatgaccatgatcctggtgcagttcaaaaaacctgtcgatcggaacaagaaggccgaagcagcagggcaatctgccagcaatgtggacgaagccaagagtcgtgttgctgaggagtgaagcatggctggcactcaccagggcgcaaccatttgctttcataaggcaggtgaaaaaaaggaacgaagaaacctgcagtgtacgtatctcaactgtacgtggcatgccatgcaaatcctgcctaagttaccccggacaatggcattgcctagtgcagtggtggatcttcagatcacaacctttcttgtgccagctttcggtcatctccactctccagccctcggaaccatggctgagtctgtctattctttgtgtggtgtgtagcattcctcgtgttttcgttgtccaaaatggtgtcaaatccagttttttgttgcgagaatgaaccgtgacgttagtgtgttttgctggcggttaggtgcaaaatactcgaaacctgaattgcccgctcgctatttcgggttgtaagtatatgatgaatctgattttagttgcatggtgtacccatcttatctgaaaataatgaaagatctgtttgtggttgactaattacgtgtgtgtttttttctaatg

SEQ ID NO: 49670 - DNA, 1983 bp, Zea Mays
ggctagtactagcaagcagtagtggtgtcgcatctgccgatctcctctgtccgagtcactcactcgtaggtggcttccacccatctccctcagcaccccgactgaggaggcggccggcgctccccaggcacgcacgagttgacgggtccagcagcggcctcgggatcttgccgccagctgcagcggcaatccggtccgtccgcccaggaaaccagtgctgtcttaggtattgttgattcatgattcttgattccgggaggcggtttcgtgttgtgacagcccgatcttgcggttcagcagagagccaatccgctgggcttccgtggatatacatatactggtctgagttgtcaagtccttgacctgatcatatcagttttgcttataaggatgggggtttacctcagtactccaaaaactgacaagctatctgaaaatggagaaaatgatagacttaagtttggtctttcatctatgcaaggatggcgagcaaccatggaagatgctcattcagcattgctagatcttgatagcgagacagcattctttggtgtttttgatggtcatggaggaagagtcgttgccaaattctgtgcaaaatatctgcatggtcaagtcctcaaaagcgaagcctattcaactggtgacctaggcactgctgtccatagagctttcttcagaatggatgaaatgatgcaaggacagagaggttggcgagaactatctgcacttggagacaaaataaacaagtttagtggtatgatagaaggattgatttggtctccaaggggcagtgattcaaataatcaacaagatgattgggcttcagaggagggacctcactctgactttgctgggccaacatgtgggagtacagcgtgtgtagcattaataagaaacacccaacttgttgtggcaaatgctggtgattcccgatgtgttatttcaaggggtgggaaggcatacaatttatcgagggaccacaaaccagagcttgcagctgagagagaaaggataatgaaagcagggggcttcatccatatgggacgagtaaatggaagtttaaacttgtcaagggcaattggagacgtggaattgaaacagaacaaattcctgcctcccgagaagcaaattgtgacggccaatcctgatatcaatgtcgtggagctctgcgatgatgacgactttgttgttgtagcatgtgatggcatttgggactgcatgtcaagccaacagctggtggattttatccacgagcgtataaacacggagagcagcctgtctgccgtgtgcgagagagtgctggacagatgcctggctccatcaacgatcgctggagacgggtgcgacaacatgaccatgatcctggtgcagttcaaaaaacctgtcgatcggaacaagaaggccgaagcagcagggcaatctgccagcaatgtggacgaagccaagagtcgtgttgctgaggagtgaagcatggctggcactcaccagggcgcaaccatttgctttcataaggcaggtgaaaaaaaggaacgaagaaacctgcagtgtacgtatctcaactgtacgtggcatgccatgcaaatcctgcctaagttaccccggacaatggcattgcctagtgcagtggtggatcttcagatcacaacctttcttgtgccagctttcggtcatctccactctccagccctcggaaccatggctgagtctgtctattctttgtgtggtgtgtagcattcctcgtgttttcgttgtccaaaatggtgtcaaatccagttttttgttgcgagaatgaaccgtgacgttagtgtgttttgctggcggttaggtgcaaaatactcgaaacctgaattgcccgctcgctatttcgggttgtaagtatatgatgaatctgattttagttgcatggtgtacccatcttatctgaaaataatgaaagatctgtttgtggttgactaattacgtgtgtgtttttttctaatg

SEQ ID NO: 49671 - DNA, 1953 bp, Zea Mays
ggctagtactagcaagcagtagtggtgtcgcatctgccgatctcctctgtccgagtcactcactcccccgactgaggaggcggccggcgctccccaggcacgcacgagttgacgggtccagcagcggcctcgggatcttgccgccagctgcagcggcaatccggtccgtccgcccaggaaaccagtgctgtcttaggtattgttgattcatgattcttgattccgggaggcggtttcgtgttgtgacagcccgatcttgcggttcagcagagagccaatccgctgggcttccgtggatatacatatactggtctgagttgtcaagtccttgacctgatcatatcagttttgcttataaggatgggggtttacctcagtactccaaaaactgacaagctatctgaaaatggagaaaatgatagacttaagtttggtctttcatctatgcaaggatggcgagcaaccatggaagatgctcattcagcattgctagatcttgatagcgagacagcattctttggtgtttttgatggtcatggaggaagagtcgttgccaaattctgtgcaaaatatctgcatggtcaagtcctcaaaagcgaagcctattcaactggtgacctaggcactgctgtccatagagctttcttcagaatggatgaaatgatgcaaggacagagaggttggcgagaactatctgcacttggagacaaaataaacaagtttagtggtatgatagaaggattgatttggtctccaaggggcagtgattcaaataatcaacaagatgattgggcttcagaggagggacctcactctgactttgctgggccaacatgtgggagtacagcgtgtgtagcattaataagaaacacccaacttgttgtggcaaatgctggtgattcccgatgtgttatttcaaggggtgggaaggcatacaatttatcgagggaccacaaaccagagcttgcagctgagagagaaaggataatgaaagcagggggcttcatccatatgggacgagtaaatggaagtttaaacttgtcaagggcaattggagacgtggaattgaaacagaacaaattcctgcctcccgagaagcaaattgtgacggccaatcctgatatcaatgtcgtggagctctgcgatgatgacgactttgttgttgtagcatgtgatggcatttgggactgcatgtcaagccaacagctggtggattttatccacgagcgtataaacacggagagcagcctgtctgccgtgtgcgagagagtgctggacagatgcctggctccatcaacgatcgctggagacgggtgcgacaacatgaccatgatcctggtgcagttcaaaaaacctgtcgatcggaacaagaaggccgaagcagcagggcaatctgccagcaatgtggacgaagccaagagtcgtgttgctgaggagtgaagcatggctggcactcaccagggcgcaaccatttgctttcataaggcaggtgaaaaaaaggaacgaagaaacctgcagtgtacgtatctcaactgtacgtggcatgccatgcaaatcctgcctaagttaccccggacaatggcattgcctagtgcagtggtggatcttcagatcacaacctttcttgtgccagctttcggtcatctccactctccagccctcggaaccatggctgagtctgtctattctttgtgtggtgtgtagcattcctcgtgttttcgttgtccaaaatggtgtcaaatccagttttttgttgcgagaatgaaccgtgacgttagtgtgttttgctggcggttaggtgcaaaatactcgaaacctgaattgcccgctcgctatttcgggttgtaagtatatgatgaatctgattttagttgcatggtgtacccatcttatctgaaaataatgaaagatctgtttgtggttgactaattacgtgtgtgtttttttctaatg

SEQ ID NO: 49672 - DNA, 2270 bp, Zea Mays
ggctagtactagcaagcagtagtggtgtcgcatctgccgatctcctctgtccgagtcactcactcgtaggtggcttccacccatctccctcagcaccccgactgaggaggcggccggcgctccccaggcacgcacgagttgacgggtccagcagcggcctcgggatcttgccgccagctgcagcggcaatccggtccgtccgcccaggtacaagagaggccgtggccacttctccgttggattcttccaccttctacactatcatttatgtgtttgtttccttcaagtctccaggaaaccagtgctgtcttaggtattgttgattcatgattcttgattccgggaggcggtttcgtgttgtgacagcccgatcttgcggttcagcagagagccaatccgctgggtatcattttgttttgttttttctttgttgttaattaatatacagggagctgcgcctgcgcaattttcgcgcactggtggctagagagcctccaaatctcttctcctttccaggtggtgtgtacctggggtttgcagttggttgtcttttctggtcgctcaggtactgtatcgtgcaattattggttttggtatatcaaggcttccgtggatatacatatactggtctgagttgtcaagtccttgacctgatcatatcagttttgcttataaggatgggggtttacctcagtactccaaaaactgacaagctatctgaaaatggagaaaatgatagacttaagtttggtctttcatctatgcaaggatggcgagcaaccatggaagatgctcattcagcattgctagatcttgatagcgagacagcattctttggtgtttttgatggtcatggaggaagagtcgttgccaaattctgtgcaaaatatctgcatggtcaagtcctcaaaagcgaagcctattcaactggtgacctaggcactgctgtccatagagctttcttcagaatggatgaaatgatgcaaggacagagaggttggcgagaactatctgcacttggagacaaaataaacaagtttagtggtatgatagaaggattgatttggtctccaaggggcagtgattcaaataatcaacaagatgattgggcttcagaggagggacctcactctgactttgctgggccaacatgtgggagtacagcgtgtgtagcattaataagaaacacccaacttgttgtggcaaatgctggtgattcccgatgtgttatttcaaggggtgggaaggcatacaatttatcgagggaccacaaaccagagcttgcagctgagagagaaaggataatgaaagcagggggcttcatccatatgggacgagtaaatggaagtttaaacttgtcaagggcaattggagacgtggaattgaaacagaacaaattcctgcctcccgagaagcaaattgtgacggccaatcctgatatcaatgtcgtggagctctgcgatgatgacgactttgttgttgtagcatgtgatggcatttgggactgcatgtcaagccaacagctggtggattttatccacgagcgtataaacacggagagcagcctgtctgccgtgtgcgagagagtgctggacagatgcctggctccatcaacgatcgctggagacgggtgcgacaacatgaccatgatcctggtgcagttcaaaaaacctgtcgatcggaacaagaaggccgaagcagcagggcaatctgccagcaatgtggacgaagccaagagtcgtgttgctgaggagtgaagcatggctggcactcaccagggcgcaaccatttgctttcataaggcaggtgaaaaaaaggaacgaagaaacctgcagtgtacgtatctcaactgtacgtggcatgccatgcaaatcctgcctaagttaccccggacaatggcattgcctagtgcagtggtggatcttcagatcacaacctttcttgtgccagctttcggtcatctccactctccagccctcggaaccatggctgagtctgtctattctttgtgtggtgtgtagcattcctcgtgttttcgttgtccaaaatggtgtcaaatccagttttttgttgcgagaatgaaccgtgacgttagtgtgttttgctggcggttaggtgcaaaatactcgaaacctgaattgcccgctcgctatttcgggttgtaagtatatgatgaatctgattttagttgcatggtgtacccatcttatctgaaaataatgaaagatctgtttgtggttgactaattacgtgtgtgtttttttctaatg

SEQ ID NO: 49673 - DNA, 1356 bp, Zea Mays
cccgcgtcacggcgtcaggtcgctcactcccgtcactccttatcccttcccatcgatcccatgccctgttgccgcgcccgcacctccttccccatccgcgcccgccgcggctcctccggcagctccgccacgcgcccaaccgcaacctgcccgcacgggccaccgctgcctggtagtatctatcaaatcagccacctgtcctctttttcttcaaatcaagtccgtttccctttcctttctaccctctccctcgtctccggcgggcggtggcctcacctccctctccccgtcgccctgatggctccctccacagctctcgctccggtggccttccgctccgccttctcgacgccgctcgcgtcgaaacctacccgtaatagaatgaacatagagggcgctttctgtttgccgtgttccacaaggaagagagcaagttatagacctttccgagtgtacagtttatttggagggaagaaggataaagatgagaatggtgatgaggcgccatcgaaagaatttttggaaatatgcaaaatctctatgaaactgttaagaaggcccaaatggttgtccaagttgaggctgtccgggtgcaaaaggagcttgcagcgactgagattgatggttattgtgaaggcgaactaatcaaggttacactttctggaaaccagcaacctattagagttgaaatcacagaagctgcgatggagttgggtgctgaaaaactttccgggttggtcaacgatgcttacaaggatgcacaccaacggagcgtccaggccatgaaagagaggatggctgacttggcgcagagcctgggaatgcctgcgggcctcggcgatggtctcaagtgatgccgcaattcgggaaagctttccaataatcctttttcctcaattttgtatgctagccgtgtgagtagtaagcataacccctccgcgacctctcataagaagtgtacttgtgagcacttgttttctttcagctttagctgccatttgctgttctgcgcacgcagatatttgcacattaacttcacgtctggtctacaaagttgcaagatgcgggccatgatcttttgggcatttttccaacaagttgttgggctggcccagttgtagcccttcgaagatgagacaaccaagcccatatatataacacacaccgaaagccttcagaatctgtcgtgtgtgaccaaggataaatcatggctttggtgaacagtgatttaacagcaaataaaacactaagtgggtgttcggtttgaggaatcactctatccaaaatgtggtggtgtatcatgggtcaattcctcaaatttggtgggatgacctattccttatattagtactaact

SEQ ID NO: 49674 - DNA, 2691 bp, Zea Mays
tgggtattagagaaaatccaaaagagatgctaaaacaacctcaaaatattttttaagaaaaaaggacgataactcctctccaacagacgcctattgttttcccattttttcgcttcccccgcatcgatagcttccctcctgcatatttgcgggaaccaggactctccctaatccattcgcgtgcgtccgtagcagtggtttcccgcgtcttctcgccgtgtgcttcctcactgatatgatatgatcctctccgccttccctgtcctgatatgatatgaacctctgccaactaatataatataggatgtatctgtattttgttttagaaaaccgaatcagaaacataggattgtaggtaacaaaagtctatcagtttagatgttttggagttagcaaagatttgcgtcggcaggcaccgaggattcgtgccgacgtggacgtcgagggcccagcgatgcatcacccactggccactggtggctccgatccttcagcgcgtcgcacaaggccgcgacgtttccctccctttcaccgaccccgcacgacactggcaagtggcatgagcggagccccaccaaacaactgcgacgtgtccgggcacgtgatccctgctgtgcttgcagggcaccattttttcagcgtgattattattgctagtactattaccagcagtacagaaacagctgctggtggctggtggcactggcagtcataaacaagagattagagacggcttcctgcactattacctgtaccacacgtttaacacaataggcagaaaatgataatgggatgacggttcgccgttggcatttgtattcaaggttgacagacacacacaccaggcgcggtatccactggtggtgttggtcttcgtcgccgtcaaggtcgtagcactcgcgtttcacatgacggcctggtgcgaccgcgaccgccttgagacacccgcgttctgtgccatttccgccccttcaccgtaccatttcgtcccgattccgcggataaatgcttgcccctatttgctcagcccgctctcggacgaacccattcacccgtccggccgtccgtgcgcggcgcacccacccggcaccggcaccagcatcaccgcccgcccggcgcccgtcacgctcgagaggaggaggaagaagaagggactgggcgacagcgcgcgatggccgccgtcgtgtgcgtcaccggcgccggcggcttcatcggctcgtggatcgtcaagatcctcctcgcccgcgggtacgccgtccggggcacctcccgccgcgaagctgctgaccccaagaacgcgcacctgtgggcgctcgacggcgcggcggagcgcctcaccatgctgcaggtggacctgctcgaccgcgccagcctccgcgccgccttccgcggctgcgacggcgtcatccacaccgcctcgccgatgcacgacaaccccgaggagatcatcgagccgattatcgccgggacgcggaacgtcgtggaggcggcggcggacgccggcgtgcggcgcctggtgctgtcctccaccatcggcaccatgtacatggacccgcgccgcgaccccgacgccccgctcggcgactccagctggagcgacctcgagtactgcaagagcaccgagaactggtactgctacgcaaagacggtggcggagcagggcgcgtgggaggcggcgcgggcgcgggggctggacctggcggtggtcatcccggtggtggtgctcggcgagctgctgcagcccagtatgaacaccagcaccctgcacatcctcaagtacctcacgggacagacaaaggagtacgtcaacgagtcgcacgcctacgtgcacgtcagggacgccgccgaggcgcacgtcagggtgctggaggcgcccggagccggcggccgccggtacgtctgcgccgagcgcaccctgcaccgcggcgagctctgccgcatcctcgccggactcttcccggagtaccctattccgacaaggtgcaaggatcaggtgaacccactgaagaagggctacaagtttacgaaccaacctctgaaggaccttggcgtcaagttcacgccagtgcatgggtacctgtacgaagcagtgaagtcccttcaagacaaggggttcctcccgaagacatctggcgccaaggtgcctgaacgacgcagctgcctgcctcaaacgacatcacagccaccacccgaaatcgtttcgaaactttgaggtggatctgcacacgtgctcaaactggccatgtgtttttttgtcagaacaagccgttcatttgattggttattaaaagattttgggcagtctgttcttacatagcaaaaatgtcttgtctctgtctatggtgcatcctgttgcttttgcactacaactatacacatccttgtctgggtagtctgttctttacatagcaaaatgcgaagtctgcagggtgatttcagcgatgatggaagcatgcccgcccacctcttgactgcatgcgctggtcagctgcggcttattctacacatcttgcttgtctgtactagcctttgcatcgtgccttcgtattatgcttttctcctttcatagtacttattgacctttgcggccatcatcatcattttcatgataggccaccttgcccaatcttgggtatggacttaaacctatattattcacaatacttagagtaaatattattctattaattt

SEQ ID NO: 49675 - DNA, 1512 bp, Zea Mays
caaggacgagggcctcaacacagagagcttcattaagaaactccaatcaatgatgatggatggtatgatgatctgttgtcacacccggacttaagggataaggccgggtgcgtctcatatgtgcgccaaagaagaacatcctatataatgacaaagtgtatagagataaatgtcacaatatcataaatgtcattattacatagcggaagtcttacaaaaataaatgataataataaagcgaactaagtattattctttggcgccacaaagctcactaggagatgccacctagatcaactcgtactcctcattgtacggctcctcttggaccatttgttcttctcctgtgggggggttacatatcgcaagggtgagctcacaaaagatcatagctcaacaagttgtggagaataatgtgcatgaactcaccaaaggtgggaattcgtgtgaagtgtaaggctgatcaacaagtaagggttaaagctgagcattgcttttaacacgttggtcacgttttattagcagttactaaatgtaaatagattccaaatcagagtaatagtagatcaaaatttattataaatcccaatgcgatgcaaatgacaaattgaatttaattccataaattaatcatgcaagagtcttgagctgctcatgaccgcgacacggctagtataccagttttacactctacagaggttgtaccctgtacccacaagtcgtgtatcccgtctagccaggtttagctagacccttagacactgccgaggtgaatgtctagggatccactacgaggcctttacaaagttccactagcttcagaaaacccgttacagtttctaggaagagcaatgcaggaatcccccgtctgacccccatcgcagcaaaatcaacccgagaacctccctacatgcctactaccttactgccatttccccttttgggtaaggtagtcctccactagctttcctagttagtcagccaagggtatcccattccacccttgtggtggcacgtgtttctcaagttaagctcgatgttccaattaacatagttatcttatcatgaacagaaatagaacagtaataaagaatgatcatgtgtaatagttatctcaacacccaaaaccatatatagcaatagcaaagactacccaaaagttcaggggtaaacaaggtgaaaagataaccagactaggtggcctattgggtcccatcaaaattaagcctatgcatgataaaatgattataaagaacattattgggtaaataaaagtggtcaagggcacaactttccttcaatgagttcctgctcagcaacttctaccttctgaacacctggatcctcgatcattggctcatctactcgccacaatacaaacaaacatggtacaagggagaaattaatatcacaccaaacatgaatacataatacattataataatctacacatcgtaatgagatcgtaggaacaagaatcactaaattcagagttacgtattttaagttatg

SEQ ID NO: 49676 - DNA, 2902 bp, Zea Mays
cccatcgaaggttttccattttctttttttctggtttccttttctcaaattttagaattcaaatttaaactcaaatttggttgggaatttttttattcctaaattaatgtacaattccaagacctcagtatggacaaagctacctacatatataattttctttatcttcatcagtccaataggaatatgatagtttctgaactgtgtggtgaattatgcccaggtgatattattggcagcatcatgagcagcaatgtaagaatcccaccaatcagcatcaggaccattaagatgaccagaagcataaaacaccttctcccggtcagagcattgggtgatattcaatatcttctccactgacttcagccaatcatcagcgcgcagaggatctggagagctggcgaatgtcggtggcttgtgactcatgaactcccggtggttgtcccggggtggaactggtggtggcggtggaggcattggtgcttgttgctgtcgtaccatcctctcttgccttatttcctcatgcatctcttgcctttcctagcgcatctcttgacgttcctgccgcatctgagtttgcatatccgttaaagtatttgccatctattccagcatctgcatctgagctgcaaccactagatctgtcctagccggtggaggattcgaagggtctatttctgcttgctgttgtctaataatcctcccttcctggtattgaccatctggttagaaacacatggtaagaaagaattgtaggcaagaagagtaattacgaggcagaatcgtttggatgttttattagctaagtagattagtgtgtcacttactaaggctaatacattaccttatggtggtacatgctagaatgccctgctatactatttcaatcaatcaaagaagcaaatcaggcatctatcatcagaacaatcatccaaacactttagatagagaaaataattttaattttttgtcttaggtctcctatctttttagagggttataaatgtaggattccaaagtgtgaaatcatccttgtcttagaatagaaaatgtaagaatagtcagagtagaacaacaaaaggtgagacaagatcaagataagtatacacagaatcagagtaaggtaagtatgtaagggttttgtccagttctatctaggtttcatcctacagtcaacatttcctcatataccactcttgtcacacctggatttaagggataaagtcgggtgcgtctcatatgtgcgccaaaaaaagaacatcacatataatgacaaagtgtatagagatgattgtcacaatatcataaatgtcattattacatagcggaagtcttataaaaataaatgataataataaagcgaactaagtattattctttagcgccacaaagctgactaggagacgccacctagatcaactcgtactccttattgtatggctcctcctggaccaccttttcttctcctgtgggggggggggttacatatcgcaaggatgagctcacaaaagatcatagctcaacaagttgtggggaataatgtgcatgaacttaccaaaggtgggagttcatgtgaagtgtaaggctaatcaacaagtaagggttaaagctgataattgcttttaacaggttggtcaagttttattagtagttactaaatgtaagtagattctaaaccagagtaatagtagatcaaaatttataataaatcccaatacgatggaaatgacaaattgaatttaatttcataaattaatcatgcaagagtcttgagctgctcatgaccgcgagcatgactagtataccacttttacactctacagaggttgtaccctgtacccacaagtcatgtatcccgtccagccaaggttagctaaacccttagacactgccgaggtgaatgactagggatccactacgaggcatttacaaagttccactagcttaagaaaacccgctacagtttctagaaaaacaatgcaggaatcccccgtctgactgccatcgcagcaaaatcaacccgagaacctccctatacgcctactcccctactgccctttcccctttcgcgtaaggtagtcctccactagctttcctagttagtcaaccaagggcgtcccattccacccttgtggtggcacatgtttctcaagttaagctcgatgttccaattaacatagttgccttatcatgaacaaaaatagaacaataataaagaatgatcatgtgtaatagttatctcaacacccaaaaccatatatagcaatagcaaaaactacccaaaagttcatgggtaaacaaggtgaaaagataaccagactagggtggcctattgggtcccatcaaaattaagcctatgcatgataaaatgattataaagaacattattgggtaaataaaagtgatcaagagcacaacttgccttcaatgagctcctgctcagcaaacctgctaaacacctagatccttggtcactggctcgtctactcgccataatacaaacaaacatggtacaagggagaaattaacatcacaccaaacatgaatacaaaataaataatagtaatctacgcatcataacgagatcataggaacaagaatctctaaattcagagttatggattttatgttatgattttccaaagtatttatgtgtttggtacaaaattatcaaagtgattaattttaatatggctttcatgctagaacagttttaataagtgataaacaatattaacacaaaattataggaactagaatggatttgaaaggagctaaaatgaatttcctaggatttaaacaagtttctgcaattaattttgtagaaaaaaaatcattttctaaataaatttctctattttattaattgtatgaactgcgcacaacattaccgagaactgca

SEQ ID NO: 49677 - DNA, 565 bp, Zea Mays
atctacgatgctggtatctctccctgacccgactctcttgcgcgcggcggtgaccggtgaaggctccgcacggcggcgagccgccagcaaactacccaactggttggctcgaggtacgcccaacttcaaatccggtgaaaaaggaagcgcgaggtgaaactatccaggggcttaccgacgaccgaggagatggtgggtgagccggcacgacccgcagtggccggacacggagatcccacgacggcggcgagttcccgaccagccgagcacccaccatacacggcaacacctcgcgcgagacccttcaacgcgaccaaagctcctgaattcgcccccgagacttgagacgtggcgatatctccacccagctactctctccggacttgctgtcaatggctatttctggtggcggcgctttcctttttcttgtggcggcagaaggaggagagggcaaaggagaaagcaagagggtccttagcccgcttttgaagcaaaggtgaggtgcagtcgtggttagcggaggtgtcgcgtgctcaaccacccgcccgagatgcgtggcgaggaa

SEQ ID NO: 49678 - DNA, 963 bp, Zea Mays
tttgttccttctttttccaccaaaaaaaaacgaggaagttgtgggctagcgtgtccaatgaagcttgagtggccgagcgcggggcggagagggagatggctgggttggagtgggaggagatgaggcgccggcggatgaggaagcgatgggaagacgagttatacgggaatgaagaagaaagaaataaaaagaacgaatcattttttaaactagtggcgctcggtcctcaacagaaattcatggcgaaaatctcgctggttctgttgggattccgccaaccggagcgcctctgggttctctggctataaaaccgggcgccgagcacctttccccccacacattccctagaaccgtgagcaagaatcccggcgccatgtgagagcagaaggatgactgcgggtgggcggaccgacgtgatgtattccagtcacgcggtcacgccatcgttcgggccccaacaacaggagacataggctttaagggatcgagggaatcgtatgcatggacttgttgcgcttgcggagacaacggagccacaaggaatttctcgccggcaatgtgagccaccacagtgttgctcggtggcggggactgcgcgcttcgtatcacgagctccccgaagaagtggacatcgaagagaagtatgctccggtacctgaatacccattggtggggttctatctaactggttatctggtagaaggattttttggatcttctctgcaacaaaggaaaggttctgatgtctttggcttcattagttacttcatgtggaggtcttcaagcttagtttgcctatgtgtattccttatggaaaggcttcgccttttcaagtattgtaattaagttatgcactttaaagactatcaggacttgtaaatattataactctttctagcatataaaacttgagttttggaaatgtaatgaatgttttgtaagtcttccgctttgtctccgaag

SEQ ID NO: 49679 - DNA, 595 bp, Zea Mays
ctcatctcgctgctctctcatccccttcacacaaccgtcgcccagttgtcaaacctcgtcgagctcctcacgcccaggttattctccaactcgcacctgctcgcccatatgtgcgctacccctgcatcttcgccgtgtccgtggtgttggcgagctcgcccatgcgctcagatactccaccagccgctcccatccatggacgtctctgcgcctccatggccctacgccacgcctccctctgcatctcgactccagaccgtgcctcttctccaatcaccatggccgtggtcgagcttctgctccacccagccaacgattcacttcatcgctcgcccctcgccatttcaactcggcagcgttgttctcatgtgtatgtggtgatggaagtgaatagtgatggtgttccagaggttcgatggcgtgggaggcaaagtctctgcgcgacgcttgcttggtgttcgaggatatgcttgaaccgtggatgtttccggtggatgcagctcatccttgcgccattgatgcgtccagctccacaacatccgacgcgctcgatcctgtagttagcacggtcaaacttcgaagattttcgatggtg

SEQ ID NO: 49680 - DNA, 2194 bp, Zea Mays
gtctgaactgtagccgccgccctgctgctttgggttcttctccctcccccaccatgccttcaccagtaccctcctcgccttctctctccctctctctcctatcagctgttgccttcccgagttttcttttgcccttttccccttttccggttatcgtgagtgcgtgacgaaactgtccctagtggtcagcaaaaaatcctttcccttcgtcgctccaccaccaccaccatcttcgctttccttctctcatctcccaactctttccctctcaaacacacacttccaaacgagccatccgctaacctcgcccctccatttttttctctctcaatgctaagtttgcttgacgcggacgtcaagtcccatctcacgtttcgctttacagatccgcattcacattcctctctcttttttctattaccttcggaatttccaaattttgcgttggattagacatttgataagtacttacaaaggaaaataggttcttcgctttttttttccttccttggtgtatgtgcctgtgtttttgtttaattcatttatgcgccggtggttgactcttagacgtggggttaatttagggcaagtagtggaagccggtgggtgcggccggagctgggccttccatggcttccgtgccgccagagctgcccctgggcttgccccacggagcgctcgttttcccgggggggtagtccggtcattttcggccttccttttatcccccggcgcaattgctcgtgtggtgggagcgtggagcctgtgggccccgagtactcgggaggtggagagtggagacggagtcaaatgcgggagttaaaacgcggcgcgacggggtgggtggggacgggggagggacggcacgcgcgacacgtgacgtggggcgcccaccggcctcgagcgcgacgagccttaggtgctgccctgcgccgccgcgtctgtgtgggcgtcggtggcggctatggccgcggcggggcagcggagttcgctaggttcttttgcgtggcgtggacatctggccccacctgtcgtatggtcgtgctagagggtggtccccttcctcgtttggatgaaaccgttcaagttttctctcgctgtaggagaggaggatgggtttgtcgtgcgtgtctcatcatatgggttccccctattggttggtggatggggatattcattctagcggtggatggggagccattccttaagcatgtctatatgtcgctgcttgtgttctgtgttgttttatgcgatagctgctgcctattctgaatccgtgatctgcggtaccctgttcatgccagcatcgaccatcgagtattcgagtgtgggggccaacgagcggccgcatgctacctttccgaccccgcttccacgccccaccggtcagcgaccacagaagaaattgaggctaccggagatccagcagctgcttcagtctctcgccgtggagaacgagagcctccgcgaggagatgcgggatttacagagagcttgcaaggcgctgtcgaaagaaaacgacaagcttgagacaaggttagggcaatcaatctctcagaatgaagtcactttaaaggagcagaaaggaaagcaacaacttgatcagcagtcggttatgcagtccgcacgagacagcttcgtgctaccagatctcaatctccccccacaggactctgccgatgtttcaacagttcattgatcactccagattgctgcgactttgttaaccgaataacaagtgtacatagaggaagcagggtaccaatctacggtggcggcaccaccacgtcatccttctgagaatgacacgcatttgataagttgttactagatcagagttttactaccactatagccgcaagttacaagccacatttgtagctgagggaagtctagttttaacccacctgacattgttttgcctagtgcgtttgcatatggtagagctgaagtcttcttcagctcaaactgatctccacgctgtagtggacttagatgaatttgttcatgttatttcattcaattaggtgaaatgtcacttgtgaagatctgacatttatgagaaaactgttacttatttctgtacggttttatggatcttttgttacttcagttgtaattgtatcatgccttttcgctggttggtctaccaatttctgtatcactaataagttgctaatggttattgcctcta

SEQ ID NO: 49681 - DNA, 1006 bp, Zea Mays
aggaagtctgaccaggtcggagtgcccacccattcacagggaaaagggctttgtttagtggtggttcaactaagcctgcaccggttttagaataaagcagctcagcagctgctatatatctgtctgcctttgaaagggtgaggcggggcggggaggagcgccgagcgtgaacacaaagtggaatcttaaggacaaagccacaaaaagatctaccaggatgaggctaccggagatccagcagctgcttcagtctctcgccgtggagaacgagagcctccgcgaggagatgcgggatttacagagagcttgcaaggcgctgtcgaaagaaaacgacaagcttgagacaaggttagggcaatcaatctctcagaatgaagtcactttaaaggagcagaaaggaaagcaacaacttgatcagcagtcggttatgcagtccgcacgagacagcttcgtgctaccagatctcaatctccccccacaggactctgccgatgtttcaacagttcattgatcactccagattgctgcgactttgttaaccgaataacaagtgtacatagaggaagcagggtaccaatctacggtggcggcaccaccacgtcatccttctgagaatgacacgcatttgataagttgttactagatcagagttttactaccactatagccgcaagttacaagccacatttgtagctgagggaagtctagttttaacccacctgacattgttttgcctagtgcgtttgcatatggtagagctgaagtcttcttcagctcaaactgatctccacgctgtagtggacttagatgaatttgttcatgttatttcattcaattaggtgaaatgtcacttgtgaagatctgacatttatgagaaaactgttacttatttctgtacggttttatggatcttttgttacttcagttgtaattgtatcatgccttttcgctggttggtctaccaatttctgtatcactaataagttgctaatggttattgcctcta

SEQ ID NO: 49682 - DNA, 380 bp, Zea Mays
cgggcagccatctcgggtggattgttgcgccgccctcggaccgcctcgtcctggctacaaaggcggaccgaccctctcctgattcctctcccataactcatccgatcgccacgttcaaccaagagagagtgtgaaattcgtcggtagcagagaggagggaaggagaccgccgcgctcgatttcccttgtcgccgacggtcgatacgcgggaggggtctcggaggacttgtcttcgtgcgaggatcgcgcacactcgacttctcaaacgcggaaggcactggacaccggagaatcgttcgccggagcaccaaggtccgccgcggacttcgttttcccgcgggcagtgctctgcatcacgctgtctttgacgagcaagccac

SEQ ID NO: 49683 - DNA, 1270 bp, Zea Mays
ggaacactttagattgaacactggtcgaggcgtcaatggatcctttcctttagctctctagtggacaactgcagaagttcgttgtcactgaaggagatactacggaacaaaatcatctcagaggtaaagcagtcagtggttctacaagaagatggatctgagaggatgaaattaaaagacctatctgatgcaatttttcaagatattgggagcaaaataatgggtcaaatctcagatgaggtatggaatgtcatccagtcaaatgaaactgatatacagggaactgtgaaagccgtctacaataggatactgaaccctgaaaaggtctctgagccttctcccaagaagctgaagcagagaggcaaagaggaacaagttctgcccacaaagacagcaactagcgttgcagtcgaggcggaagatgatgatccagaggagccaccaggatttggtttcaacaatacacagcgtaatgatattggagcaacaaagccacagatgagtttggaaaatggtaatgaagggaagccaaatggaggcgagccagctactatcagcaatccaggggatgaggaggaagatcctgaagtgccccctggatttggttaatggaattcactaacttcagtggaatgcagctgtttctttcttagcaatatatacaagaagggaaatgtttaatcttctgttgacaggaagagtaatgcaagctcatgtctgcgacagttgaaacccgtgtaatgatggttacttctatccagccccaggataccctttctgtgatagtggcaaatatgttgggtgctaacagtctgacaacgagttccaggcacgaagttttcgaagaagctggacatattatgagaggtcctctaaattatggagatgtttagttctttattccaagaggcacgtatgaaaaacatatgctatataaaatcccttgtgagttgggagttgggacagtttcttaccaagggtctgtttggatggaggtcctccaggctccagtgcttttgcaaagctcttgagatgcacagctctcccagtatttttttgcacgtttatttatatacgtaaaataagtatttatacgacaagttttcttgagttgggacagtttcttaccaagggtctggacatatttgcatgtttttgtatttattcatagaccttacgtggactggaacatttatcaccaaaccgtggtcggtctcatttttttttctggactgcgtgactcttgctattttttaaggctgacttcctt

SEQ ID NO: 49684 - DNA, 1864 bp, Zea Mays
gctacgcccgtcgccaggctcccgtctccatgggtctcctctcaaacagttcaaccctcagattcgttccttctctggttgtggatgctaaagttattcatctggactataataatatccgcatatttttgtcacttaaagatgtaaaggtgatggtggagacaacacttggcaaagaagagttgaaagaggcagttttgatgtgcactaataggaaagctgccataaagaaaatagatacaaaggcatctcaagaattccttaatgaacataagcggctgtgcgttgagcagaggtccctcgccacactccgcgtcctgacccaattccgcgagggcgcgagggcgcccaatccccccgggcccatggcgtcgtcagagatcgaggtggtcgaggacgccacccccgccgcaaccagtggtggagctggacgggccgtcgcagaggtggcgaggcaggagggggagggggaggcgctcaaggacgatgtgtacacgggcgcggcgtatggggacctcgagaagctgcaccgcctggtcgagcgggagggccgctccgttacggtgcaagacgcgctcgggtaccacgcgctgcagtgggccgctctcaacaaccgcgtcgccactgcccagtacattctcgagcatggtgccaatgtaaatgctatagaccacacaggccaaacagcacttcactggagtgctgtgcgtggccatgttcaagttgcagaattacttttgaaggaaggagctaaagtggatgccactgatttatatggatatcagaccacacatgttgctgcacagtatggccagacaacatttctttgtcacattgttgccaaatggaatgctgatcatgatgttcctgataacgatggaagaagccctctccactgggctgcatacaagggatttgcagataccatgcgtcttctcttgtttttaggtgcttatagcacgcggcaagataaagaaggctgtacccctttacattgggctgctattcgggggaatttggagtcatgcactgtgctagttcaggctggcaaaaaggaggatcttatggttcaagacaatactggcttgactccagcccaacttgctgctgataagaatcatcgacaagttgcattttttctagggaatgctagaagtatacatgaaaggggatgcgtcgggaacagttattttgtgaaactatcaaaaatcgggcttgctcctcttctttggtgtatcattatagccttaatggttgtatatatacattcaattatcttagaagactataacacaaagatgaccgtaatttttgggttatttgcatggttgggagttttccttgcaagtgtcggactggttatgttttatagatgcagcaggaaagatcctggttacatcaacaagaatataagagattcacaaaatcaaagagacgatgaacctttgttgaagatgggtttggacagtcctgaacttcttgatggtaattggtctcgcctatgtataacatgcaaaattgtcaggcctgtacgctcaaaacattgctctacatgcgaccgctgtgttgagcaattcgatcatcactgcccttgggtatcaaattgcattggaaagcggaacaaatgggacttctttatgttccttatcctagaagtttctgcaatgattattactggtgtaatggccatcataagaagtgtaggagacccagcttccccagcatcatttggtggatggcttggctatacagctataaaccattcttgggtggtgtcttttgtcataatggacctcctccttttccttggtgttataactctaacagtaattcaagcatcacagccacgcgcgattaatcggag

SEQ ID NO: 49685 - DNA, 2901 bp, Zea Mays
gctacgcccgtcgccaggctcccgtctccatgggtctcctctcaaacagttcaaccctcagattcgttccttctctggttgtggatgctaaagttattcatctggactataataatatccgcatatttttgtcacttaaagatgtaaaggtgatggtggagacaacacttggcaaagaagagttgaaagaggcagttttgatgtgcactaataggaaagctgccataaagaaaatagatacaaaggcatctcaagaattccttaatgaacataagcggctgtgcgttgagcagaggtccctcgccacactccgcgtcctgacccaattccgcgagggcgcgagggcgcccaatccccccgggcccatggcgtcgtcagagatcgaggtggtcgaggacgccacccccgccgcaaccagtggtggagctggacgggccgtcgcagaggtggcgaggcaggagggggagggggaggcgctcaaggacgatgtgtacacgggcgcggcgtatggggacctcgagaagctgcaccgcctggtcgagcgggagggccgctccgttacggtgcaagacgcgctcgggtaccacgcgctgcagtgggccgctctcaacaaccgcgtcgccactgcccagtacattctcgagcatggtgccaatgtaaatgctatagaccacacaggccaaacagcacttcactggagtgctgtgcgtggccatgttcaagttgcagaattacttttgaaggaaggagctaaagtggatgccactgatttatatggatatcagaccacacatgttgctgcacagtatggccagacaacatttctttgtcacattgttgccaaatggaatgctgatcatgatgttcctgataacgatggaagaagccctctccactgggctgcatacaagggatttgcagataccatgcgtcttctcttgtttttaggtgcttatagcacgcggcaagataaagaagcttgttgttcatttccattgtaagtgctttccttaggctgtacccctttacattgggctgctattcgggggaatttggagtcatgcactgtgctagttcaggctggcaaaaaggaggatcttatggttcaagacaatactggcttgactccagcccaacttgctgctgataagaatcatcgacaagttgcattttttctagggaatgctagaagtatacatgaaaggggatgcgtcgggaacagttattttgtgaaactatcaaaaatcgggcttgctcctcttctttggtgtatcattatagccttaatggttgtatatatacattcaattatcttagaagactataacacaaagatgaccgtaatttttgggttatttgcatggttgggagttttccttgcaagtgtcggactggttatgttttatagatgcagcaggaaagatcctggttacatcaacaagaatataagagattcacaaaatcaaagagacgatgaacctttgttgaagatgggtttggacagtcctgaacttcttgatggtaattggtctcgcctatgtataacatgcaaaattgtcaggcctgtacgctcaaaacattgctctacatgcgaccgctgtgttgagcaattcgatcatcactgcccttgggtatcaaattgcattggaaagcggaacaaatgggacttctttatgttccttatcctagaagtttctgcaatgattattactggtgtaatggccatcataagaagtgtaggagacccagcttccccagcatcatttggtggatggcttggctatacagctataaaccattcttgggtggtgtcttttgtcataatggacctcctccttttccttggtgttataactctaacagtaattcaagcatcacagatatccaggaacattacaacaaatgagatggcaaataccattaggtacagttacctcaggggaccaagtggcagattcagaaatccatatgaccatgggctgcgtgagaactgttctgacttcttgctgaaggggtacaatgaggatattgagagcactgtacagacattgcaatctgacgaggaaatgggaccaattcagatgagcagcccagtctcacagaatggcgagagcattccaccacatgtgaatggcactgaccatggttccaccatttcacatgccaactcaaaatcccatcgccaaagtccatccaattgtttgggcctagggctgggcactgggcataacaacccctctagccgttatgcgcgatctcttcttcccttatgatttgtcttgaggatatccagatgtgctcctttatatttgtgcatacttgttggacaaccagtcaaccacagctttgtttgggctatttcttcatgggtgctcggtgatttctctctggttgcacaaacgtgaaggcttcagaaacatcttcagcttactgcacctatgacacacgatagaaatagtgtcaatgtcaaggttttgttcttgttttcttggcaaaaggcaccaaggctctatgcctactatccaatatgtatgtacatggatggggctagtagttcatgcactaacccgttttgacttttgaggcatagttgtacgcttagggctgataacggcctataatttttgcactataagatttaagtatcaaatcgggttaggatcggactctatttctagtcatttttgaattataatttatttagggcattgatattttttgaagaaccatttggatcacgatccattaccacccatatgtacgctacgagagttgtaaaatgtacagtaacagaactacatggcatgtttgttcctgcatacgtatttatagaaaaaaatgatttgtctcctcctgtgagttatccttttaattgtactaattgattgggtaagattgttg

SEQ ID NO: 49686 - DNA, 2862 bp, Zea Mays
gctacgcccgtcgccaggctcccgtctccatgggtctcctctcaaacagttcaaccctcagattcgttccttctctggttgtggatgctaaagttattcatctggactataataatatccgcatatttttgtcacttaaagatgtaaaggtgatggtggagacaacacttggcaaagaagagttgaaagaggcagttttgatgtgcactaataggaaagctgccataaagaaaatagatacaaaggcatctcaagaattccttaatgaacataagcggctgtgcgttgagcagaggtccctcgccacactccgcgtcctgacccaattccgcgagggcgcgagggcgcccaatccccccgggcccatggcgtcgtcagagatcgaggtggtcgaggacgccacccccgccgcaaccagtggtggagctggacgggccgtcgcagaggtggcgaggcaggagggggagggggaggcgctcaaggacgatgtgtacacgggcgcggcgtatggggacctcgagaagctgcaccgcctggtcgagcgggagggccgctccgttacggtgcaagacgcgctcgggtaccacgcgctgcagtgggccgctctcaacaaccgcgtcgccactgcccagtacattctcgagcatggtgccaatgtaaatgctatagaccacacaggccaaacagcacttcactggagtgctgtgcgtggccatgttcaagttgcagaattacttttgaaggaaggagctaaagtggatgccactgatttatatggatatcagaccacacatgttgctgcacagtatggccagacaacatttctttgtcacattgttgccaaatggaatgctgatcatgatgttcctgataacgatggaagaagccctctccactgggctgcatacaagggatttgcagataccatgcgtcttctcttgtttttaggtgcttatagcacgcggcaagataaagaaggctgtacccctttacattgggctgctattcgggggaatttggagtcatgcactgtgctagttcaggctggcaaaaaggaggatcttatggttcaagacaatactggcttgactccagcccaacttgctgctgataagaatcatcgacaagttgcattttttctagggaatgctagaagtatacatgaaaggggatgcgtcgggaacagttattttgtgaaactatcaaaaatcgggcttgctcctcttctttggtgtatcattatagccttaatggttgtatatatacattcaattatcttagactataacacaaagatgaccgtaatttttgggttatttgcatggttgggagttttccttgcaagtgtcggactggttatgttttatagatgcagcaggaaagatcctggttacatcaacaagaatataagagattcacaaaatcaaagagacgatgaacctttgttgaagatgggtttggacagtcctgaacttcttgatggtaattggtctcgcctatgtataacatgcaaaattgtcaggcctgtacgctcaaaacattgctctacatgcgaccgctgtgttgagcaattcgatcatcactgcccttgggtatcaaattgcattggaaagcggaacaaatgggacttctttatgttccttatcctagaagtttctgcaatgattattactggtgtaatggccatcataagaagtgtaggagacccagcttccccagcatcatttggtggatggcttggctatacagctataaaccattcttgggtggtgtcttttgtcataatggacctcctccttttccttggtgttataactctaacagtaattcaagcatcacagatatccaggaacattacaacaaatgagatggcaaataccattaggtacagttacctcaggggaccaagtggcagattcagaaatccatatgaccatgggctgcgtgagaactgttctgacttcttgctgaaggggtacaatgaggatattgagagcactgtacagacattgcaatctgacgaggaaatgggaccaattcagatgagcagcccagtctcacagaatggcgagagcattccaccacatgtgaatggcactgaccatggttccaccatttcacatgccaactcaaaatcccatcgccaaagtccatccaattgtttgggcctagggctgggcactgggcataacaacccctctagccgttatgcgcgatctcttcttcccttatgatttgtcttgaggatatccagatgtgctcctttatatttgtgcatacttgttggacaaccagtcaaccacagctttgtttgggctatttcttcatgggtgctcggtgatttctctctggttgcacaaacgtgaaggcttcagaaacatcttcagcttactgcacctatgacacacgatagaaatagtgtcaatgtcaaggttttgttcttgttttcttggcaaaaggcaccaaggctctatgcctactatccaatatgtatgtacatggatggggctagtagttcatgcactaacccgttttgacttttgaggcatagttgtacgcttagggctgataacggcctataatttttgcactataagatttaagtatcaaatcgggttaggatcggactctatttctagtcatttttgaattataatttatttagggcattgatattttttgaagaaccatttggatcacgatccattaccacccatatgtacgctacgagagttgtaaaatgtacagtaacagaactacatggcatgtttgttcctgcatacgtatttatagaaaaaaatgatttgtctcctcctgtgagttatccttttaattgtactaattgattgggtaagattgttg

SEQ ID NO: 49687 - DNA, 2865 bp, Zea Mays
gctacgcccgtcgccaggctcccgtctccatgggtctcctctcaaacagttcaaccctcagattcgttccttctctggttgtggatgctaaagttattcatctggactataataatatccgcatatttttgtcacttaaagatgtaaaggtgatggtggagacaacacttggcaaagaagagttgaaagaggcagttttgatgtgcactaataggaaagctgccataaagaaaatagatacaaaggcatctcaagaattccttaatgaacataagcggctgtgcgttgagcagaggtccctcgccacactccgcgtcctgacccaattccgcgagggcgcgagggcgcccaatccccccgggcccatggcgtcgtcagagatcgaggtggtcgaggacgccacccccgccgcaaccagtggtggagctggacgggccgtcgcagaggtggcgaggcaggagggggagggggaggcgctcaaggacgatgtgtacacgggcgcggcgtatggggacctcgagaagctgcaccgcctggtcgagcgggagggccgctccgttacggtgcaagacgcgctcgggtaccacgcgctgcagtgggccgctctcaacaaccgcgtcgccactgcccagtacattctcgagcatggtgccaatgtaaatgctatagaccacacaggccaaacagcacttcactggagtgctgtgcgtggccatgttcaagttgcagaattacttttgaaggaaggagctaaagtggatgccactgatttatatggatatcagaccacacatgttgctgcacagtatggccagacaacatttctttgtcacattgttgccaaatggaatgctgatcatgatgttcctgataacgatggaagaagccctctccactgggctgcatacaagggatttgcagataccatgcgtcttctcttgtttttaggtgcttatagcacgcggcaagataaagaaggctgtacccctttacattgggctgctattcgggggaatttggagtcatgcactgtgctagttcaggctggcaaaaaggaggatcttatggttcaagacaatactggcttgactccagcccaacttgctgctgataagaatcatcgacaagttgcattttttctagggaatgctagaagtatacatgaaaggggatgcgtcgggaacagttattttgtgaaactatcaaaaatcgggcttgctcctcttctttggtgtatcattatagccttaatggttgtatatatacattcaattatcttagaagactataacacaaagatgaccgtaatttttgggttatttgcatggttgggagttttccttgcaagtgtcggactggttatgttttatagatgcagcaggaaagatcctggttacatcaacaagaatataagagattcacaaaatcaaagagacgatgaacctttgttgaagatgggtttggacagtcctgaacttcttgatggtaattggtctcgcctatgtataacatgcaaaattgtcaggcctgtacgctcaaaacattgctctacatgcgaccgctgtgttgagcaattcgatcatcactgcccttgggtatcaaattgcattggaaagcggaacaaatgggacttctttatgttccttatcctagaagtttctgcaatgattattactggtgtaatggccatcataagaagtgtaggagacccagcttccccagcatcatttggtggatggcttggctatacagctataaaccattcttgggtggtgtcttttgtcataatggacctcctccttttccttggtgttataactctaacagtaattcaagcatcacagatatccaggaacattacaacaaatgagatggcaaataccattaggtacagttacctcaggggaccaagtggcagattcagaaatccatatgaccatgggctgcgtgagaactgttctgacttcttgctgaaggggtacaatgaggatattgagagcactgtacagacattgcaatctgacgaggaaatgggaccaattcagatgagcagcccagtctcacagaatggcgagagcattccaccacatgtgaatggcactgaccatggttccaccatttcacatgccaactcaaaatcccatcgccaaagtccatccaattgtttgggcctagggctgggcactgggcataacaacccctctagccgttatgcgcgatctcttcttcccttatgatttgtcttgaggatatccagatgtgctcctttatatttgtgcatacttgttggacaaccagtcaaccacagctttgtttgggctatttcttcatgggtgctcggtgatttctctctggttgcacaaacgtgaaggcttcagaaacatcttcagcttactgcacctatgacacacgatagaaatagtgtcaatgtcaaggttttgttcttgttttcttggcaaaaggcaccaaggctctatgcctactatccaatatgtatgtacatggatggggctagtagttcatgcactaacccgttttgacttttgaggcatagttgtacgcttagggctgataacggcctataatttttgcactataagatttaagtatcaaatcgggttaggatcggactctatttctagtcatttttgaattataatttatttagggcattgatattttttgaagaaccatttggatcacgatccattaccacccatatgtacgctacgagagttgtaaaatgtacagtaacagaactacatggcatgtttgttcctgcatacgtatttatagaaaaaaatgatttgtctcctcctgtgagttatccttttaattgtactaattgattgggtaagattgttg

SEQ ID NO: 49688 - DNA, 1773 bp, Zea Mays
atggcggtggagagaaagcactgggtatggtgtgcggtagtgggggaaattggtgtgggtgaagtggtgtgtgggaatggtggtaatgatgaaatgggagatggtgaatgtggtaacggtagcaggtgcagtggaagtgaggtggtggtgtgctggtgcggatatggtggtaggtggtggtgggaggtggccatcggccgctatcatagccggtggcagtccgccatatccaggcatgccgtaggggcagtctggtggcggcgccatggccgatgttctaggggtggattccaccacggcaatgcgggaggacatggaggccatctgcgtggcgaagagccccagttggcgctggacttcggcaagggcggtgatcctggttacatcaacaagaatataagagattcacaaaatcaaagagacgatgaacctttgttgaagatgggtttggacagtcctgaacttcttgatggtaattggtctcgcctatgtataacatgcaaaattgtcaggcctgtacgctcaaaacattgctctacatgcgaccgctgtgttgagcaattcgatcatcactgcccttgggtatcaaattgcattggaaaggaagtgtaggagacccagcttccccagcatcatttggtggatggcttggctatacagctataaaccattcttgggtggtgtcttttgtcataatggacctcctccttttccttggtgttataactctaacagtaattcaagcatcacagatatccaggaacattacaacaaatgagatggcaaataccattaggtacagttacctcaggggaccaagtggcagattcagaaatccatatgaccatgggctgcgtgagaactgttctgacttcttgctgaaggggtacaatgaggatattgagagcactgtacagacattgcaatctgacgaggaaatgggaccaattcagatgagcagcccagtctcacagaatggcgagagcattccaccacatgtgaatggcactgaccatggttccaccatttcacatgccaactcaaaatcccatcgccaaagtccatccaattgtttgggcctagggctgggcactgggcataacaacccctctagccgttatgcgcgatctcttcttcccttatgatttgtcttgaggatatccagatgtgctcctttatatttgtgcatacttgttggacaaccagtcaaccacagctttgtttgggctatttcttcatgggtgctcggtgatttctctctggttgcacaaacgtgaaggcttcagaaacatcttcagcttactgcacctatgacacacgatagaaatagtgtcaatgtcaaggttttgttcttgttttcttggcaaaaggcaccaaggctctatgcctactatccaatatgtatgtacatggatggggctagtagttcatgcactaacccgttttgacttttgaggcatagttgtacgcttagggctgataacggcctataatttttgcactataagatttaagtatcaaatcgggttaggatcggactctatttctagtcatttttgaattataatttatttagggcattgatattttttgaagaaccatttggatcacgatccattaccacccatatgtacgctacgagagttgtaaaatgtacagtaacagaactacatggcatgtttgttcctgcatacgtatttatagaaaaaaatgatttgtctcctcctgtgagttatccttttaattgtactaattgattgggtaagattgttg

SEQ ID NO: 49689 - DNA, 1042 bp, Zea Mays
gcatcaacaccaatatgtttaatatccaggaacattacaacaaatgagatggcaaataccattaggtacagttacctcaggggaccaagtggcagattcagaaatccatatgaccatgggctgcgtgagaactgttctgacttcttgctgaaggggtacaatgaggatattgagagcactgtacagacattgcaatctgacgaggaaatgggaccaattcagatgagcagcccagtctcacagaatggcgagagcattccaccacatgtgaatggcactgaccatggttccaccatttcacatgccaactcaaaatcccatcgccaaagtccatccaattgtttgggcctagggctgggcactgggcataacaacccctctagccgttatgcgcgatctcttcttcccttatgatttgtcttgaggatatccagatgtgctcctttatatttgtgcatacttgttggacaaccagtcaaccacagctttgtttgggctatttcttcatgggtgctcggtgatttctctctggttgcacaaacgtgaaggcttcagaaacatcttcagcttactgcacctatgacacacgatagaaatagtgtcaatgtcaaggttttgttcttgttttcttggcaaaaggcaccaaggctctatgcctactatccaatatgtatgtacatggatggggctagtagttcatgcactaacccgttttgacttttgaggcatagttgtacgcttagggctgataacggcctataatttttgcactataagatttaagtatcaaatcgggttaggatcggactctatttctagtcatttttgaattataatttatttagggcattgatattttttgaagaaccatttggatcacgatccattaccacccatatgtacgctacgagagttgtaaaatgtacagtaacagaactacatggcatgtttgttcctgcatacgtatttatagaaaaaaatgatttgtctcctcctgtgagttatccttttaattgtactaattgattgggtaagattgttg

SEQ ID NO: 49690 - DNA, 1081 bp, Zea Mays
aaagtatcaccttgttgagcttctatctgtttgtggaagatccactgcatctgatatcagatatccaggaacattacaacaaatgagatggcaaataccattaggtacagttacctcaggggaccaagtggcagattcagaaatccatatgaccatgggctgcgtgagaactgttctgacttcttgctgaaggggtacaatgaggatattgagagcactgtacagacattgcaatctgacgaggaaatgggaccaattcagatgagcagcccagtctcacagaatggcgagagcattccaccacatgtgaatggcactgaccatggttccaccatttcacatgccaactcaaaatcccatcgccaaagtccatccaattgtttgggcctagggctgggcactgggcataacaacccctctagccgttatgcgcgatctcttcttcccttatgatttgtcttgaggatatccagatgtgctcctttatatttgtgcatacttgttggacaaccagtcaaccacagctttgtttgggctatttcttcatgggtgctcggtgatttctctctggttgcacaaacgtgaaggcttcagaaacatcttcagcttactgcacctatgacacacgatagaaatagtgtcaatgtcaaggttttgttcttgttttcttggcaaaaggcaccaaggctctatgcctactatccaatatgtatgtacatggatggggctagtagttcatgcactaacccgttttgacttttgaggcatagttgtacgcttagggctgataacggcctataatttttgcactataagatttaagtatcaaatcgggttaggatcggactctatttctagtcatttttgaattataatttatttagggcattgatattttttgaagaaccatttggatcacgatccattaccacccatatgtacgctacgagagttgtaaaatgtacagtaacagaactacatggcatgtttgttcctgcatacgtatttatagaaaaaaatgatttgtctcctcctgtgagttatccttttaattgtactaattgattgggtaagattgttg

SEQ ID NO: 49691 - DNA, 1301 bp, Zea Mays
cacccctcctccctccccatccttcataagctctcatacgtctctctctctctcccttcttcaaaacaccccaccccatccaaaacctagaacacacacaacaccagagggctttacaaccgcgcacatgatcatggtaaggactctaaccttcatgttttcatgtgaattctcgtatgaaatcgccatttattgagcaaaaaaaaatatatggaattgggcaacaccagcaggcaatgtggaagccaggatggctagaggcccttgacacacagaagttcttcgtagcatgctctttccatgagcatgccaagaagaacgagaagaacatctgttgccttgactgctgcactagcatctgcccacactgtgtggcagcacaccgtgcacacaggctcctgcaggtgcggcgatacgtctaccatgacgttgtccggctggaggacctggagaagcttattgattgctctagtgttcaggtatatcaattatgcacagtgcatgcatgtgactctggtgttgttctgaggttcaagatgcaagaaggcttataattctgtatcaacgtggtgcagtcttatactattaacagctctaaggttgttttcctgaagaagagaccacagaataggcaattcaagggttcagggaatatctgcacctcctgcgacaggagccttcaagaaccgtatttccactgctctctggattgcaagagtatatactacgacagaagaaaaaattgtcagcatatttgcgcccatgcaagaccttgcagcttggccctgatttcttcattcctcatgatgctgatgacgacacaactcactcaacccttgttgatgttgatgagcccatgggatcatcggactcggagaatttgagtgtgccgtgcacaaattttgttcggaaaaaacggagtggaccatatatttgtgcacggtctgcaaacagagtgtctgaagaagacatggccacaaatatgagcagaaggaaaggggttcctcagagatcgcctttgtgctaataaattcaatagttaattattttcccttttctttacttctttcatgttctttatctcttggactaaactggtgcaacaatgatagaattttgtctcagtactaccatgtgattaaaatacatcactagaggcaattgtactcaattcttcaagttggtgcaccagtttatatatatgtatgctttaacatagttcatgttatccccttttcgaagttctttaagtatgctgttatttgctcagaaaactaaatttgtccatagtttttagtagg

SEQ ID NO: 49692 - DNA, 1819 bp, Zea Mays
ggaccaagaaacagttttacacaaagacccctcctcctcggtgctctcgagtctcgagagtcgagactcaggggacctgatttcctcgtccggccatggcgaccggtggcaagtccgctgcccctcagccacctcccgccgcgtcctcctcctccgaacgcgcgctggagtcagtccacttctcttccggaaaccctcgcatcgaggagacccgcggcgtcgtcgtcctccaccccgacccgcccgcggccgcctcctggtctcatgtcccgttggggaggaagccgcgggtgtgcgtgctcgccgtgcccaaccacatgacctacgccgacttctgccgtttctgcggcgccttcgtccctcacacactcgagatgcgcatcgtcagaactgatggagcagaggaccagtacagcgttcttataaattttgacactcagagctccacagacagcttctataagcacttcaacgggaagcagttctcttcgctggaggggggtgtctgccatgtccgttttgtggaagaggtgcactacactgaattgattgagcatgcacatacctcagttacaaacttggctgagcaacctacatgcccaaacgacttgaccaagatcctggaggtattctcacaacaatctgcaaccattctttccactgctcgtgcatatcaaaatggacagactcctcatgcccggtctgtagatattgtcagcagcaaccagagaaatccatgtgttctatttgcggaacttcggagaatctttggatatgtctaatctgtggccatgttggctgtggaaggtacaagggtggacatgctattgaacactggaaggaaactcaacattgttattcacttgagttagagacacaaaaagtgtgggactatgctggggacaactatgtacatcggcttattcagtcaaaaacagatggaaagctagttgagtacaatttccatggtgatcacacagcagagagcacgtgttcactatgcagtggtgatgccgcaatggatgaagctctactgaacagtaaatttgaagctgtaatgtgtttaaattgttgaagagtacaatgatctcgtcacatttcaacttgaaaagcaaagaaattactatgagtcacttctactagaagtcaaggaggaaactgagaaagaaatttctgctgctactgagaaagccatgagcacaaaactccaaaagttggaagtaaagtttgacaagtgtatggaagagaaaaaatttcttgatgaagtaaatggcaatcttgtcaagaatcaggagatgtggattgaaactatacgaaaagcacaagcaagggagcaagctgcgctcagattaaaagatgagaagatcgaaaaacttcaggaagagctaagaggtttgatagcccatttcgactgccaaagtgacactgcacaagcttcaaatgcgatctcgagcgatataccagggggcatgattcttccggtagcatcagaatcgtcctcgagcggcggcgttgttggtggcactggaaacggggagcaaaattgagtaaactgcgccctgtataaagcacgtttggatcttagggacctaggtatattcttgcttccaaacccccaccgttgtatgttcagttagggtaatacacacttgttagctgtcacctcactgcccctcgattctactgtcactagccgctagtagtgtggtactagggatgaaaacgatttcatttttttttggtttttcgaaattcgtttccgatttttcgaccgtatttaatggttatggtatttttcgaaaacataattggttatcgg

SEQ ID NO: 49693 - DNA, 1808 bp, Zea Mays
ggaccaagaaacagttttacacaaagacccctcctcctcggtgctctcgagtctcgagagtcgagactcaggggacctgatttcctcgtccggccatggcgaccggtggcaagtccgctgcccctcagccacctcccgccgcgtcctcctcctccgaacgcgcgctggagtcagtccacttctcttccggaaaccctcgcatcgaggagacccgcggcgtcgtcgtcctccaccccgacccgcccgcggccgcctcctggtctcatgtcccgttggggaggaagccgcgggtgtgcgtgctcgccgtgcccaaccacatgacctacgccgacttctgccgtttctgcggcgccttcgtccctcacacactcgagatgcgcatcgtcagaactgatggagcagaggaccagtacagcgttcttataaattttgacactcagagctccacagacagcttctataagcacttcaacgggaagcagttctcttcgctggaggggggtgtctgccatgtccgttttgtggaagaggtgcactacactgaattgattgagcatgcacatacctcagttacaaacttggctgagcaacctacatgcccagtatgtcttgaacgacttgaccaagatcctggaggtattctcacaacaatctgcaaccattctttccactgctcgtgcatatcaaaatggacagactcctcatgcccgatattgtcagcagcaaccagagaaatccatgtgttctatttgcggaacttcggagaatctttggatatgtctaatctgtggccatgttggctgtggaaggtacaagggtggacatgctattgaacactggaaggaaactcaacattgttattcacttgagttagagacacaaaaagtgtgggactatgctggggacaactatgtacatcggcttattcagtcaaaaacagatggaaagctagttgagtacaatttccatggtgatcacacagcagagagcacgtgttcactatgcagtggtgatgccgcaatggatgaagctctactgaacagtaaatttgaagctattgttgaagagtacaatgatctcgtcacatttcaacttgaaaagcaaagaaattactatgagtcacttctactagaagtcaaggaggaaactgagaaagaaatttctgctgctactgagaaagccatgagcacaaaactccaaaagttggaagtaaagtttgacaagtgtatggaagagaaaaaatttcttgatgaagtaaatggcaatcttgtcaagaatcaggagatgtggattgaaactatacgaaaagcacaagcaagggagcaagctgcgctcagattaaaagatgagaagatcgaaaaacttcaggaagagctaagaggtttgatagcccatttcgactgccaaagtgacactgcacaagcttcaaatgcgatctcgagcgatataccagggggcatgattcttccggtagcatcagaatcgtcctcgagcggcggcgttgttggtggcactggaaacggggagcaaaattgagtaaactgcgccctgtataaagcacgtttggatcttagggacctaggtatattcttgcttccaaacccccaccgttgtatgttcagttagggtaatacacacttgttagctgtcacctcactgcccctcgattctactgtcactagccgctagtagtgtggtactagggatgaaaacgatttcatttttttttggtttttcgaaattcgtttccgatttttcgaccgtatttaatggttatggtatttttcgaaaacataattggttatcgg

SEQ ID NO: 49694 - DNA, 1815 bp, Zea Mays
ggaccaagaaacagttttacacaaagacccctcctcctcggtgctctcgagtctcgagagtcgagactcaggggacctgatttcctcgtccggccatggcgaccggtggcaagtccgctgcccctcagccacctcccgccgcgtcctcctcctccgaacgcgcgctggagtcagtccacttctcttccggaaaccctcgcatcgaggagacccgcggcgtcgtcgtcctccaccccgacccgcccgcggccgcctcctggtctcatgtcccgttggggaggaagccgcgggtgtgcgtgctcgccgtgcccaaccacatgacctacgccgacttctgccgtttctgcggcgccttcgtccctcacacactcgagatgcgcatcgtcagaactgatggagcagaggaccagtacagcgttcttataaattttgacactcagagctccacagacagcttctataagcacttcaacgggaagcagttctcttcgctggaggggggtgtctgccatgtccgttttgtggaagaggtgcactacactgaattgattgagcatgcacatacctcagttacaaacttggctgagcaacctacatgcccagtatgtcttgaacgacttgaccaagatcctggaggtattctcacaacaatctgcaaccattctttccactgctcgtgcatatcaaaatggacagactcctcatgcccggtctgtagatattgtcagcagcaaccagagaaatccatgtgttctatttgcggaacttcggagaatctttggatatgtctaatctgtggccatgttggctgtggaaggtacaagggtggacatgctattgaacactggaaggaaactcaacattgttattcacttgagttagagacacaaaaagtgtgggactatgctggggacaactatgtacatcggcttattcagtcaaaaacagatggaaagctagttgagtacaatttccatggtgatcacacagcagagagcacgtgttcactatgcagtggtgatgccgcaatggatgaagctctactgaacagtaaatttgaagctttgttgaagagtacaatgatctcgtcacatttcaacttgaaaagcaaagaaattactatgagtcacttctactagaagtcaaggaggaaactgagaaagaaatttctgctgctactgagaaagccatgagcacaaaactccaaaagttggaagtaaagtttgacaagtgtatggaagagaaaaaatttcttgatgaagtaaatggcaatcttgtcaagaatcaggagatgtggattgaaactatacgaaaagcacaagcaagggagcaagctgcgctcagattaaaagatgagaagatcgaaaaacttcaggaagagctaagaggtttgatagcccatttcgactgccaaagtgacactgcacaagcttcaaatgcgatctcgagcgatataccagggggcatgattcttccggtagcatcagaatcgtcctcgagcggcggcgttgttggtggcactggaaacggggagcaaaattgagtaaactgcgccctgtataaagcacgtttggatcttagggacctaggtatattcttgcttccaaacccccaccgttgtatgttcagttagggtaatacacacttgttagctgtcacctcactgcccctcgattctactgtcactagccgctagtagtgtggtactagggatgaaaacgatttcatttttttttggtttttcgaaattcgtttccgatttttcgaccgtatttaatggttatggtatttttcgaaaacataattggttatcgg

SEQ ID NO: 49695 - DNA, 1781 bp, Zea Mays
ggaccaagaaacagttttacacaaagacccctcctcctcggtgctctcgagtctcgagagtcgagactcaggggacctgatttcctcgtccggccatggcgaccggtggcaagtccgctgcccctcagccacctcccgccgcgtcctcctcctccgaacgcgcgctggagtcagtccacttctcttccggaaaccctcgcatcgaggagacccgcggcgtcgtcgtcctccaccccgacccgcccgcggccgcctcctggtctcatgtcccgttggggaggaagccgcgggtgtgcgtgctcgccgtgcccaaccacatgacctacgccgacttctgccgtttctgcggcgccttcgtccctcacacactcgagatgcgcatcgtcagaactgatggagcagaggaccagtacagcgttcttataaattttgacactcagagctccacagacagcttctataagcacttcaacgggaagcagttctcttcgctggaggggggtgtctgccatgtccgttttgtggaagaggtgcactacactgaattgattgagcatgcacatacctcagttacaaacttggctgagcaacctacatgcccagtatgtcttgaacgacttgaccaagatcctggaggtattctcacaacaatctgcaaccattctttccactgctcgtgcatatcaaaatggacagactcctcatgcccggtctgtagatattgtcagcagcaaccagagaaatccatgtgttctatttgcggaacttcggagaatctttggatatgtctaatctgtggccatgttggctgtggaaggtacaagggtggacatgctattgaacactggaaggaaactcaacattgttattcacttgagttagagacacaaaaagtgtgggactatgctggggacaactatgtacatcggcttattcagtcaaaaacagatggaaagctagttgagtacaatttccatggtgatcacacagcagagagcacgtgttcactatgcagtggtgatgccgcaatggatgaagctctactgaacagtaaatttgaagctgtaatgtgtttaagtaaagaatttgttatgctaactgttaccaaatagcatcctgacaaacttctataccttgcattacaccattaacttacccctattttagattgttgaagagtacaatgatctcgtcacatttcaacttgaaaagcaaagaaattactatgagtcacttctactagaagtcaaggaggaaactgagaaagaaatttctgctgctactgagaaagccatgagcacaaaactccaaaagttggaagtaaagtttgacaagtgtatggaagagaaaaaatttcttgatgaagtaaatggcaatcttgtcaagaatcaggagatgtggattgaaactatacgaaaagcacaagcaagggagcaagctgcgctcagattaaaagatgagaagatcgaaaaacttcaggaagagaggtttgatagcccatttcgactgccaaagtgacactgcacaagcttcaaatgcgatctcgagcgatataccagggggcatgattcttccggtagcatcagaatcgtcctcgagcggcggcgttgttggtggcactggaaacggggagcaaaattgagtaaactgcgccctgtataaagcacgtttggatcttagggacctagtctttggctgttgagttcattaagggggtgtttgttttctagggattaatgtttagtccctacattttagtccattttagtacctaaaatgct

SEQ ID NO: 49696 - DNA, 1683 bp, Zea Mays
ggaccaagaaacagttttacacaaagacccctcctcctcggtgctctcgagtctcgagagtcgagactcaggggacctgatttcctcgtccggccatggcgaccggtggcaagtccgctgcccctcagccacctcccgccgcgtcctcctcctccgaacgcgcgctggagtcagtccacttctcttccggaaaccctcgcatcgaggagacccgcggcgtcgtcgtcctccaccccgacccgcccgcggccgcctcctggtctcatgtcccgttggggaggaagccgcgggtgtgcgtgctcgccgtgcccaaccacatgacctacgccgacttctgccgtttctgcggcgccttcgtccctcacacactcgagatgcgcatcgtcagaactgatggagcagaggaccagtacagcgttcttataaattttgacactcagagctccacagacagcttctataagcacttcaacgggaagcagttctcttcgctggaggggggtgtctgccatgtccgttttgtggaagaggtgcactacactgaattgattgagcatgcacatacctcagttacaaacttggctgagcaacctacatgcccagtatgtcttgaacgacttgaccaagatcctggaggtattctcacaacaatctgcaaccattctttccactgctcgtgcatatcaaaatggacagactcctcatgcccggtctgtagatattgtcagcagcaaccagagaaatccatgtgttctatttgcggaacttcggagaatctttggatatgtctaatctgtggccatgttggctgtggaaggtacaagggtggacatgctattgaacactggaaggaaactcaacattgttattcacttgagttagagacacaaaaagtgtgggactatgctggggacaactatgtacatcggcttattcagtcaaaaacagatggaaagctagttgagtacaatttccatggtgatcacacagcagagagcacgtgttcactatgcagtggtgatgccgcaatggatgaagctctactgaacagtaaatttgaagctattgttgaagagtacaatgatctcgtcacatttcaacttgaaaagcaaagaaattactatgagtcacttctactagaagtcaaggaggaaactgagaaagaaatttctgctgctactgagaaagccatgagcacaaaactccaaaagttggaagtaaagtttgacaagtgtatggaagagaaaaaatttcttgatgaagtaaatggcaatcttgtcaagaatcaggagatgtggattgaaactatacgaaaagcacaagcaagggagcaagctgcgctcagattaaaagatgagaagatcgaaaaacttcaggaagagctaagaggtttgatagcccatttcgactgccaaagtgacactgcacaagcttcaaatgcgatctcgagcgatataccagggggcatgattcttccggtagcatcagaatcgtcctcgagcggcggcgttgttggtggcactggaaacggggagcaaaattgagtaaactgcgccctgtataaagcacgtttggatcttagggacctagtctttggctgttgagttcattaagggggtgtttgttttctagggattaatgtttagtccctacattttagtccattttagtacctaaaatgct

SEQ ID NO: 49697 - DNA, 1696 bp, Zea Mays
ggaccaagaaacagttttacacaaagacccctcctcctcggtgctctcgagtctcgagagtcgagactcaggggacctgatttcctcgtccggccatggcgaccggtggcaagtccgctgcccctcagccacctcccgccgcgtcctcctcctccgaacgcgcgctggagtcagtccacttctcttccggaaaccctcgcatcgaggagacccgcggcgtcgtcgtcctccaccccgacccgcccgcggccgcctcctggtctcatgtcccgttggggaggaagccgcgggtgtgcgtgctcgccgtgcccaaccacatgacctacgccgacttctgccgtttctgcggcgccttcgtccctcacacactcgagatgcgcatcgtcagaactgatggagcagaggaccagtacagcgttcttataaattttgacactcagagctccacagacagcttctataagcacttcaacgggaagcagttctcttcgctggaggggggtgtctgccatgtccgttttgtggaagaggtgcactacactgaattgattgagcatgcacatacctcagttacaaacttggctgagcaacctacatgcccagtatgtcttgaacgacttgaccaagatcctggaggtattctcacaacaatctgcaaccattctttccactgctcgtgcatatcaaaatggacagactcctcatgcccggtctgtagatattgtcagcagcaaccagagaaatccatgtgttctatttgcggaacttcggagaatctttggatatgtctaatctgtggccatgttggctgtggaaggtacaagggtggacatgctattgaacactggaaggaaactcaacattgttattcacttgagttagagacacaaaaagtgtgggactatgctggggacaactatgtacatcggcttattcagtcaaaaacagatggaaagctagttgagtacaatttccatggtgatcacacagcagagagcacgtgttcactatgcagtggtgatgccgcaatggatgaagctctactgaacagtaaatttgaagctgtaatgtgtttaaattgttgaagagtacaatgatctcgtcacatttcaacttgaaaagcaaagaaattactatgagtcacttctactagaagtcaaggaggaaactgagaaagaaatttctgctgctactgagaaagccatgagcacaaaactccaaaagttggaagtaaagtttgacaagtgtatggaagagaaaaaatttcttgatgaagtaaatggcaatcttgtcaagaatcaggagatgtggattgaaactatacgaaaagcacaagcaagggagcaagctgcgctcagattaaaagatgagaagatcgaaaaacttcaggaagagctaagaggtttgatagcccatttcgactgccaaagtgacactgcacaagcttcaaatgcgatctcgagcgatataccagggggcatgattcttccggtagcatcagaatcgtcctcgagcggcggcgttgttggtggcactggaaacggggagcaaaattgagtaaactgcgccctgtataaagcacgtttggatcttagggacctagtctttggctgttgagttcattaagggggtgtttgttttctagggattaatgtttagtccctacattttagtccattttagtacctaaaatgct

SEQ ID NO: 49698 - DNA, 2366 bp, Zea Mays
ggaccaagaaacagttttacacaaagacccctcctcctcggtgctctcgagtctcgagagtcgagactcaggggacctgatttcctcgtccggccatggcgaccggtggcaagtccgctgcccctcagccacctcccgccgcgtcctcctcctccgaacgcgcgctggagtcagtccacttctcttccggaaaccctcgcatcgaggagacccgcggcgtcgtcgtcctccaccccgacccgcccgcggccgcctcctggtctcatgtcccgttggggaggaagccgcgggtgtgcgtgctcgccgtgcccaaccacatgacctacgccgacttctgccgtttctgcggcgccttcgtccctcacacactcgagatgcgcatcgtcagaactgatggagcagaggaccagtacagcgttcttataaattttgacactcagagctccacagacagcttctataagcacttcaacgggaagcagttctcttcgctggaggggggtgtctgccatgtccgttttgtggaagaggtgcactacactgaattgattgagcatgcacatacctcagttacaaacttggctgagcaacctacatgcccagtatgtcttgaacgacttgaccaagatcctggaggtattctcacaacaatctgcaaccattctttccactgctcgtgcatatcaaaatggacagactcctcatgcccggtctgtagatattgtcagcagcaaccagagaaatccatgtgttctatttgcggaacttcggagaatctttggatatgtctaatctgtggccatgttggctgtggaaggtacaagggtggacatgctattgaacactggaaggaaactcaacattgttattcacttgagttagagacacaaaaagtgtgggactatgctggggacaactatgtacatcggcttattcagtcaaaaacagatggaaagctagttgagtacaatttccatggtgatcacacagcagagagcacgtgttcactatgcagtggtgatgccgcaatggatgaagctctactgaacagtaaatttgaagctattgttgaagagtacaatgatctcgtcacatttcaacttgaaaagcaaagaaattactatgagtcacttctactagaagtcaaggaggaaactgagaaagaaatttctgctgctactgagaaagccatgagcacaaaactccaaaagttggaagtaaagtttgacaagtgtatggaagagaaaaaatttcttgatgaagtaaatggcaatcttgtcaagaatcaggagatgtggattgaaactatacgaaaagcacaagcaagggagcaagctgcgctcagattaaaagatgagaagatcgaaaaacttcaggaagagctaagaggtttgatagcccatttcgactgccaaagtgacactgcacaagcttcaaatgcgatctcgagcgatataccagggggcatgattcttccggtagcatcagaatcgtcctcgagcggcggcgttgttggtggcactggaaacggggagcaaaattgagtaaactgcgccctgtataaagcacgtttggatcttagggacctaggtgtggagcacagggacgatagttgatgactgaggtgaaggtcatgcgggctcatgctgatggactgtgaccgatgaaggatgagtgttgggtcttagctgatggaccagatcagtcgggtgactagccgtggtggctgacatctaggacacactcacgcgaggacggggcagagcgagccgcgttgccatcgcggccgaggactggcggaacacatgtccaagacctgggagacacgcatgcggtgcgatactcacgatggtttggtggttgagcctcaaaaccatctagcgttgcggacgatgagtttttgactgggtttcgcctcaaaactcggcattggcagtttcggtggaaattggaggcggcacgtggcgtgatcacggaaggtgcgtcaaggcgaagcaactccatgtgaagggtatggtcgtcagatgaaagctaagagttggtccattttgctcgtggtggagtagatatgttctatgtaaatatgggtagtttagaaaatggaaataaccctatataaatagaggtgagggttgttgttatagctatgtcttggtcgccattttgtttagagcacttgtttagtactcctagttttctctctaggtagtcaccagttgggctgagggatccacaacgattttgtaagtgtcgactgtgttattgctctgcaaagtttaatcagaggaaggatcgctggttcggcccatatgttctggttgacttcaatctcaatttgtccctttgctgtatttttaaagtattgt

SEQ ID NO: 49699 - DNA, 939 bp, Zea Mays
ccaaaacctcgacgggtaacgcatacggcaactcctctctccgctgttgctctcttcccgtcgcgctttctcctcgtgcggctactgggtaaccgccgccgctgccgccctacgccaggttctcaggtcattgtcagtccccttacttcgccggctcattcggcggcgacgagcaccaggctgccttggaggtgccaaggttacttgggctccttgccatgattcttcataatgaaatctttacatctggtggagatcagaatttgattaataggattctgagcaaaaacaaaaatgcaactgatttcgagaacaaggatgatggagagtctgatgatgataatgatgaggagggagacgatgaggatgctgaaaaccaagaagatgatggtggtgatgagggatcagatgacaatgggaatgaggaggaagatgacgacgacgatgataacgatcctgcagccaacggtgaaggaggaagtgacgacgatgatgatggtggagaggatgaagaggaggatgatgacgacgatgatgatggggatggtgacaatgaggaagatgaggaggaagaagaggaagaggatgatgacgatgatgtcccccaaccacctactaagaagaggaaatgatagatggctgtgatttggttggctggttgcttacatgcaggaatgctccctgttcgcccctgcctagcagtctcctgtttagtgggtagggggttttagcttgatcgtggacaattcatagcctagcttggaaacaaaaagaaacatttaattgtgcatgtactattaaaccattcctttaatcatgtatctcagattgctaccaacccctgtgatgctccgaatggtttctacattgtgtttgcttcagttttgttgcaacttgcaatttgacaatgttctgatatactttgcttgtctatttcgg

SEQ ID NO: 49700 - DNA, 1032 bp, Zea Mays
cctgccgtacgaaaccgaacacccgaaccctaacttaagctacttgtattcggatctgatctactaagtttatacggccccagtgtatacgtgcatactaacttctatttttatgccattttttgggtgtatatgagtacactcatgtccttacttggtccgcccctgatcctgaccaaatcctagctgctttgagtatggaggcgctgtttgggtgcaacaaacatggcggggacaaggccgctgatttggcctcgtttataatcgtgcaggctgccttggaggtgccaaggttacttgggctccttgccatgattcttcataatgaaatctttacatctggtggagatcagaatttgattaataggattctgagcaaaaacaaaaatgcaactgatttcgagaacaaggatgatggagagtctgatgatgataatgatgaggagggagacgatgaggatgctgaaaaccaagaagatgatggtggtgatgagggatcagatgacaatgggaatgaggaggaagatgacgacgacgatgataacgatcctgcagccaacggtgaaggaggaagtgacgacgatgatgatggtggagaggatgaagaggaggatgatgacgacgatgatgatggggatggtgacaatgaggaagatgaggaggaagaagaggaagaggatgatgacgatgatgtcccccaaccacctactaagaagaggaaatgatagatggctgtgatttggttggctggttgcttacatgcaggaatgctccctgttcgcccctgcctagcagtctcctgtttagtgggtagggggttttagcttgatcgtggacaattcatagcctagcttggaaacaaaaagaaacatttaattgtgcatgtactattaaaccattcctttaatcatgtatctcagattgctaccaacccctgtgatgctccgaatggtttctacattgtgtttgcttcagttttgttgcaacttgcaatttgacaatgttctgatatactttgcttgtctatttcgg

SEQ ID NO: 49701 - DNA, 3560 bp, Zea Mays
aataaactcatttttgaattgaccattccatttgaattaaaaaaaattatgtcacagttgccaccacactgtttccttattgtctactcaccccattatgagccaccttccttttttttcatttgctataataattccagcgcctcttattatatttttttaactcgctatttctgctcacctcctcctctccttttcttcctccctcagcctggcctcaactcccctcccatcccgtcccccgatctcatctcgccggcggcggcgatggcgggcaacgataattggatcaacagctacctcgacgccatcctagacgccggaaaggctgccatcggcggcgaccggccttccctcctcctccgcgagcgcggccatttctcccccgcgcgctacttcgtcgaggaggtcatcaccgggtacgacgagaccgacctctacaagacatggctacgcgcgaacgccatgcggagcccgcaggagaggaacacgcggctcgagaacatgacgtggaggatctggaaccttgcaaggaagaagaaggagttcgagaaagaagaagcttgtcgtatgtcaaaacgccagccagaaactgagaaaacacgagctgatgctactgcagatatgtctgaagatctctttgaaggagaaaaaggagaagatgctggtgatccatctgtcgcatacggggacagcaccacggggagctcacctaaaacaagttcaattgacaagctatacatagtattgatcagtctacatggtctggtccgtggtgagaatatggagcttggccgagattcagatacgggtggccagatcaaatatgtggttgaacttgctaaagcattaagttcatccccaggagtttaccgggttgacctgctaacaagacaaatcttagcaccaaattttgatcgtagttatggtgaacctaaagaattattggtttcaacaagtggtaaaaattataaacaagaaaagggagaaaatagtggtgcatatataattcggataccgtttggtccaaaagacaagtatctagctaaagaacatctatggcctttcattcaagaatttgttgatggtgcactcagccatattgtgaggatgtcaaaagccataggtgaagaaactggccgtgggcatccagtatggcctgctgtgattcatggacattatgccagtgcaggaattgctgctgcgttactttctggagcacttaatcttcctatggcgttcacaggacattttcttgggaaagataaattggaagggcttctcaaacaagggagacaaactagggaacagataaatatgacatacaaaataatgtgccgaattgaggccgaggagctatctcttgacgcatctgagattgtcattgcaagcactaggcaagaaatagaagagcagtggaacttgtatgatggttttgaggttatacttgcaagaaagctccgagcaagagttaaacgtggtgctaattgttatggccgttttatgcctcgtatggttataattcctcctggagttgaatttggtcacattattcatgattttgatatggatggcgaagaagagaatccatgcccagcatctgaggatccacctatttggtctcagataatgcgcttctttacaaatcctaggaagcctatgattctagctgttgcccgcccttatcctgagaagaatattactacacttgtaaaggcatttggtgaatgcaggccattaagggagcttgccaatcttacactgataatgggaaaccgtgaagctatatctaagatgcacaatatgagtgctgctgtcttgacatcagtgcttacattgattgacgaatatgacctgtatggtcaagtggcataccccaagcatcataaacactcagaagttcctgacatttatcgtttagctgcaagaacaaagggggcttttgtaaatgtagcttacttcgaacaatttggagttactctgatagaggctgctatgaatggtttgcctataattgcgacaaaaaatggagcccctgttgaaattaatcagagagaatggactgacaaatattcaccaattctcgtggcctgaacattgcaagaattacctgtcaaggatactaactcttggcccaaggtctcctgctattggtaacagagaggagcggagtaatacacctatttcaggaaggaagaatatcattgttatttctgtagactctgttaacaaggaaggtctagtcaggataatcagaaatgctattgaggtcatacataaagaaaacatgtcgggttcaactggttttgtgctgtcaacttccttaacgatatcagaaatacattcactgctactatctggaggcatgcttcccactgattttgatgctttcatctgcaatagtgggagtaacatttactatccttcacattccggagaaacgtcaaacaactccaagattacatttgcattagatcaaaatcaccagtcacatattgagtatcgttggggaggagaaggcctaaggaaatatcttgtgaagtgggccacttcagtggtagaaagaaagggaagaacagagagacaaattatttttgaagatccagagcactcttcggcgtattgtcttgcatttagagtggttaatcccaatcatcttcctcctttaaaggagttgaggaagttgatgagaatccaatctctccgttgcaatgcattatataaccacagcgctaccagattatctgtagtccctatccacgcatcacgctctcaggccctaaggtacctgtgtatacgattggggatagaagtgccaaatgttgcagtcctcgtgggtgaaagcggcgattcagattacgaggaactgctggggggtctccataggaccgttatcctaaagggcgagttcaacatcgccgcaaacaggatccacacggtgaggagataccccctgcaggatgtcgtcgccctcgatagctcaaacatcatcggtgtcgacggctacaccacggatgatctgaggtctgccctgcagcagatgggtatactggcacggtaacaccttccggagcttccgtttccactaccaggtcaacgaagagaaacgagaaaacagacagaatggtgacgaaacaagtgcgaccgtttccatgctcgatgggaatgccgattttgcattgtaggctgtagcggttgtgttcgtgtgtgtgtgcccgcgcgcggtggtggcctattcttgtgctgtgaataactgcccctcctttgtttgtgatatgccaaaattttgaagtgagtacagtacaaccaaacatgttgatgatggaaaaacgaatggagaaaggggaaaaacaaacaaaaatggtttgggacggcagtgttccatggtatggtacgctgttgttgaatgcctgggaaatgggtgattccgctgttcgtcactcgtcccatctggctagtttgttctatgccttctgaaacatgtatcatctggctagttacctggggacatcagatgttctccctgttttgacttgcgattgttgtttcgtaggaagcac

SEQ ID NO: 49702 - DNA, 3727 bp, Zea Mays
aataaactcatttttgaattgaccattccatttgaattaaaaaaaattatgtcacagttgccaccacactgtttccttattgtctactcaccccattatgagccaccttccttttttttcatttgctataataattccagcgcctcttattatatttttttaactcgctatttctgctcacctcctcctctccttttcttcctccctcagcctggcctcaactcccctcccatcccgtcccccgatctcatctcgccggcggcggcgatggcgggcaacgataattggatcaacagctacctcgacgccatcctagacgccggaaaggctgccatcggcggcgaccggccttccctcctcctccgcgagcgcggccatttctcccccgcgcgctacttcgtcgaggaggtcatcaccgggtacgacgagaccgacctctacaagacatggctacgcgcgaacgccatgcggagcccgcaggagaggaacacgcggctcgagaacatgacgtggaggatctggaaccttgcaaggaagaagaaggagatatgtctgaagatctctttgaaggagaaaaaggagaagatgctggtgatccatctgtcgcatacggggacagcaccacggggagctcacctaaaacaagttcaattgacaagctatacatagtattgatcagtctacatggtctggtccgtggtgagaatatggagcttggccgagattcagatacgggtggccagatcaaatatgtggttgaacttgctaaagcattaagttcatccccaggagtttaccgggttgacctgctaacaagacaaatcttagcaccaaattttgatcgtagttatggtgaacctaaagaattattggtttcaacaagtggtaaaaattataaacaagaaaagggagaaaatagtggtgcatatataattcggataccgtttggtccaaaagacaagtatctagctaaagaacatctatggcctttcattcaagaatttgttgatggtgcactcagccatattgtgaggatgtcaaaagccataggtgaagaaactggccgtgggcatccagtatggcctgctgtgattcatggacattatgccagtgcaggaattgctgctgcgttactttctggagcacttaatcttcctatggcgttcacaggacattttcttgggaaagataaattggaagggcttctcaaacaagggagacaaactagggaacagataaatatgacatacaaaataatgtgccgaattgaggccgaggagctatctcttgacgcatctgagattgtcattgcaagcactaggcaagaaatagaagagcagtggaacttgtatgatggttttgaggttatacttgcaagaaagctccgagcaagagttaaacgtggtgctaattgttatggccgttttatgcctcataattcctcctggagttgaatttggtcacattattcatgattttgatatggatggcgaagaagagaatccatgcccagcatctgaggatccacctatttggtctcaggtcactgtgtattcttatcatagtatacacaagggctcgctaaatcattagtgaagcatttattcagtagttaatttagatgttttttaatctgtcaaacctgcattcaaatttcaaacactgactatacatatgcacaaccgatggcagataatgcgcttctttacaaatcctaggaagcctatgattctagctgttgcccgcccttatcctgagaagaatattactacacttgtaaaggcatttggtgaatgcaggccattaagggagcttgccaatcttacactgataatgggaaaccgtgaagctatatctaagatgcacaatatgagtgctgctgtcttgacatcagtgcttacattgattgacgaatatgacctgtatggtcaagtggcataccccaagcatcataaacactcagaagttcctgacatttatcgtttagctgcaagaacaaagggggcttttgtaaatgtagcttacttcgaacaatttggagttactctgatagaggctgctatgaatggtttgcctataattgcgacaaaaaatggagcccctgttgaaattaatcaggtcctgaacaatggtctccttgttgatccgcacgatcagaatgccattgcggatgcactatataaacttctttctgataaacatctttggtcaaggtgcagagagaatggactgacaaatattcaccaattctcgtggcctgaacattgcaagaattacctgtcaaggatactaactcttggcccaaggtctcctgctattggtaacagagaggagcggagtaatacacctatttcaggaaggaagaatatcattgttatttctgtagactctgttaacaaggaaggtctagtcaggataatcagaaatgctattgaggtcatacataaagaaaacatgtcgggttcaactggttttgtgctgtcaacttccttaacgatatcagaaatacattcactgctactatctggaggcatgcttcccactgattttgatgctttcatctgcaatagtgggagtaacatttactatccttcacattccggagaaacgtcaaacaactccaagattacatttgcattagatcaaaatcaccagtcacatattgagtatcgttggggaggagaaggcctaaggaaatatcttgtgaagtgggccacttcagtggtagaaagaaagggaagaacagagagacaaattatttttgaagatccagagcactcttcggcgtattgtcttgcatttagagtggttaatcccaatcatcttcctcctttaaaggagttgaggaagttgatgagaatccaatctctccgttgcaatgcattatataaccacagcgctaccagattatctgtagtccctatccacgcatcacgctctcaggccctaaggtacctgtgtatacgattggggatagaagtgccaaatgttgcagtcctcgtgggtgaaagcggcgattcagattacgaggaactgctggggggtctccataggaccgttatcctaaagggcgagttcaacatcgccgcaaacaggatccacacggtgaggagataccccctgcaggatgtcgtcgccctcgatagctcaaacatcatcggtgtcgacggctacaccacggatgatctgaggtctgccctgcagcagatgggtatactggcacggtaacaccttccggagcttccgtttccactaccaggtcaacgaagagaaacgagaaaacagacagaatggtgacgaaacaagtgcgaccgtttccatgctcgatgggaatgccgattttgcattgtaggctgtagcggttgtgttcgtgtgtgtgtgcccgcgcgcggtggtggcctattcttgtgctgtgaataactgcccctcctttgtttgtgatatgccaaaattttgaagtgagtacagtacaaccaaacatgttgatgatggaaaaacgaatggagaaaggggaaaaacaaacaaaaatggtttgggacggcagtgttccatggtatggtacgctgttgttgaatgcctgggaaatgggtgattccgctgttcgtcactcgtcccatctggctagtttgttctatgccttctgaaacatgtatcatctggctagttacctggggacatcagatgttctccctgttttgacttgcgattgttgtttcgtaggaagcac

SEQ ID NO: 49703 - DNA, 3585 bp, Zea Mays
aataaactcatttttgaattgaccattccatttgaattaaaaaaaattatgtcacagttgccaccacactgtttccttattgtctactcaccccattatgagccaccttccttttttttcatttgctataataattccagcgcctcttattatatttttttaactcgctatttctgctcacctcctcctctccttttcttcctccctcagcctggcctcaactcccctcccatcccgtcccccgatctcatctcgccggcggcggcgatggcgggcaacgataattggatcaacagctacctcgacgccatcctagacgccggaaaggctgccatcggcggcgaccggccttccctcctcctccgcgagcgcggccatttctcccccgcgcgctacttcgtcgaggaggtcatcaccgggtacgacgagaccgacctctacaagacatggctacgcgcgaacgccatgcggagcccgcaggagaggaacacgcggctcgagaacatgacgtggaggatctggaaccttgcaaggaagaagaaggagatatgtctgaagatctctttgaaggagaaaaaggagaagatgctggtgatccatctgtcgcatacggggacagcaccacggggagctcacctaaaacaagttcaattgacaagctatacatagtattgatcagtctacatggtctggtccgtggtgagaatatggagcttggccgagattcagatacgggtggccagatcaaatatgtggttgaacttgctaaagcattaagttcatccccaggagtttaccgggttgacctgctaacaagacaaatcttagcaccaaattttgatcgtagttatggtgaacctaaagaattattggtttcaacaagtggtaaaaattataaacaagaaaagggagaaaatagtggtgcatatataattcggataccgtttggtccaaaagacaagtatctagctaaagaacatctatggcctttcattcaagaatttgttgatggtgcactcagccatattgtgaggatgtcaaaagccataggtgaagaaactggccgtgggcatccagtatggcctgctgtgattcatggacattatgccagtgcaggaattgctgctgcgttactttctggagcacttaatcttcctatggcgttcacaggacattttcttgggaaagataaattggaagggcttctcaaacaagggagacaaactagggaacagataaatatgacatacaaaataatgtgccgaattgaggccgaggagctatctcttgacgcatctgagattgtcattgcaagcactaggcaagaaatagaagagcagtggaacttgtatgatggttttgaggttatacttgcaagaaagctccgagcaagagttaaacgtggtgctaattgttatggccgttttatgcctcgtatggttataattcctcctggagttgaatttggtcacattattcatgattttgatatggatggcgaagaagagaatccatgcccagcatctgaggatccacctatttggtctcagataatgcgcttctttacaaatcctaggaagcctatgattctagctgttgcccgcccttatcctgagaagaatattactacacttgtaaaggcatttggtgaatgcaggccattaagggagcttgccaatcttacactgataatgggaaaccgtgaagctatatctaagatgcacaatatgagtgctgctgtcttgacatcagtgcttacattgattgacgaatatgacctgtatggtcaagtggcataccccaagcatcataaacactcagaagttcctgacatttatcgtttagctgcaagaacaaagggggcttttgtaaatgtagcttacttcgaacaatttggagttactctgatagaggctgctatgaatggtttgcctataattgcgacaaaaaatggagcccctgttgaaattaatcaggtcctgaacaatggtctccttgttgatccgcacgatcagaatgccattgcggatgcactatataaacttctttctgataaacatctttggtcaaggtgcagagagaatggactgacaaatattcaccaattctcgtggcctgaacattgcaagaattacctgtcaaggatactaactcttggcccaaggtctcctgctattggtaacagagaggagcggagtaatacacctatttcaggaaggaagaatatcattgttatttctgtagactctgttaacaaggaaggtctagtcaggataatcagaaatgctattgaggtcatacataaagaaaacatgtcgggttcaactggttttgtgctgtcaacttccttaacgatatcagaaatacattcactgctactatctggaggcatgcttcccactgattttgatgctttcatctgcaatagtgggagtaacatttactatccttcacattccggagaaacgtcaaacaactccaagattacatttgcattagatcaaaatcaccagtcacatattgagtatcgttggggaggagaaggcctaaggaaatatcttgtgaagtgggccacttcagtggtagaaagaaagggaagaacagagagacaaattatttttgaagatccagagcactcttcggcgtattgtcttgcatttagagtggttaatcccaatcatcttcctcctttaaaggagttgaggaagttgatgagaatccaatctctccgttgcaatgcattatataaccacagcgctaccagattatctgtagtccctatccacgcatcacgctctcaggccctaaggtacctgtgtatacgattggggatagaagtgccaaatgttgcagtcctcgtgggtgaaagcggcgattcagattacgaggaactgctggggggtctccataggaccgttatcctaaagggcgagttcaacatcgccgcaaacaggatccacacggtgaggagataccccctgcaggatgtcgtcgccctcgatagctcaaacatcatcggtgtcgacggctacaccacggatgatctgaggtctgccctgcagcagatgggtatactggcacggtaacaccttccggagcttccgtttccactaccaggtcaacgaagagaaacgagaaaacagacagaatggtgacgaaacaagtgcgaccgtttccatgctcgatgggaatgccgattttgcattgtaggctgtagcggttgtgttcgtgtgtgtgtgcccgcgcgcggtggtggcctattcttgtgctgtgaataactgcccctcctttgtttgtgatatgccaaaattttgaagtgagtacagtacaaccaaacatgttgatgatggaaaaacgaatggagaaaggggaaaaacaaacaaaaatggtttgggacggcagtgttccatggtatggtacgctgttgttgaatgcctgggaaatgggtgattccgctgttcgtcactcgtcccatctggctagtttgttctatgccttctgaaacatgtatcatctggctagttacctggggacatcagatgttctccctgttttgacttgcgattgttgtttcgtaggaagcac

SEQ ID NO: 49704 - DNA, 3327 bp, Zea Mays
atgagatacataagctaaacatcatattgacttgcgcgaggagttgttttccgacggcattgttcgagaaagaagaagcttgtcgtatgtcaaaacgccagccagaaactgagaaaacacgagctgatgctactgcagatatgtctgaagatctctttgaaggagaaaaaggagaagatgctggtgatccatctgtcgcatacggggacagcaccacggggagctcacctaaaacaagttcaattgacaagctatacatagtattgatcagtctacatggtctggtccgtggtgagaatatggagcttggccgagattcagatacgggtggccagatcaaatatgtggttgaacttgctaaagcattaagttcatccccaggagtttaccgggttgacctgctaacaagacaaatcttagcaccaaattttgatcgtagttatggtgaacctaaagaattattggtttcaacaagtggtaaaaattataaacaagaaaagggagaaaatagtggtgcatatataattcggataccgtttggtccaaaagacaagtatctagctaaagaacatctatggcctttcattcaagaatttgttgatggtgcactcagccatattgtgaggatgtcaaaagccataggtgaagaaactggccgtgggcatccagtatggcctgctgtgattcatggacattatgccagtgcaggaattgctgctgcgttactttctggagcacttaatcttcctatggcgttcacaggacattttcttgggaaagataaattggaagggcttctcaaacaagggagacaaactagggaacagataaatatgacatacaaaataatgtgccgaattgaggccgaggagctatctcttgacgcatctgagattgtcattgcaagcactaggcaagaaatagaagagcagtggaacttgtatgatggttttgaggttatacttgcaagaaagctccgagcaagagttaaacgtggtgctaattgttatggccgttttatgcctcgtatggttataattcctcctggagttgaatttggtcacattattcatgattttgatatggatggcgaagaagagaatccatgcccagcatctgaggatccacctatttggtctcaggtcactgtgtattcttatcatagtatacacaagggctcgctaaatcattagtgaagcatttattcagtagttaatttagatgttttttaatctgtcaaacctgcattcaaatttcaaacactgactatacatatgcacaaccgatggcagataatgcgcttctttacaaatcctaggaagcctatgattctagctgttgcccgcccttatcctgagaagaatattactacacttgtaaaggcatttggtgaatgcaggccattaagggagcttgccaatcttacactgataatgggaaaccgtgaagctatatctaagatgcacaatatgagtgctgctgtcttgacatcagtgcttacattgattgacgaatatgacctgtatggtcaagtggcataccccaagcatcataaacactcagaagttcctgacatttatcgtttagctgcaagaacaaagggggcttttgtaaatgtagcttacttcgaacaatttggagttactctgatagaggctgctatgaatggtttgcctataattgcgacaaaaaatggagcccctgttgaaattaatcaggtcctgaacaatggtctccttgttgatccgcacgatcagaatgccattgcggatgcactatataaacttctttctgataaacatctttggtcaaggtgcagagagaatggactgacaaatattcaccaattctcgtggcctgaacattgcaagaattacctgtcaaggatactaactcttggcccaaggtctcctgctattggtaacagagaggagcggagtaatacacctatttcaggaaggaagaatatcattgttatttctgtagactctgttaacaaggaaggtctagtcaggataatcagaaatgctattgaggtcatacataaagaaaacatgtcgggttcaactggttttgtgctgtcaacttccttaacgatatcagaaatacattcactgctactatctggaggcatgcttcccactgattttgatgctttcatctgcaatagtgggagtaacatttactatccttcacattccggagaaacgtcaaacaactccaagattacatttgcattagatcaaaatcaccagtcacatattgagtatcgttggggaggagaaggcctaaggaaatatcttgtgaagtgggccacttcagtggtagaaagaaagggaagaacagagagacaaattatttttgaagatccagagcactcttcggcgtattgtcttgcatttagagtggttaatcccaatcatcttcctcctttaaaggagttgaggaagttgatgagaatccaatctctccgttgcaatgcattatataaccacagcgctaccagattatctgtagtccctatccacgcatcacgctctcaggccctaaggtacctgtgtatacgattggggatagaagtgccaaatgttgcagtcctcgtgggtgaaagcggcgattcagattacgaggaactgctggggggtctccataggaccgttatcctaaagggcgagttcaacatcgccgcaaacaggatccacacggtgaggagataccccctgcaggatgtcgtcgccctcgatagctcaaacatcatcggtgtcgacggctacaccacggatgatctgaggtctgccctgcagcagatgggtatactggcacggtaacaccttccggagcttccgtttccactaccaggtcaacgaagagaaacgagaaaacagacagaatggtgacgaaacaagtgcgaccgtttccatgctcgatgggaatgccgattttgcattgtaggctgtagcggttgtgttcgtgtgtgtgtgcccgcgcgcggtggtggcctattcttgtgctgtgaataactgcccctcctttgtttgtgatatgccaaaattttgaagtgagtacagtacaaccaaacatgttgatgatggaaaaacgaatggagaaaggggaaaaacaaacaaaaatggtttgggacggcagtgttccatggtatggtacgctgttgttgaatgcctgggaaatgggtgattccgctgttcgtcactcgtcccatctggctagtttgttctatgccttctgaaacatgtatcatctggctagttacctggggacatcagatgttctccctgttttgacttgcgattgttgtttcgtaggaagcac

SEQ ID NO: 49705 - DNA, 3138 bp, Zea Mays
ctcaggttttacattttactgctttggtaactttgtaagacctaagtctacattagttgtagcacgtactaagtttcctctatatcaaagagcgcaaaggtccatattcttctgcttctgctagttcgagaaagaagaagcttgtcgtatgtcaaaacgccagccagaaactgagaaaacacgagctgatgctactgcagatatgtctgaagatctctttgaaggagaaaaaggagaagatgctggtgatccatctgtcgcatacggggacagcaccacggggagctcacctaaaacaagttcaattgacaagctatacatagtattgatcagtctacatggtctggtccgtggtgagaatatggagcttggccgagattcagatacgggtggccagatcaaatatgtggttgaacttgctaaagcattaagttcatccccaggagtttaccgggttgacctgctaacaagacaaatcttagcaccaaattttgatcgtagttatggtgaacctaaagaattattggtttcaacaagtggtaaaaattataaacaagaaaagggagaaaatagtggtgcatatataattcggataccgtttggtccaaaagacaagtatctagctaaagaacatctatggcctttcattcaagaatttgttgatggtgcactcagccatattgtgaggatgtcaaaagccataggtgaagaaactggccgtgggcatccagtatggcctgctgtgattcatggacattatgccagtgcaggaattgctgctgcgttactttctggagcacttaatcttcctatggcgttcacaggacattttcttgggaaagataaattggaagggcttctcaaacaagggagacaaactagggaacagataaatatgacatacaaaataatgtgccgaattgaggccgaggagctatctcttgacgcatctgagattgtcattgcaagcactaggcaagaaatagaagagcagtggaacttgtatgatggttttgaggttatacttgcaagaaagctccgagcaagagttaaacgtggtgctaattgttatggccgttttatgcctcgtatggttataattcctcctggagttgaatttggtcacattattcatgattttgatatggatggcgaagaagagaatccatgcccagcatctgaggatccacctatttggtctcagataatgcgcttctttacaaatcctaggaagcctatgattctagctgttgcccgcccttatcctgagaagaatattactacacttgtaaaggcatttggtgaatgcaggccattaagggagcttgccaatcttacactgataatgggaaaccgtgaagctatatctaagatgcacaatatgagtgctgctgtcttgacatcagtgcttacattgattgacgaatatgacctgtatggtcaagtggcataccccaagcatcataaacactcagaagttcctgacatttatcgtttagctgcaagaacaaagggggcttttgtaaatgtagcttacttcgaacaatttggagttactctgatagaggctgctatgaatggtttgcctataattgcgacaaaaaatggagcccctgttgaaattaatcagagagaatggactgacaaatattcaccaattctcgtggcctgaacattgcaagaattacctgtcaaggatactaactcttggcccaaggtctcctgctattggtaacagagaggagcggagtaatacacctatttcaggaaggaagaatatcattgttatttctgtagactctgttaacaaggaaggtctagtcaggataatcagaaatgctattgaggtcatacataaagaaaacatgtcgggttcaactggttttgtgctgtcaacttccttaacgatatcagaaatacattcactgctactatctggaggcatgcttcccactgattttgatgctttcatctgcaatagtgggagtaacatttactatccttcacattccggagaaacgtcaaacaactccaagattacatttgcattagatcaaaatcaccagtcacatattgagtatcgttggggaggagaaggcctaaggaaatatcttgtgaagtgggccacttcagtggtagaaagaaagggaagaacagagagacaaattatttttgaagatccagagcactcttcggcgtattgtcttgcatttagagtggttaatcccaatcatcttcctcctttaaaggagttgaggaagttgatgagaatccaatctctccgttgcaatgcattatataaccacagcgctaccagattatctgtagtccctatccacgcatcacgctctcaggccctaaggtacctgtgtatacgattggggatagaagtgccaaatgttgcagtcctcgtgggtgaaagcggcgattcagattacgaggaactgctggggggtctccataggaccgttatcctaaagggcgagttcaacatcgccgcaaacaggatccacacggtgaggagataccccctgcaggatgtcgtcgccctcgatagctcaaacatcatcggtgtcgacggctacaccacggatgatctgaggtctgccctgcagcagatgggtatactggcacggtaacaccttccggagcttccgtttccactaccaggtcaacgaagagaaacgagaaaacagacagaatggtgacgaaacaagtgcgaccgtttccatgctcgatgggaatgccgattttgcattgtaggctgtagcggttgtgttcgtgtgtgtgtgcccgcgcgcggtggtggcctattcttgtgctgtgaataactgcccctcctttgtttgtgatatgccaaaattttgaagtgagtacagtacaaccaaacatgttgatgatggaaaaacgaatggagaaaggggaaaaacaaacaaaaatggtttgggacggcagtgttccatggtatggtacgctgttgttgaatgcctgggaaatgggtgattccgctgttcgtcactcgtcccatctggctagtttgttctatgccttctgaaacatgtatcatctggctagttacctggggacatcagatgttctccctgttttgacttgcgattgttgtttcgtaggaagcac

SEQ ID NO: 49706 - DNA, 2197 bp, Zea Mays
ccaagtcttcatttgtatgcatcaaccattgacggtgtcatagtacagtgtcacacatacatcaagtcatcaataattgcaccggcggattgtacggcgctctgtgctgctgcagggattttgcagtatcttgttggaagccttgtagtggccgcggtggaaagaacaagacgatcaaacgcatggcgccaaacgagctgcttaggatggaaattttcttccatttgttgagcaccgaaggaagccccgatgttaattaatcgttataagtgcctcgcccacactcaccaaagtccaaggatcggtgcattcagaatttcagattcagttcttggttagccattgacagcatctgaggccatatcatggatgcgctcacgtactacctgtacctcttcttggccttccttcccctcttgctcctgaagctcaagaggcgagacaacaacgatggcctgaggctgccgccgagcccatggagtctgccggtgatcggcagcctccaccacctgctcgtcggcagcccgctcccgcaccgtgccatggctcacatctcgcacaggctcaaggcgcccctcatctacctcaagctcggtgaggtccccgtcgtggtcgcgtcgtcgcccgacgctgctcgggagatcctgaagacgcacgacgccaacttcgccacgcggccgtggagcccgacgatgaaggtgatgatggcggatggggagggcctggcgttcgcgcgctacggcgccctgtggcggcagctccgcaagatcagcatcctggagctgctcagcgcccgccgcgtgcagtcgttccgcggcgtccgggaggaggaggtcggccgcctcgtggctgccatcgcggagtactccccgcggggcgaggccgtgaacctcagccagaggatcgccgagctcatgaacgacacggccgtgcgcgccatgatcggcgaccggttcgagaggcgggacgagttcctggagaacgtcgcggagggagtgaagatcagcaccgggttcagcctcggcgatctgttcccgtcgtcgaggctggcgagcctcgtcggcggcacggctcgccgggcggcggtaaaccaccgcaagatgttcaagctgatggactacgccatcgagaagcacgaggagcggagggcagccatgaccacagatgcagagggcgtcgtgaaggaggatctggtggatgtgcttcttaggatacagaaggaaggaggcctggaggaccttttcggtgccggcagcgagacgtctgcaagtacactccaatgggccatgtcggagctcgtaagcaacccaagagtgatggaaagggcacaggccgaggtacgtgagaagctccaagggaagccaacggtgaccgaagatgacttggtcgacatgaggtacatgaagctcatcatcaaagagaccctaaggatgcatccggtggtgccattgcttctcccaagggagtgccgagagccatgcagggtgatggggtacgacgtgcccaagggaactaccgtgttcgtgaatgtctgggcgatcagcagggatcccaagcactgggaggacgctgcgacgtttagaccggaacgattcgaggccgcgggtacggttgattttaagggcacggactttgaatacacgccgtttggggcgggccggaggatgtgccccggcatggcgtttgcgcaggcaagcatggagctcgtgcttgcagcgctcctgtaccatttcgactggaagctgcctggtgggatgctgccgagtgaattggacatggcggaggagatgggcatcactgcccgaaggaagcgcgacctttacctgcatccagtcgttgtcagtgtgccaccacatgtctcataaaccatagctgttctacttgctattttaccgtagctatatgctttattgatgcagcaaagttcactagtacacacagcctctatagtgacggttctatagacgttttcactgacgcttttcagtgccgccagtgctaggggccgtcattttcattggcggttattctagaaccgtcagtggaaatgctattttcactggcggttttataaagaaaaccgccagtgaaaatagcatttccactggcgggcggtttgttttatttagccgccagtggaaagttttctcgtctttttttaaattttcaatcagtactgaaatttatatatatttac

SEQ ID NO: 49707 - DNA, 1755 bp, Zea Mays
cggccatgtgcctacgacagctcgggacttcgggagccgcgggtgatcggaccgcgccccggccgggtggccttgcgtacggcagtggaaagtggtgatgcgctcagccgacacacacaccgcaaaaggcccacgagaagaccccgccggcccgccctctccctccccacctctactccacctccaatcctccccgttgctgtcccgccggcgtcgaagctcgagagaagggtgagcaccttgccgcgaggtgtgtccggtgagctagctagggacgcgccagctcgtgctgatctgacctggaagctctggaggcgatgaaagcgctcggacgggcgatgaggtgggcttcctgctgcaagctctcggacggggatgaaccaggtaggaggaagaaggacgcatcgtggcggatcttttcactgaaggagcttcagtcagcaacgaacaatttcaattacgataacaaggtcggcgagggtgggtttggcagtgtctattggggccagctctgggatgggtcacaggttgctgtgaagaggctcaagagttggagcaacaaagctgaaacagaatttgctgtcgaggtggagattctggcacggcacgcagcagagtgcaatctcagttgggaaagaaggatgaagatcgccgtcgattccgcagaagggatcgcttatctgcatcaccatgcgacgccacacatcattcatagagatgtcaaggcgagcaacgttctcctggattcgaatttccaagctcgggttgctgactttgggttcgccaagctagttccagacggcgcgacgcatgtcaccacaagggtgaaaggcacactcggttatctcgcaccagagtacgcgatgcttgggaaggcctctgaaagctgcgatgtcttcagtctcggagtcatgctcctagagcttgccagcgggaaaaagccagtggagaagcttaaccccaccacgaagcgaaccatagctgagtgggctcttcctctagctcgggacaggaagttcaaggaaattgccgatccaaagctcaatggtagcttcgtcgaggacgagctgaagcgaatggtgctcgttgggctcgcctgttcccaggacaagccagagcagagacccgtaatgtctgaagtcgtcgagctgctcagaggagaatctaccgagaggctttccaggctggagaatggtgatctgttcaagcctgatatctcgttccatggctcatccggacctgatagctcggactgcgtcacggaggagaggagtcccaaggcagatgcgacagaggaggctgttgattcaagtgagacggttccctcagcaaggtagtgtgatgcacggtggtgtactgtcagtaggtgccctgagctccttgcctgggggaaatgtgtttatcagttcatttttgtggttattccttgctatttagcaagttaatctgggagcctccttgcccggttctcttgtgtggtgtcattccttcgtgttggcatggttctatggcttgtaaaattctgtatgtaaatctgggcctggttccatcccttcgtgtagcaagcagttcactgcactgtggttagcgttttagctacttcagtccattaatgatttgtgtgtaagtctgtaatatgtatttttttaggtttttatgatggaacttcgtttttctaaaagatttttattttttcaagggacaatgaactaatttttttggaaaatagaaatctattatgaaaatgaggttctc

SEQ ID NO: 49708 - DNA, 1694 bp, Zea Mays
catgtgcctacgacagctcgggacttcgggagccgcgggtgatcggaccgcgccccggccgggtggccttgcgtacggcagtggaaagtggtgatgcgctcagccgacacacacaccgcaaaaggcccacgagaagaccccgccggcccgccctctccctccccacctctactccacctccaatcctccccgttgctgtcccgccggcgtcgaagctcgagagaagggtgagcaccttgccgcgaggtgtgtccggtgagctagctagggacgcgccagctcgtgctgatctgacctggaagctctggaggcgatgaaagcgctcggacgggcgatgaggtgggcttcctgctgcaagctctcggacggggatgaaccaggtaggaggaagaaggacgcatcgtggcggatcttttcactgaaggagcttcagtcagcaacgaacaatttcaattacgataacaaggttgctgtgaagaggctcaagagttggagcaacaaagctgaaacagaatttgctgtcgaggtggagattctggcacggcacgcagcagagtgcaatctcagttgggaaagaaggatgaagatcgccgtcgattccgcagaagggatcgcttatctgcatcaccatgcgacgccacacatcattcatagagatgtcaaggcgagcaacgttctcctggattcgaatttccaagctcgggttgctgactttgggttcgccaagctagttccagacggcgcgacgcatgtcaccacaagggtgaaaggcacactcggttatctcgcaccagagtacgcgatgcttgggaaggcctctgaaagctgcgatgtcttcagtctcggagtcatgctcctagagcttgccagcgggaaaaagccagtggagaagcttaaccccaccacgaagcgaaccatagctgagtgggctcttcctctagctcgggacaggaagttcaaggaaattgccgatccaaagctcaatggtagcttcgtcgaggacgagctgaagcgaatggtgctcgttgggctcgcctgttcccaggacaagccagagcagagacccgtaatgtctgaagtcgtcgagctgctcagaggagaatctaccgagaggctttccaggctggagaatggtgatctgttcaagcctgatatctcgttccatggctcatccggacctgatagctcggactgcgtcacggaggagaggagtcccaaggcagatgcgacagaggaggctgttgattcaagtgagacggttccctcagcaaggtagtgtgatgcacggtggtgtactgtcagtaggtgccctgagctccttgcctgggggaaatgtgtttatcagttcatttttgtggttattccttgctatttagcaagttaatctgggagcctccttgcccggttctcttgtgtggtgtcattccttcgtgttggcatggttctatggcttgtaaaattctgtatgtaaatctgggcctggttccatcccttcgtgtagcaagcagttcactgcactgtggttagcgttttagctacttcagtccattaatgatttgtgtgtaagtctgtaatatgtatttttttaggtttttatgatggaacttcgtttttctaaaagatttttattttttcaagggacaatgaactaatttttttggaaaatagaaatctattatgaaaatgaggttctc

SEQ ID NO: 49709 - DNA, 1740 bp, Zea Mays
catgtgcctacgacagctcgggacttcgggagccgcgggtgatcggaccgcgccccggccgggtggccttgcgtacggcagtggaaagtggtgatgcgctcagccgacacacacaccgcaaaaggcccacgagaagaccccgccggcccgccctctccctccccacctctactccacctccaatcctccccgttgctgtcccgccggcgtcgaagctcgagagaagggtgagcaccttgccgcgaggtgtgtccggtgagctagctagggacgcgccagctcgtgctgatctgacctggaagctctggaggcgatgaaagcgctcggacgggcgatgaggtgggcttcctgctgcaagctctcggacgggtaggaggaagaaggacgcatcgtggcggatcttttcactgaaggagcttcagtcagcaacgaacaatttcaattacgataacaaggtcggcgagggtgggtttggcagtgtctattggggccagctctgggatgggtcacaggttgctgtgaagaggctcaagagttggagcaacaaagctgaaacagaatttgctgtcgaggtggagattctggcacggcacgcagcagagtgcaatctcagttgggaaagaaggatgaagatcgccgtcgattccgcagaagggatcgcttatctgcatcaccatgcgacgccacacatcattcatagagatgtcaaggcgagcaacgttctcctggattcgaatttccaagctcgggttgctgactttgggttcgccaagctagttccagacggcgcgacgcatgtcaccacaagggtgaaaggcacactcggttatctcgcaccagagtacgcgatgcttgggaaggcctctgaaagctgcgatgtcttcagtctcggagtcatgctcctagagcttgccagcgggaaaaagccagtggagaagcttaaccccaccacgaagcgaaccatagctgagtgggctcttcctctagctcgggacaggaagttcaaggaaattgccgatccaaagctcaatggtagcttcgtcgaggacgagctgaagcgaatggtgctcgttgggctcgcctgttcccaggacaagccagagcagagacccgtaatgtctgaagtcgtcgagctgctcagaggagaatctaccgagaggctttccaggctggagaatggtgatctgttcaagcctgatatctcgttccatggctcatccggacctgatagctcggactgcgtcacggaggagaggagtcccaaggcagatgcgacagaggaggctgttgattcaagtgagacggttccctcagcaaggtagtgtgatgcacggtggtgtactgtcagtaggtgccctgagctccttgcctgggggaaatgtgtttatcagttcatttttgtggttattccttgctatttagcaagttaatctgggagcctccttgcccggttctcttgtgtggtgtcattccttcgtgttggcatggttctatggcttgtaaaattctgtatgtaaatctgggcctggttccatcccttcgtgtagcaagcagttcactgcactgtggttagcgttttagctacttcagtccattaatgatttgtgtgtaagtctgtaatatgtatttttttaggtttttatgatggaacttcgtttttctaaaagatttttattttttcaagggacaatgaactaatttttttggaaaatagaaatctattatgaaaatgaggttctc

SEQ ID NO: 49710 - DNA, 1570 bp, Zea Mays
ttccacccgccggaacactggtaaccctcacgccggcgcagccgcagccgaggcgccatgaacaacctccggaagcgcatgatctcccttctcctccgggcacctggatcaccatacgtcccttgcccccacttcttcccgctcttctatccccaccgcctcctctccgccaccaaatgcgtcgctacaaaaccattcgccgtcgaggactacctcgtcgccacatgcggcctcacccaagcacaggccctcaaggcgtcgaagcatgtctcccatctgaaggatccctcgaaagccgacgcggtcgtcgccttcctctccaacctcggcctgtccagcgccgagatcaccgacgtcgtgaccagggaccccaaagtcctctgctccgacgtggagagatccctcaccgctcgcgtcgccgagctcaccgacctcgggttttcacgtccggagatcgtccgccttctcatcgttggcatgaaccacttccgccatagctcgcttcgcctcaatcttgagttttggatctcggtctttggctctctcgacgagctcattcgggcgctcagaattaacgccgctctcctcagcacaaggattgaggaggtctgcaagcccaacttggagctccttcaagagtgtggtataaatgtttctgatatctccaacagcttcatgtcccgtgtgctcaccagggaccctaagagcctgcaggaagctttggctcgccttcatgagttcagaatccagccgggctctcaacctttcttccgtgggctttatacatttgcaatccttggcagcgggaagataaccaagagcattcagctgtttgagaagcttggatggtcaaaggaccatatagtatcagcggtgaagagagacccgactatattgggtttcaccgaggagagggttcgaagaaacatggaattcttgatcagggttgtcggattggagggcaaaggggttgttcaatgacgaggctagtttcctttctgtcgccgctataggcgatgagaaatttcggcgccgatacgtgcatccttacgaggaggattttccaggccttgctgctgcttttgcttctagctgtgctggagaacaccaatgggaacggctatataagatgacaggcgaaaataaagaaagctgacaattgttctggaaagtacaatcaggaacctgctgcaagccttgtttttcatcaccatggctgcagaacaatctctaactacgtgattggttgtctacccgtgtacaaccgtgctctcaacgtgcgttgaccagaatgcggccggtgttcggtttattgcgtacacgagtctaggattgcagctgcagggaaggctagaaatacctcctttttgaccagagtgcggccggtgtttggtttattgtgtagacgagtcatccgcagctgcagggcaggctagacctcctttaactgtatccgtaggtacgtataggacatttcacttggttaccggtatcatctcattttgtatctgtaaagtagaaactgtgcgagaatgaaaatgagaaccactgtttctttattgaataaagc

SEQ ID NO: 49711 - DNA, 669 bp, Zea Mays
cgtcgttgttcgtgcatccccaagaaatcccaagcatcgggtgaaggcgaagctagtcgggtgatattcaccaagtgctcgacaaaagctcgaaccagtcgtcaattttgtggtttcaagtcggatgtcataagggtaagttaattcatattctagtcaattaggtctataaatagattaaatagaattgttggtcgcaataaatgctattaatttagcatgcatatattgtgatgatcgatttagataaataggtaaatcaagtaattaagatagacagttaaagagttgataaaaagctaggaataaaaatagatgttctagtgttattatgtcaatttggttaatggatgtagtcgatgccctgctgtgatattcatggtgcttaatgcttgattttaagtgtttcatcctttttactatagattatctatattatactcgttatactcatgctcatacatgtgcatcatgcatctcatgaggtacgataattaatcacgtgatgcggaagatgacccaagtcgaccccaagcgcgggctactccgcatggcgatgctaatggacgaacctgcctgatcaagtgccaggacaatgatgatcgtcaagtggacgtcgcctaacaaacactaacctagtgttattcaggcaagcccggtgcattcgcc

SEQ ID NO: 49712 - DNA, 329 bp, Zea Mays
aagactatgtggcccaagaagacgacaacgacttcttcattgaaatggagctgtgaaatctgcctggtggaagcacccaccgagtgccacttacaacaacattttgcatggcatccagtattcttgcttcataaagttgcagaaaactcagcacttattctagtttttggtagtttatttggaggcgcactcctttggcactttgggtccgtcctttttattgtcatgccaggaagcaatttattttatccttcctattgcagtactcaaaaactgtgttgagtactctattaatattgtgtgataacaagaacacatgttggtggttt

SEQ ID NO: 49713 - DNA, 1594 bp, Zea Mays
ggtggaataatatgccaaccatctctctccggtccggtccggagcggttgaagcgaagcgagagtcaactaccgccgccctctctctagtccagatttccagcggtccagaccgagagctcggctccctacacgacatcatcatggacgccgccccgctcctcgctctcctcctcgcggccgtgtccctctccgcggcggcggcgggcgacggcgcgcacccgggctactccgacgagggcacctgcacggtggaacgccgccggagcgggcgtgggctcgggcccggagctgcggcgcctggaggagcgccggcccgggcgcatcatcgacatcacgcacgcgtacgtgccggaccttctggcgttcgcgccgggggctgtcacggggcccttggtccacctcaaggagtccatggcgaacgggtccgagtacaacctgtcggagctgcggttggagtgccacatgggcacccacgtcgacgcgccaggccacatgaaccaaggccacttcgccgccggcctcgacgtggacacgctcgacctcgacgtcctcaacggacctgcgttgctggttgatgttccgagggacacaaatataacagctgaagcgatggaattcctgaatatccctagaggagttcgccgagttctattcaggacgctgaacactgacaggaagttgatgtggaggaagggaggtgacatgagctatgttgggtttacagaggatggcgcacagtggctagttgacaacactgacataaagctagtcggtaagaaactatgtccctgactgcatacagatcgagacaaacctggtttttcttcttcctttcttttttatccctgacaaagctttgttttccttacaatgctggtcgccatctatccatcacatttcgtcttcatgaacctgacacgcacttgccaagaatccataaaacaaactccctttgaatttcttctgtcatatttgttggtgggtcagttggaacttataatgtactcgtactgcgaattatgcaggaatcgacagtctatcggttgcagcatttgagcacttgatctctgcccatgtggtcttcttcaagaccccggatataatccctgtcgaaggcctgaagctagacaacattgagacgggaatatacatgctgcattgtttacctctcagactggttggagccgagggtgcaccgaccagatgcatcctcatcaagtgatcacccccctgctcttgctggaggtgacattgtatcatgccagctgagctgatgcttcatcgtggccaacgcattgattcgcagtcttcgtcttcgtctatatgaaacatagtgttgtatgcccatgtagatatgcttgtacggacaatagagacacagcaatacttccatcaaggaaatacttttgggtaagccggtaatgtaaaagacagacatacagttgactgaataaactagaggcctgagaggctgaggcctcgtgcttcacaaatgacaaatgcagaaatcagtgtaagttctgaaaagaagaagaaacattaacggtgtatttggtttgtggagccactttatgcttcatgaggtgatgcat

SEQ ID NO: 49714 - DNA, 1903 bp, Zea Mays
ggtggaataatatgccaaccatctctctccggtccggtccggagcggttgaagcgaagcgagagtcaactaccgccgccctctctctagtccagatttccagcggtccagaccgagagctcggctccctacacgacatcatcatggacgccgccccgctcctcgctctcctcctcgcggccgtgtccctctccgcggcggcggcgggcgacggcgcgcacccgggctactccgacgagggcacctgcacggtggaacgccgccggagcgggcgtgggctcgggcccggagctgcggcgcctggaggagcgccggcccgggcgcatcatcgacatcacgcacgcgtacgtgccggaccttctggcgttcgcgccgggggctgtcacggggcccttggtccacctcaaggagtccatggcgaacgggtccgagtacaacctgtcggagctgcggttggagtgccacatgggcacccacgtcgacgcgccaggccacatgaaccaaggccacttcgccgccggcctcgacgtggacacgctcgacctcgacgtcctcaacggacctgcgttgctggttgatgttccgagggacacaaatataacaggtagaatacaacacttcaaatttttttcatttagtgaaaactagatacttaaaccaaattatctgttgaacggcctcattcccaaataactctatgcagctgaagcgatggaattcctgaatatccctagaggagttcgccgagttctattcaggacgctgaacactgacaggaagttgatgtggaggaagggaggtgacatgagctatgttgggtttacagaggatggcgcacagtggctagttgacaacactgacataaagctagtcggtaagaaactatgtccctgactgcatacagatcgagacaaacctggtttttcttcttcctttcttttttatccctgacaaagctttgttttccttacaatgctggtcgccatctatccatcacatttcgtcttcatgaacctgacacgcacttgccaagaatccataaaacaaactccctttgaatttcttctgtcatatttgttggtgggtcagttggaacttataatgtactcgtactgcgaattatgcaggaatcgacagtctatcggttgcagcatttgagcacttgatctctgcccatgtggtcttcttcaagaccccggtaagatccatatagttttgctggccagaacatttcaggcataacccagataaattcggctgcatttagcacacctgtaatctcattctgttattctcttgttctaccgcagaagattccgatgccagttgctactggctacataactcaagaaaaagaaaacatgtttgcttctaaatcatcgattaattttcccctttattgtaccaggatataatccctgtcgaaggcctgaagctagacaacattgagacgggaatatacatgctgcattgtttacctctcagactggttggagccgagggtgcaccgaccagatgcatcctcatcaagtgatcacccccctgctcttgctggaggtgacattgtatcatgccagctgagctgatgcttcatcgtggccaacgcattgattcgcagtcttcgtcttcgtctatatgaaacatagtgttgtatgcccatgtagatatgcttgtacggacaatagagacacagcaatacttccatcaaggaaatacttttgggtaagccggtaatgtaaaagacagacatacagttgactgaataaactagaggcctgagaggctgaggcctcgtgcttcacaaatgacaaatgcagaaatcagtgtaagttctgaaaagaagaagaaacattaacggtgtatttggtttgtggagccactttatgcttcatgaggtgatgcat

SEQ ID NO: 49715 - DNA, 1335 bp, Zea Mays
ggtggaataatatgccaaccatctctctccggtccggtccggagcggttgaagcgaagcgagagtcaactaccgccgccctctctctagtccagatttccagcggtccagaccgagagctcggctccctacacgacatcatcatggacgccgccccgctcctcgctctcctcctcgcggccgtgtccctctccgcggcggcggcgggcgacggcgcgcacccgggctactccgacgagggcacctgcacggtggaacgccgccggagcgggcgtgggctcgggcccggagctgcggcgcctggaggagcgccggcccgggcgcatcatcgacatcacgcacgcgtacgtgccggaccttctggcgttcgcgccgggggctgtcacggggcccttggtccacctcaaggagtccatggcgaacgggtccgagtacaacctgtcggagctgcggttggagtgccacatgggcacccacgtcgacgcgccaggccacatgaaccaaggccacttcgccgccggcctcgacgtggacacgctcgacctcgacgtcctcaacggacctgcgttgctggttgatgttccgagggacacaaatataacagcgatggaattcctgaatatccctagaggagttcgccgagttctattcaggacgctgaacactgacaggaagttgatgtggaggaagggaggtgacatgagctatgttgggtttacagaggatggcgcacagtggctagttgacaacactgacataaagctagtcggaatcgacagtctatcggttgcagcatttgagcacttgatctctgcccatgtggtcttcttcaagaccccggatataatccctgtcgaaggcctgaagctagacaacattgagacgggaatatacatgctgcattgtttacctctcagactggttggagccgagggtgcaccgaccagatgcatcctcatcaagtgatcacccccctgctcttgctggaggtgacattgtatcatgccagctgagctgatgcttcatcgtggccaacgcattgattcgcagtcttcgtcttcgtctatatgaaacatagtgttgtatgcccatgtagatatgcttgtacggacaatagagacacagcaatacttccatcaaggaaatacttttgggtaagccggtaatgtaaaagacagacatacagttgactgaataaactagaggcctgagaggctgaggcctcgtgcttcacaaatgacaaatgcagaaatcagtgtaagttctgaaaagaagaagaaacattaacggtgtatttggtttgtggagccactttatgcttcatgaggtgatgcat

SEQ ID NO: 49716 - DNA, 316 bp, Zea Mays
caacacttggtgaattctgcttcacaatgataggaagacgccgacatcgaaggatcaaaaagcaacgtcgctatgaacgcttggctgccacaagccagttatccctgtggttaactttttctgacacctctagcttcaaactccgaaggtctaaaggatcgataggccacgctttcacggttcgtattcgtactggaaatcagaatcaaacgagcttttacccttttgttcccaacgagatattctgttctcggttgagctccattcttaagaacacctgcgttatcttttaacagatgtgccgccccaggcaact

SEQ ID NO: 49717 - DNA, 117 bp, Zea Mays
caacacttggtgaattctgcttcacaatgataggaagacgccgacatcgaaggatcaaaaagcaacgtcgctatgaacgcttggctgccacaagccagttatccctgcctgtttcac

SEQ ID NO: 49718 - DNA, 3271 bp, Zea Mays
cttataagtactattttagagaagttaaatttgccgatagtggaagagagaaacatgtttaattgaatgttatagtagcaaaaactccgaacagctaatgccaccgctttccttatcttgggcgttggacggacggggcgagcgagcgactcgagcgtaccgccgccgccatggtggcgctcgcctcactctcatctctctgtccctgcggcatcgcccgccgccgcgctgcgtcagccacttcatccaccgccttttccatctcgtgctgcgccgtcgcgaccccgtccttctcagggaaaggaccccaggaatctagaacaccccgaagaaggctgaggaaaactgagggtgctaccaagagcctggaagattcggtcaagcgaaagatggagcagttctatgaaggggccgatggtccacctctgcgagtgctccctattggcggtcttggggaaatcggcatgaattgcatgcttgtggggaattatgatcgatatatcttgattgatgctggggttatgttcccagattatgatgagtttggtgtgcaaaagattataccagacaccacgttcatcaagaaatggagccacaaaattgaagctgttatcatcacgcatggccatgaagatcacatcggtgcgttgccttgggtcattccagcactcgattcaacaacaccgatttttgcatcatctttcaccatggagctaataaagaagcgtttgaaggagtttgggatcttcctctcatccaggcttaaggttttaagaattaaaaagagatttcaggctggaccttttgaagttgaacccatccgtgtaactcattcaattcctgactgttgtggcttagtgcttcgctgtggtgatgggataattttccatactggtgactggaaaattgatgaatcaccagtggatggaaaaaaatttgaccgacaagcattggaggagctctccaaagaaggtgttactcttatgatgagtgactcaacaaatgttctttcccctggaagatcaatcagcgaatctgttgttgctggttcattgctgcgacatatttcggaagcaaaaggaagagtaattacgacacaatttgcttcaaacatacatcgaattgggagcatcaaagctgctgcagatttaactggtcgaaaaatggtgtttgttggaatgtcactcaggacataccttgaagctgctttcaaggatggaaaggcaccactggatccatcaaccttggtcaaggtagaggacatggatgcatatgcgcctaaagatcttctggtggtcactacaggttcacaaggagagccacgtgcagctctgaatcttgcttcttatgggggaagtcatgctcttaaactatcgaaagaggatgtccttctttattcagctaaggtcattcctggaaatgagacacgggtaatgaagatgatgaatcgtctcactgatcttggccccaaaattatcatgggtaaagattctggcctccatacctctggacatgcctaccgagaggagctggaggaagttcttcggattgttaaaccacaacatttcttgcctgttcatggagaactcctatttctcaaagaacatgaattacttggaagatcaactggcataaggcacacaactgtaataaaaaatggagagatgcttggtgtgtcacatctaagaaacagaagagttttgtccaatgggtttgtttcattagggaaggaggatcttcagctcatgtatagtgatggtgataaggcttttggtacatccactgatctctgcgttgatgagagactaagaattgcatctgatggcattatttttgtaagtatggagatcttccgacctcagaaggaacatgggttagcgcagtcaggtttgaaaggaaaatttaagattaccacaagatgtctatggcttgataatggaagattattggacgcgctctacaaagcagctcatgctgcattgtcaagctgtcctgtgaattgtccacatagtcacatggagaggatggtagctgaaatcttgaggaaaatggtacggaagtatagtggaaagaggcctgacgtcattgctgttgctacagagaacaccacagcaggtttctcagaacacctcgacactaaagcatctggaaattttggaccgtcctcagctactagccacctgagcaggagtccagctacgagtcttgaaggcagttataaaacacacccagacaacccagaggtggatgctgaagaaatccttcccgagactgtgagaacaacacccgacgatgcaaccacaagctccaatggcgaagcattattctcttcagatttacatcagcctaaaacattggagcacttttgggagtcattcaaatcccctacagctgtcaaaattgcacggatcgtcaatgggggggacaaacaaaatttcggcaagattggcataatgggtcaggactcattaatccagtcagctcctgctccagttaaatcctcaaaacggaacaagtggaaacctgaggaaattaagagcttaatacagatgcgtggcgaaatgaatgagaaatttcagagcgtgaaaggaagaatggtactgtggaaggagatttctgataccatgttgaaccaaggagtaagtcgtactccggcacagtgcaaatctctatggacatcgctagttcagaaatatgaggaaagcaaggatacggaaagcatgaagacttggccgtatttctcggccatggataagattctatcgcagcaaggggagatggcaaccaaaggatagaaaaaggcttgtagcttagtggtagaaatttagaatattgattggtatgttgcagcagagcccagtcagtctagtaatataaagatgaaatgtctgtctacagtgcctggtgatctattgggatcggattcttttgttttgtgtaagacatgcagtagcacaagatcgagatgcatcgactggcttgaaattaagcttcagggcccgtggactcagagcggggtagccaggagcgctctattcttagcaacaggcagacatgtgtggttttatctgccagataacgtttgtaactcctataatgtaataggctacacggtaggcgaacggcgaacccctaaaagacaactgatgtatcatatgttttgaggagttatgtaatcgcctgcacggcatatacgtgtacttttcttcaaagcgactgtgtacatcaatggtggatacatggtcgcccccctgttgtctgacaaaagaaa

SEQ ID NO: 49719 - DNA, 1303 bp, Zea Mays
gttaaatttgccgatagtggaagagagaaacatgtttaattgaatgttatagtagcaaaaactccgaacagctaatgccaccgctttccttatcttgggcgttggacggacggggcgagcgagcgactcgagcgtaccgccgccgccatggtggcgctcgcctcactctcatctctctgtccctgcggcatcgcccgccgccgcgctgcgtcagccacttcatccaccgccttttccatctcgtgctgcgccgtcgcgaccccgtccttctcagggaaaggaccccaggaatctagaacaccccgaagaaggctgaggaaaactgagggtgctaccaagagcctggaagattcggtcaagcgaaagatggagcagttctatgaaggggccgatggtccacctctgcgagtgctccctattggcggtcttggggaaatcggcatgaattgcatgcttgtggggaattatgatcgatatatcttgattgatgctggggttatgttcccagattatgatgagtttggtgtgcaaaagattataccagacaccacgttcatcaagaaatggagccacaaaattgaagctgttatcatcacgcatggccatgaagatcacatcggtgcgttgccttgggtcattccagcactcgattcaacaacaccgatttttgcatcatctttcaccatggagctaataaagaagcgtttgaaggagtttgggatcttcctctcatccaggcttaaggttttaagaattaaaaagagatttcaggctggaccttttgaagttgaacccatccgtgtaactcattcaattcctgactgttgtggcttagtgcttcgctgtggtgatgggataattttccatactggtgactggaaaattgatgaatcaccagtggatggaaaaaaatttgaccgacaagcattggaggagctctccaaagaaggtgttactcttatgatgagtgactcaacaaatgttctttcccctggaagatcaatcagcgaatctgttgttgctggttcattgctgcgacatatttcggaagcaaaaggaagagtaattacgacacaatttgcttcaaacatacatcgaattgggagcatcaaagctgctgcagatttaactggtcgaaaaatggtgtttgttggaatgtcactcaggacataccttgaagctgctttcaaggatggaaaggcaccactggatccatcaaccttggtgaccaagatgaccaaagtattgaaaccttttctcagatctttgtcgagagatgcagcagcctgactccaccatgaac

SEQ ID NO: 49720 - DNA, 3207 bp, Zea Mays
aaacatgtttaattgaatgttatagtagcaaaaactccgaacagctaatgccaccgctttccttatcttgggcgttggacggacggggcgagcgagcgactcgagcgtaccgccgccgccatggtggcgctcgcctcactctcatctctctgtccctgcggcatcgcccgccgccgcgctgcgtcagccacttcatccaccgccttttccatctcgtgctgcgccgtcgcgaccccgtccttctcagggaaaggaccccaggaatctagaacaccccgaagaaggctgaggaaaactgagggtgctaccaagagcctggaagattcggtcaagcgaaagatggagcagttctatgaaggggccgatggtccacctctgcgagtgctccctattggcggtcttggggaaatcggcatgaattgcatgcttgtggggaattatgatcgatatatcttgattgatgctggggttatgttcccagattatgatgagtttggtgtgcaaaagattataccagacaccacgttcatcaagaaatggagccacaaaattgaagctgttatcatcacgcatggccatgaagatcacatcggtcattccagcactcgattcaacaacaccgatttttgcatcatctttcaccatggagctaataaagaagcgtttgaaggagtttgggatcttcctctcatccaggcttaaggttttaagaattaaaaagagatttcaggctggaccttttgaagttgaacccatccgtgtaactcattcaattcctgactgttgtggcttagtgcttcgctgtggtgatgggataattttccatactggtgactggaaaattgatgaatcaccagtggatggaaaaaaatttgaccgacaagcattggaggagctctccaaagaaggtgttactcttatgatgagtgactcaacaaatgttctttcccctggaagatcaatcagcgaatctgttgttgctggttcattgctgcgacatatttcggaagcaaaaggaagagtaattacgacacaatttgcttcaaacatacatcgaattgggagcatcaaagctgctgcagatttaactggtcgaaaaatggtgtttgttggaatgtcactcaggacataccttgaagctgctttcaaggatggaaaggcaccactggatccatcaaccttggtcaaggtagaggacatggatgcatatgcgcctaaagatcttctggtggtcactacaggttcacaaggagagccacgtgcagctctgaatcttgcttcttatgggggaagtcatgctcttaaactatcgaaagaggatgtccttctttattcagctaaggtcattcctggaaatgagacacgggtaatgaagatgatgaatcgtctcactgatcttggccccaaaattatcatgggtaaagattctggcctccatacctctggacatgcctaccgagaggagctggaggaagttcttcggattgttaaaccacaacatttcttgcctgttcatggagaactcctatttctcaaagaacatgaattacttggaagatcaactggcataaggcacacaactgtaataaaaaatggagagatgcttggtgtgtcacatctaagaaacagaagagttttgtccaatgggtttgtttcattagggaaggaggatcttcagctcatgtatagtgatggtgataaggcttttggtacatccactgatctctgcgttgatgagagactaagaattgcatctgatggcattatttttgtaagtatggagatcttccgacctcagaaggaacatgggttagcgcagtcaggtttgaaaggaaaatttaagattaccacaagatgtctatggcttgataatggaagattattggacgcgctctacaaagcagctcatgctgcattgtcaagctgtcctgtgaattgtccacatagtcacatggagaggatggtagctgaaatcttgaggaaaatggtacggaagtatagtggaaagaggcctgacgtcattgctgttgctacagagaacaccacagcaggtttctcagaacacctcgacactaaagcatctggaaattttggaccgtcctcagctactagccacctgagcaggagtccagctacgagtcttgaaggcagttataaaacacacccagacaacccagaggtggatgctgaagaaatccttcccgagactgtgagaacaacacccgacgatgcaaccacaagctccaatggcgaagcattattctcttcagatttacatcagcctaaaacattggagcacttttgggagtcattcaaatcccctacagctgtcaaaattgcacggatcgtcaatgggggggacaaacaaaatttcggcaagattggcataatgggtcaggactcattaatccagtcagctcctgctccagttaaatcctcaaaacggaacaagtggaaacctgaggaaattaagagcttaatacagatgcgtggcgaaatgaatgagaaatttcagagcgtgaaaggaagaatggtactgtggaaggagatttctgataccatgttgaaccaaggagtaagtcgtactccggcacagtgcaaatctctatggacatcgctagttcagaaatatgaggaaagcaaggatacggaaagcatgaagacttggccgtatttctcggccatggataagattctatcgcagcaaggggagatggcaaccaaaggatagaaaaaggcttgtagcttagtggtagaaatttagaatattgattggtatgttgcagcagagcccagtcagtctagtaatataaagatgaaatgtctgtctacagtgcctggtgatctattgggatcggattcttttgttttgtgtaagacatgcagtagcacaagatcgagatgcatcgactggcttgaaattaagcttcagggcccgtggactcagagcggggtagccaggagcgctctattcttagcaacaggcagacatgtgtggttttatctgccagataacgtttgtaactcctataatgtaataggctacacggtaggcgaacggcgaacccctaaaagacaactgatgtatcatatgttttgaggagttatgtaatcgcctgcacggcatatacgtgtacttttcttcaaagcgactgtgtacatcaatggtggatacatggtcgcccccctgttgtctgacaaaagaaa

SEQ ID NO: 49721 - DNA, 3165 bp, Zea Mays
gttatagtagcaaaaactccgaacagctaatgccaccgctttccttatcttgggcgttggacggacggggcgagcgagcgactcgagcgtaccgccgccgccatggtggcgctcgcctcactctcatctctctgtccctgcggcatcgcccgccgccgcgctgcgtcagccacttcatccaccgccttttccatctcgtgctgcgccgtcgcgaccccgtccttctcagggaaaggaccccaggaatctagaacaccccgaagaaggctgaggaaaactgagggtgctaccaagagcctggaagattcggtcaagcgaaagatggagcagttctatgaaggggccgatggtccacctctgcgagtgctccctattggcggtcttggggaaatcggcatgaattgcatgcttgtggggaattatgatcgatatatcttgattgatgctggggttatgttcccagattatgatgagtttggtgtgcaaaagattataccagacaccacgttcatcaagaaatggagccacaaaattgaagctgttatcatcacgcatggccatgaagatcacatcggtgcgttgccttgggtcattccagcactcgattcaacaacaccgatttttgcatcatctttcaccatggagctaataaagaagcgtttgaaggagtttgggatcttcctctcatccaggcttaaggttttaagaattaaaaagagatttcaggctggaccttttgaagttgaacccatccgtgtaactcattcaattcctgactgttgtggcttagtgcttcgctgtggtgatgggataattttccatactggtgactggaaaattgatgaatcaccagtggatggaaaaaaatttgaccgacaagcattggaggagctctccaaagaaggtgttactcttatcaatcagcgaatctgttgttgctggttcattgctgcgacatatttcggaagcaaaaggaagagtaattacgacacaatttgcttcaaacatacatcgaattgggagcatcaaagctgctgcagatttaactggtcgaaaaatggtgtttgttggaatgtcactcaggacataccttgaagctgctttcaaggatggaaaggcaccactggatccatcaaccttggtcaaggtagaggacatggatgcatatgcgcctaaagatcttctggtggtcactacaggttcacaaggagagccacgtgcagctctgaatcttgcttcttatgggggaagtcatgctcttaaactatcgaaagaggatgtccttctttattcagctaaggtcattcctggaaatgagacacgggtaatgaagatgatgaatcgtctcactgatcttggccccaaaattatcatgggtaaagattctggcctccatacctctggacatgcctaccgagaggagctggaggaagttcttcggattgttaaaccacaacatttcttgcctgttcatggagaactcctatttctcaaagaacatgaattacttggaagatcaactggcataaggcacacaactgtaataaaaaatggagagatgcttggtgtgtcacatctaagaaacagaagagttttgtccaatgggtttgtttcattagggaaggaggatcttcagctcatgtatagtgatggtgataaggcttttggtacatccactgatctctgcgttgatgagagactaagaattgcatctgatggcattatttttgtaagtatggagatcttccgacctcagaaggaacatgggttagcgcagtcaggtttgaaaggaaaatttaagattaccacaagatgtctatggcttgataatggaagattattggacgcgctctacaaagcagctcatgctgcattgtcaagctgtcctgtgaattgtccacatagtcacatggagaggatggtagctgaaatcttgaggaaaatggtacggaagtatagtggaaagaggcctgacgtcattgctgttgctacagagaacaccacagcaggtttctcagaacacctcgacactaaagcatctggaaattttggaccgtcctcagctactagccacctgagcaggagtccagctacgagtcttgaaggcagttataaaacacacccagacaacccagaggtggatgctgaagaaatccttcccgagactgtgagaacaacacccgacgatgcaaccacaagctccaatggcgaagcattattctcttcagatttacatcagcctaaaacattggagcacttttgggagtcattcaaatcccctacagctgtcaaaattgcacggatcgtcaatgggggggacaaacaaaatttcggcaagattggcataatgggtcaggactcattaatccagtcagctcctgctccagttaaatcctcaaaacggaacaagtggaaacctgaggaaattaagagcttaatacagatgcgtggcgaaatgaatgagaaatttcagagcgtgaaaggaagaatggtactgtggaaggagatttctgataccatgttgaaccaaggagtaagtcgtactccggcacagtgcaaatctctatggacatcgctagttcagaaatatgaggaaagcaaggatacggaaagcatgaagacttggccgtatttctcggccatggataagattctatcgcagcaaggggagatggcaaccaaaggatagaaaaaggcttgtagcttagtggtagaaatttagaatattgattggtatgttgcagcagagcccagtcagtctagtaatataaagatgaaatgtctgtctacagtgcctggtgatctattgggatcggattcttttgttttgtgtaagacatgcagtagcacaagatcgagatgcatcgactggcttgaaattaagcttcagggcccgtggactcagagcggggtagccaggagcgctctattcttagcaacaggcagacatgtgtggttttatctgccagataacgtttgtaactcctataatgtaataggctacacggtaggcgaacggcgaacccctaaaagacaactgatgtatcatatgttttgaggagttatgtaatcgcctgcacggcatatacgtgtacttttcttcaaagcgactgtgtacatcaatggtggatacatggtcgcccccctgttgtctgacaaaagaaa

SEQ ID NO: 49722 - DNA, 1071 bp, Zea Mays
tgccaccgctttccttatcttgggcgttggacggacggggcgagcgagcgactcgagcgtaccgccgccgccatggtggcgctcgcctcactctcatctctctgtccctgcggcatcgcccgccgccgcgctgcgtcagccacttcatccaccgccttttccatctcgtgctgcgccgtcgcgaccccgtccttctcagggaaaggaccccaggaatctagaacaccccgaagaaggctgaggaaaactgagggtgctaccaagagcctggaagattcggtcaagcgaaagatggagcagttctatgaaggggccgatggtccacctctgcgagtgctccctattggcggtcttggggaaatcggcatgaattgcatgcttgtggggaattatgatcgatatatcttgattgatgctggggttatgttcccagattatgatgagtttggtgtgcaaaagattataccagacaccacgttcatcaagaaatggagccacaaaattgaagctgttatcatcacgcatggccatgaagatcacatcggtgcgttgccttgggtcattccagcactcgattcaacaacaccgatttttgcatcatctttcaccatggagctaataaagaagcgtttgaaggagtttgggatcttcctctcatccaggcttaaggttttaagaattaaaaagagatttcaggctggaccttttgaagttgaacccatccgtgtaactcattcaattcctgactgttgtggcttagtgcttcgctgtggtgatgggataattttccatactggtgactggaaaattgatgaatcaccagtggatggaaaaaaatttgaccgacaagcattggaggagctctccaaagaaggtgttactcttatgatgagtgactcaacaaatgttctttcccctggaagatcaatcagcgaatctgttgttgctggttcattgctgcgacatatttcggaagcaaaaggaagagtaattacgacacaatttgcttcaaacatacatcgaattgggagcatcaaagctgctgcagatttaactggtcgaaaaatgaac

SEQ ID NO: 49723 - DNA, 1214 bp, Zea Mays
tgccaccgctttccttatcttgggcgttggacggacggggcgagcgagcgactcgagcgtaccgccgccgccatggtggcgctcgcctcactctcatctctctgtccctgcggcatcgcccgccgccgcgctgcgtcagccacttcatccaccgccttttccatctcgtgctgcgccgtcgcgaccccgtccttctcagggaaaggaccccaggaatctagaacaccccgaagaaggctgaggaaaactgagggtgctaccaagagcctggaagattcggtcaagcgaaagatggagcagttctatgaaggggccgatggtccacctctgcgagtgctccctattggcggtcttggggaaatcggcatgaattgcatgcttgtggggaattatgatcgatatatcttgattgatgctggggttatgttcccagattatgatgagtttggtgtgcaaaagattataccagacaccacgttcatcaagaaatggagccacaaaattgaagctgttatcatcacgcatggccatgaagatcacatcggtcattccagcactcgattcaacaacaccgatttttgcatcatctttcaccatggagctaataaagaagcgtttgaaggagtttgggatcttcctctcatccaggcttaaggttttaagaattaaaaagagatttcaggctggaccttttgaagttgaacccatccgtgtaactcattcaattcctgactgttgtggcttagtgcttcgctgtggtgatgggataattttccatactggtgactggaaaattgatgaatcaccagtggatggaaaaaaatttgaccgacaagcattggaggagctctccaaagaaggtgttactcttatgatgagtgactcaacaaatgttctttcccctggaagatcaatcagcgaatctgttgttgctggttcattgctgcgacatatttcggaagcaaaaggaagagtaattacgacacaatttgcttcaaacatacatcgaattgggagcatcaaagctgctgcagatttaactggtcgaaaaatggtgtttgttggaatgtcactcaggacataccttgaagctgctttcaaggatggaaaggcaccactggatccatcaaccttggtgaccaagatgaccaaagtattgaaaccttttctcagatctttgtcgagagatgcagcagcctgactccaccatgaac

SEQ ID NO: 49724 - DNA, 1217 bp, Zea Mays
tgccaccgctttccttatcttgggcgttggacggacggggcgagcgagcgactcgagcgtaccgccgccgccatggtggcgctcgcctcactctcatctctctgtccctgcggcatcgcccgccgccgcgctgcgtcagccacttcatccaccgccttttccatctcgtgctgcgccgtcgcgaccccgtccttctcagggaaaggaccccaggaatctagaacaccccgaagaaggctgaggaaaactgagggtgctaccaagagcctggaagattcggtcaagcgaaagatggagcagttctatgaaggggccgatggtccacctctgcgagtgctccctattggcggtcttggggaaatcggcatgaattgcatgcttgtggggaattatgatcgatatatcttgattgatgctggggttatgttcccagattatgatgagtttggtgtgcaaaagattataccagacaccacgttcatcaagaaatggagccacaaaattgaagctgttatcatcacgcatggccatgaagatcacatcggtgcgttgccttgggtcattccagcactcgattcaacaacaccgatttttgcatcatctttcaccatggagctaataaagaagcgtttgaaggagtttgggatcttcctctcatccaggcttaaggttttaagaattaaaaagagatttcaggctggaccttttgaagttgaacccatccgtgtaactcattcaattcctgactgttgtggcttagtgcttcgctgtggtgatgggataattttccatactggtgactggaaaattgatgaatcaccagtggatggaaaaaaatttgaccgacaagcattggaggagctctccaaagaagatgatgagtgactcaacaaatgttctttcccctggaagatcaatcagcgaatctgttgttgctggttcattgctgcgacatatttcggaagcaaaaggaagagtaattacgacacaatttgcttcaaacatacatcgaattgggagcatcaaagctgctgcagatttaactggtcgaaaaatggtgtttgttggaatgtcactcaggacataccttgaagctgctttcaaggatggaaaggcaccactggatccatcaaccttggtgaccaagatgaccaaagtattgaaaccttttctcagatctttgtcgagagatgcagcagcctgactccaccatgaac

SEQ ID NO: 49725 - DNA, 3124 bp, Zea Mays
tgccaccgctttccttatcttgggcgttggacggacggggcgagcgagcgactcgagcgtaccgccgccgccatggtggcgctcgcctcactctcatctctctgtccctgcggcatcgcccgccgccgcgctgcgtcagccacttcatccaccgccttttccatctcgtgctgcgccgtcgcgaccccgtccttctcagggaaaggaccccaggaatctagaacaccccgaagaaggctgaggaaaactgagggtgctaccaagagcctggaagattcggtcaagcgaaagatggagcagttctatgaaggggccgatggtccacctctgcgagtgctccctattggcggtcttggggaaatcggcatgaattgcatgcttgtggggaattatgatcgatatatcttgattgatgctggggttatgttcccagattatgatgagtttggtgtgcaaaagattataccagacaccacgttcatcaagaaatggagccacaaaattgaagctgttatcatcacgcatggccatgaagatcacatcggtgcgttgccttgggtcattccagcactcgattcaacaacaccgatttttgcatcatctttcaccatggagctaataaagaagcgtttgaaggagtttgggatcttcctctcatccaggcttaaggttttaagaattaaaaagagatttcaggctggaccttttgaagttgaacccatccgtgtaactcattcaattcctgactgttgtggcttagtgcttcgctgtggtgatgggataattttccatactggtgactggaaaattgatgaatcaccagtggatggaaaaaaatttgaccgacaagcattggaggagctctccaaagaagatcaatcagcgaatctgttgttgctggttcattgctgcgacatatttcggaagcaaaaggaagagtaattacgacacaatttgcttcaaacatacatcgaattgggagcatcaaagctgctgcagatttaactggtcgaaaaatggtgtttgttggaatgtcactcaggacataccttgaagctgctttcaaggatggaaaggcaccactggatccatcaaccttggtcaaggtagaggacatggatgcatatgcgcctaaagatcttctggtggtcactacaggttcacaaggagagccacgtgcagctctgaatcttgcttcttatgggggaagtcatgctcttaaactatcgaaagaggatgtccttctttattcagctaaggtcattcctggaaatgagacacgggtaatgaagatgatgaatcgtctcactgatcttggccccaaaattatcatgggtaaagattctggcctccatacctctggacatgcctaccgagaggagctggaggaagttcttcggattgttaaaccacaacatttcttgcctgttcatggagaactcctatttctcaaagaacatgaattacttggaagatcaactggcataaggcacacaactgtaataaaaaatggagagatgcttggtgtgtcacatctaagaaacagaagagttttgtccaatgggtttgtttcattagggaaggaggatcttcagctcatgtatagtgatggtgataaggcttttggtacatccactgatctctgcgttgatgagagactaagaattgcatctgatggcattatttttgtaagtatggagatcttccgacctcagaaggaacatgggttagcgcagtcaggtttgaaaggaaaatttaagattaccacaagatgtctatggcttgataatggaagattattggacgcgctctacaaagcagctcatgctgcattgtcaagctgtcctgtgaattgtccacatagtcacatggagaggatggtagctgaaatcttgaggaaaatggtacggaagtatagtggaaagaggcctgacgtcattgctgttgctacagagaacaccacagcaggtttctcagaacacctcgacactaaagcatctggaaattttggaccgtcctcagctactagccacctgagcaggagtccagctacgagtcttgaaggcagttataaaacacacccagacaacccagaggtggatgctgaagaaatccttcccgagactgtgagaacaacacccgacgatgcaaccacaagctccaatggcgaagcattattctcttcagatttacatcagcctaaaacattggagcacttttgggagtcattcaaatcccctacagctgtcaaaattgcacggatcgtcaatgggggggacaaacaaaatttcggcaagattggcataatgggtcaggactcattaatccagtcagctcctgctccagttaaatcctcaaaacggaacaagtggaaacctgaggaaattaagagcttaatacagatgcgtggcgaaatgaatgagaaatttcagagcgtgaaaggaagaatggtactgtggaaggagatttctgataccatgttgaaccaaggagtaagtcgtactccggcacagtgcaaatctctatggacatcgctagttcagaaatatgaggaaagcaaggatacggaaagcatgaagacttggccgtatttctcggccatggataagattctatcgcagcaaggggagatggcaaccaaaggatagaaaaaggcttgtagcttagtggtagaaatttagaatattgattggtatgttgcagcagagcccagtcagtctagtaatataaagatgaaatgtctgtctacagtgcctggtgatctattgggatcggattcttttgttttgtgtaagacatgcagtagcacaagatcgagatgcatcgactggcttgaaattaagcttcagggcccgtggactcagagcggggtagccaggagcgctctattcttagcaacaggcagacatgtgtggttttatctgccagataacgtttgtaactcctataatgtaataggctacacggtaggcgaacggcgaacccctaaaagacaactgatgtatcatatgttttgaggagttatgtaatcgcctgcacggcatatacgtgtacttttcttcaaagcgactgtgtacatcaatggtggatacatggtcgcccccctgttgtctgacaaaagaaa

SEQ ID NO: 49726 - DNA, 2669 bp, Zea Mays
attactgcatcctttgacaacaaatgtgtagggttggggagtgctgtatgacaggtcattccagcactcgattcaacaacaccgatttttgcatcatctttcaccatggagctaataaagaagcgtttgaaggagtttgggatcttcctctcatccaggcttaaggttttaagaattaaaaagagatttcaggctggaccttttgaagttgaacccatccgtgtaactcattcaattcctgactgttgtggcttagtgcttcgctgtggtgatgggataattttccatactggtgactggaaaattgatgaatcaccagtggatggaaaaaaatttgaccgacaagcattggaggagctctccaaagaaggtgttactcttatgatgagtgactcaacaaatgttctttcccctggaagatcaatcagcgaatctgttgttgctggttcattgctgcgacatatttcggaagcaaaaggaagagtaattacgacacaatttgcttcaaacatacatcgaattgggagcatcaaagctgctgcagatttaactggtcgaaaaatggtgtttgttggaatgtcactcaggacataccttgaagctgctttcaaggatggaaaggcaccactggatccatcaaccttggtcaaggtagaggacatggatgcatatgcgcctaaagatcttctggtggtcactacaggttcacaaggagagccacgtgcagctctgaatcttgcttcttatgggggaagtcatgctcttaaactatcgaaagaggatgtccttctttattcagctaaggtcattcctggaaatgagacacgggtaatgaagatgatgaatcgtctcactgatcttggccccaaaattatcatgggtaaagattctggcctccatacctctggacatgcctaccgagaggagctggaggaagttcttcggattgttaaaccacaacatttcttgcctgttcatggagaactcctatttctcaaagaacatgaattacttggaagatcaactggcataaggcacacaactgtaataaaaaatggagagatgcttggtgtgtcacatctaagaaacagaagagttttgtccaatgggtttgtttcattagggaaggaggatcttcagctcatgtatagtgatggtgataaggcttttggtacatccactgatctctgcgttgatgagagactaagaattgcatctgatggcattatttttgtaagtatggagatcttccgacctcagaaggaacatgggttagcgcagtcaggtttgaaaggaaaatttaagattaccacaagatgtctatggcttgataatggaagattattggacgcgctctacaaagcagctcatgctgcattgtcaagctgtcctgtgaattgtccacatagtcacatggagaggatggtagctgaaatcttgaggaaaatggtacggaagtatagtggaaagaggcctgacgtcattgctgttgctacagagaacaccacagcaggtttctcagaacacctcgacactaaagcatctggaaattttggaccgtcctcagctactagccacctgagcaggagtccagctacgagtcttgaaggcagttataaaacacacccagacaacccagaggtggatgctgaagaaatccttcccgagactgtgagaacaacacccgacgatgcaaccacaagctccaatggcgaagcattattctcttcagatttacatcagcctaaaacattggagcacttttgggagtcattcaaatcccctacagctgtcaaaattgcacggatcgtcaatgggggggacaaacaaaatttcggcaagattggcataatgggtcaggactcattaatccagtcagctcctgctccagttaaatcctcaaaacggaacaagtggaaacctgaggaaattaagagcttaatacagatgcgtggcgaaatgaatgagaaatttcagagcgtgaaaggaagaatggtactgtggaaggagatttctgataccatgttgaaccaaggagtaagtcgtactccggcacagtgcaaatctctatggacatcgctagttcagaaatatgaggaaagcaaggatacggaaagcatgaagacttggccgtatttctcggccatggataagattctatcgcagcaaggggagatggcaaccaaaggatagaaaaaggcttgtagcttagtggtagaaatttagaatattgattggtatgttgcagcagagcccagtcagtctagtaatataaagatgaaatgtctgtctacagtgcctggtgatctattgggatcggattcttttgttttgtgtaagacatgcagtagcacaagatcgagatgcatcgactggcttgaaattaagcttcagggcccgtggactcagagcggggtagccaggagcgctctattcttagcaacaggcagacatgtgtggttttatctgccagataacgtttgtaactcctataatgtaataggctacacggtaggcgaacggcgaacccctaaaagacaactgatgtatcatatgttttgaggagttatgtaatcgcctgcacggcatatacgtgtacttttcttcaaagcgactgtgtacatcaatggtggatacatggtcgcccccctgttgtctgacaaaagaaa

SEQ ID NO: 49727 - DNA, 2032 bp, Zea Mays
ccgccttggtcaaggtagaggacatggatgcatatgcgcctaaagatcttctggtggtcactacaggttcacaaggagagccacgtgcagctctgaatcttgcttcttatgggggaagtcatgctcttaaactatcgaaagaggatgtccttctttattcagctaaggtcattcctggaaatgagacacgggtaatgaagatgatgaatcgtctcactgatcttggccccaaaattatcatgggtaaagattctggcctccatacctctggacatgcctaccgagaggagctggaggaagttcttcggattgttaaaccacaacatttcttgcctgttcatggagaactcctatttctcaaagaacatgaattacttggaagatcaactggcataaggcacacaactgtaataaaaaatggagagatgcttggtgtgtcacatctaagaaacagaagagttttgtccaatgggtttgtttcattagggaaggaggatcttcagctcatgtatagtgatggtgataaggcttttggtacatccactgatctctgcgttgatgagagactaagaattgcatctgatggcattatttttgtaagtatggagatcttccgacctcagaaggaacatgggttagcgcagtcaggtttgaaaggaaaatttaagattaccacaagatgtctatggcttgataatggaagattattggacgcgctctacaaagcagctcatgctgcattgtcaagctgtcctgtgaattgtccacatagtcacatggagaggatggtagctgaaatcttgaggaaaatggtacggaagtatagtggaaagaggcctgacgtcattgctgttgctacagagaacaccacagcaggtttctcagaacacctcgacactaaagcatctggaaattttggaccgtcctcagctactagccacctgagcaggagtccagctacgagtcttgaaggcagttataaaacacacccagacaacccagaggtggatgctgaagaaatccttcccgagactgtgagaacaacacccgacgatgcaaccacaagctccaatggcgaagcattattctcttcagatttacatcagcctaaaacattggagcacttttgggagtcattcaaatcccctacagctgtcaaaattgcacggatcgtcaatgggggggacaaacaaaatttcggcaagattggcataatgggtcaggactcattaatccagtcagctcctgctccagttaaatcctcaaaacggaacaagtggaaacctgaggaaattaagagcttaatacagatgcgtggcgaaatgaatgagaaatttcagagcgtgaaaggaagaatggtactgtggaaggagatttctgataccatgttgaaccaaggagtaagtcgtactccggcacagtgcaaatctctatggacatcgctagttcagaaatatgaggaaagcaaggatacggaaagcatgaagacttggccgtatttctcggccatggataagattctatcgcagcaaggggagatggcaaccaaaggatagaaaaaggcttgtagcttagtggtagaaatttagaatattgattggtatgttgcagcagagcccagtcagtctagtaatataaagatgaaatgtctgtctacagtgcctggtgatctattgggatcggattcttttgttttgtgtaagacatgcagtagcacaagatcgagatgcatcgactggcttgaaattaagcttcagggcccgtggactcagagcggggtagccaggagcgctctattcttagcaacaggcagacatgtgtggttttatctgccagataacgtttgtaactcctataatgtaataggctacacggtaggcgaacggcgaacccctaaaagacaactgatgtatcatatgttttgaggagttatgtaatcgcctgcacggcatatacgtgtacttttcttcaaagcgactgtgtacatcaatggtggatacatggtcgcccccctgttgtctgacaaaagaaa

SEQ ID NO: 49728 - DNA, 516 bp, Zea Mays
acttaacagtggaaccaggcttgacctcgagaccagcaaatcgaccaactacacccgaagtttccaactaacagcatagaggaattgatcaacagaacagcgacgccccttttagagatggaaagggggttagggttttaaacgttcctggtcgtagctccggccaccgggggctcacttggccagcatctgcgcggaagccgcctcctactgctgctggtagttgatccggcggcggaacagcatgatgtgcgtctccaggtggtggatcgcgtagtgcaccgacccgcggctctgctgcactccgatcgcgcgccactcgttctgcaaagaagagaaggggaaaaatccccacaccaaaaaatcatctgggcatcaaataaccaaaccagcagggcaataatgcaatcaacagaaatgcaggtggaactgcaagcgtttacctcggataggaggcggttcttggggaggagcttggcgacctcgggcgggaggactaaaatcatgtataaacaa

SEQ ID NO: 49729 - DNA, 1352 bp, Zea Mays
gtcgatggccctcatgaaaatcacaaattgagagagggagaagggggtgggggttacgtaacacggcgattcaggaggggatagcatcgtcatcgcaaaatgcaggctctcctgctccccgcgcgggccgcgccgccgacgccggcgatgcttcggcagcgtgcggtttctgcctccgcgtgtgcgtcgcaggtctgccgccccctattcggtgccgccagttgcatctcctgtggggtccacggaagcgttcggcggcacctcacagtggcggtggcggcggccccgccctcgccttcgtcctcaccttcgtcgggaccgctctacccgacgcctccacccaccgagcaggaggtggagagggtcaagctcgagcaggttatgaggagactagagaaaacagcaaggtatttcaagaatttgggtaccctggggttctggtcccaattggtgtgcacaattatttctgctggaattttggcattctctacagttgtaacggggaaggtgacatcaccctttacattctatgcaactgctgctggtattgctgctgcttttatttcagtcttctggtcatttggttacatccgtctctctgaaaggcttagaaaaacatccaaagaacctgctaaggctcctccacgtgctgatgttgttaagagccttaaaaatggcatcgtggttaatattcttgggatgggcgctgctgttctcggcatgcaagctactgttggtgctttggtagcaaaagctctcacaacctctgcagtaccctattatcaggctgctggccaaagccctgtcttggctttagatgttttcctagttcaggttaaatccgtttgactcgtcgaaacgacccttgttttggaacggatggagcagaaaataaaaataaaatgcactggcttcagcgaacaccatcctgtcgcatttccttggggtggcgagctccctggagctgctgcgctcggtgtcactgcctccagcagaagccgccgtcccggccccggcccctgcacgggcctgagccatggcccgttgggcaggtcaagaaaaaccttcaatccttggctttggctctagacagttgctatttcttgattgcatgtacaacttgcatcaagaatacatacacatcgatgccttccagttcacctggacgcaacatgttcgcgtaattcccgccgagtgtgagctcttgcatgagcactcgcgaaccacatgtggcgcttgtttgctgtgcaagtgcaagtgagtgcagtgaccggctctcgctcgttcttaatcattgtacccgtttcgctggtctcaactctcacagcacagcggtcagcactagcacggcc

SEQ ID NO: 49730 - DNA, 1115 bp, Zea Mays
gtcgatggccctcatgaaaatcacaaattgagagagggagaagggggtgggggttacgtaacacggcgattcaggaggggatagcatcgtcatcgcaaaatgcaggctctcctgctccccgcgcgggccgcgccgccgacgccggcgatgcttcggcagcgtgcggtttctgcctccgcgtgtgcgtcgcaggtctgccgccccctattcggtgccgccagttgcatctcctgtggggtccacggaagcgttcggcggcacctcacagtggcggtggcggcggccccgccctcgccttcgtcctcaccttcgtcgggaccgctctacccgacgcctccacccaccgagcaggaggtggagagggtcaagctcgagcaggttatgaggagactagagaaaacagcaagtcttctggtcatttggttacatccgtctctctgaaaggcttagaaaaacatccaaagaacctgctaaggctcctccacgtgctgatgttgttaagagccttaaaaatggcatcgtggttaatattcttgggatgggcgctgctgttctcggcatgcaagctactgttggtgctttggtagcaaaagctctcacaacctctgcagtaccctattatcaggctgctggccaaagccctgtcttggctttagatgttttcctagttcaggcttcagcgaacaccatcctgtcgcatttccttggggtggcgagctccctggagctgctgcgctcggtgtcactgcctccagcagaagccgccgtcccggccccggcccctgcacgggcctgagccatggcccgttgggcaggtcaagaaaaaccttcaatccttggctttggctctagacagttgctatttcttgattgcatgtacaacttgcatcaagaatacatacacatcgatgccttccagttcacctggacgcaacatgttcgcgtaattcccgccgagtgtgagctcttgcatgagcactcgcgaaccacatgtggcgcttgtttgctgtgcaagtgcaagtgagtgcagtgaccggctctcgctcgttcttaatcattgtacccgtttcgctggtctcaactctcacagcacagcggtcagcactagcacggcc

SEQ ID NO: 49731 - DNA, 1364 bp, Zea Mays
gtcgatggccctcatgaaaatcacaaattgagagagggagaagggggtgggggttacgtaacacggcgattcaggaggggatagcatcgtcatcgcaaaatgcaggctctcctgctccccgcgcgggccgcgccgccgacgccggcgatgcttcggcagcgtgcggtttctgcctccgcgtgtgcgtcgcaggtctgccgccccctattcggtgccgccagttgcatctcctgtggggtccacggaagcgttcggcggcacctcacagtggcggtggcggcggccccgccctcgccttcgtcctcaccttcgtcgggaccgctctacccgacgcctccacccaccgagcaggaggtggagagggtcaagctcgagcaggttatgaggagactagagaaaacagcaaggtatttcaagaatttgggtaccctggggttctggtcccaattggtgtgcacaattatttctgctggaattttggcattctctacagttgtaacggggaaggtgacatcaccctttacattctatgcaactgctgctggtattgctgctgcttttatttcagtcttctggtcatttggttacatccgtctctctgaaaggcttagaaaaacatccaaagaacctgctaaggctcctccacgtgctgatgttgttaagagccttaaaaatggcatcgtggttaatattcttgggatgggcgctgctgttctcggcatgcaagctactgttggtgctttggtagcaaaagctctcacaacctctgcagtaccctattatcaggctgctggccaaagccctgtcttggctttagatgttttcctagttcaggttgtatgagtggtggggggtagagcgcaggctggaagaacgggggcgagaggacgccgtgctgtcgcacggctgggcacaatgagaggcttcagcgaacaccatcctgtcgcatttccttggggtggcgagctccctggagctgctgcgctcggtgtcactgcctccagcagaagccgccgtcccggccccggcccctgcacgggcctgagccatggcccgttgggcaggtcaagaaaaaccttcaatccttggctttggctctagacagttgctatttcttgattgcatgtacaacttgcatcaagaatacatacacatcgatgccttccagttcacctggacgcaacatgttcgcgtaattcccgccgagtgtgagctcttgcatgagcactcgcgaaccacatgtggcgcttgtttgctgtgcaagtgcaagtgagtgcagtgaccggctctcgctcgttcttaatcattgtacccgtttcgctggtctcaactctcacagcacagcggtcagcactagcacggcc

SEQ ID NO: 49732 - DNA, 699 bp, Zea Mays
acaattctaaactccaattcagtgacatccaaacaatagaattgaaattatatctcatttcaatactatggctgatttggtattgaactcaattcaatttcatgccttccaatatcgacatccaaacggagcataagggaaattctagtatcatgagctggttatgaggagactagagaaaacagcaagtcttctggtcatttggttacatccgtctctctgaaaggcttagaaaaacatccaaagaacctgctaaggcttcagcgaacaccatcctgtcgcatttccttggggtggcgagctccctggagctgctgcgctcggtgtcactgcctccagcagaagccgccgtcccggccccggcccctgcacgggcctgagccatggcccgttgggcaggtcaagaaaaaccttcaatccttggctttggctctagacagttgctatttcttgattgcatgtacaacttgcatcaagaatacatacacatcgatgccttccagttcacctggacgcaacatgttcgcgtaattcccgccgagtgtgagctcttgcatgagcactcgcgaaccacatgtggcgcttgtttgctgtgcaagtgcaagtgagtgcagtgaccggctctcgctcgttcttaatcattgtacccgtttcgctggtctcaactctcacagcacagcggtcagcactagcacggcc

SEQ ID NO: 49733 - DNA, 406 bp, Zea Mays
attgaactcaattcaatttcatgccttccaatatcgacatccaaacggagcataagggaaattctagtatcatgagctggttatgaggagactagagaaaacagcaagtcttctggtcatttggttacatccgtctctctgaaaggcttagaaaaacatccaaagaacctgctaaggctcctccacgtgctgatgttgttaagagccttaaaaatggcatcgtggttaatattcttgggatgggcgctgctgttctcggcatgcaagctactgttggtgctttggtagcaaaagctctcacaacctctgcagtaccctattatcaggctgctggccaaagccctgtcttggctttagatgttttcctagttcaggttgtatgagtggtggggggtagagcgcaggc

SEQ ID NO: 49734 - DNA, 964 bp, Zea Mays
attgaactcaattcaatttcatgccttccaatatcgacatccaaacggagcataagggaaattctagtatcatgagctggttatgaggagactagagaaaacagcaaggtatttcaagaatttgggtaccctggggttctggtcccaattggtgtgcacaattatttctgctggaattttggcattctctacagttgtaacggggaaggctcctccacgtgctgatgttgttaagagccttaaaaatggcatcgtggttaatattcttgggatgggcgctgctgttctcggcatgcaagctactgttggtgctttggtagcaaaagctctcacaacctctgcagtaccctattatcaggctgctggccaaagccctgtcttggctttagatgttttcctagttcagtgccattggtatgatctctactccttaggttgtatgagtggtggggggtagagcgcaggctggaagaacgggggcgagaggacgccgtgctgtcgcacggctgggcacaatgagaggcttcagcgaacaccatcctgtcgcatttccttggggtggcgagctccctggagctgctgcgctcggtgtcactgcctccagcagaagccgccgtcccggccccggcccctgcacgggcctgagccatggcccgttgggcaggtcaagaaaaaccttcaatccttggctttggctctagacagttgctatttcttgattgcatgtacaacttgcatcaagaatacatacacatcgatgccttccagttcacctggacgcaacatgttcgcgtaattcccgccgagtgtgagctcttgcatgagcactcgcgaaccacatgtggcgcttgtttgctgtgcaagtgcaagtgagtgcagtgaccggctctcgctcgttcttaatcattgtacccgtttcgctggtctcaactctcacagcacagcggtcagcactagcacggcc

SEQ ID NO: 49735 - DNA, 2459 bp, Zea Mays
gaaccagttgcacttggtattttccattctcaccggccgaggccaaccaagagcagggcagcagacttgaagcagactcgcaaccggcatccgaactctggtgcgaactcgagcttgctcggccatgctccatgcctccctgtgcggcggcgctgccgcggctgagatttcgcgccaccaggagtaataactgcttgtagccggggtcacgcgtcggccgtcgctgcttcccaccttcaccgaccactggcaaaagtgaagtgcccctccaacccaacccagcgcccagcaacaaaaaacagggttgcaggtgagcatgaattatggcagcagcacaccgcgtaggcttgccgcagtgcccgaaagcgtcgagctcgacagcttcgcaacgtcactgctgtggcaaagcagctaccgcgacacaatccggagtgtctccatcggcgcgggcaggtcggcacgcttctacccgcggagcgacggggatgctgagagagcgagtagcttttcgtcgagcgccagctcgacctccttacttgctgcatcgtactctggctcggggctctcctccaccgacggcatgtcgtcctttcgcggctgggggactgcaggcttcaatggcgtccacgagctccgggggatcgcgctccagatgctcaacgacggttacatccgaggcatcatccaagcgtttagtggcggctcgtcagtggaggcgaacggcggaggccctgaccacgaaaagctcatcgtggagaggtggttatcggagctagacgtggaatggatcctccatttaggagcgaattcagcagtgggccaggggtggtcggagtccccatccatttttatggaagaaggggcggaaagaagaaggggagctataatggcaagagagatggaggacgaggagcctcttctaggctctccgacgacttcgtccaccctccacacgggggaagggaaaggagaagacatggttcagttgcacctggacctggacctggacctggaatccctccgagatttgatggagaggtggatccgagccctcctggtcatggtgcacgtgctcttcatcacgtatctggagctccgcgccaagaggtcgaccgtcggcggtgtcaggactgtcaggaagaccatccgatacatccagatgcttatcggcgtggcaacgccgggagctaccggcgaaacagcaagcagccaggaggaggaggtgacactgttcgcccgattcgccgaggtgagcgttctcaggatgctgaccttcgtcgacgccgtgtgccatgccgtacccacctactattgggcgccggaggcgctcccggggatgctgcaggtgtacgcctgcgtcgctgatgcctcgccgacagtcttggctttgttcaaacaagccgcaagcagcaccaccgtgttcgaaggcatgaatgctgccttcctgaggaagagaacgaacctaagtaacaccatatggagcttgatgggcatggtcagagcttctttcttcacggaggattgctgtcgaatctcgctagagtccagtgggcctggagttcatgagaccaccaggctgatgatgaactacatcgcgctgctgtggagcaaccagggcgctctcaacttggtcctgcaggatcaccacttcagcgtcttcgtgtccgaggatgaaggcttcaactcggtggtcagcctcatcatcgacatgatctccagcttggagaaacatctcgtggacgcttcccattccattgcggaacatggattgaggtacatattcttgatgaacaactgtgatttcatcacgcagcaggtcagatccttggaccttccggcctggtttccgtcagacgacagcaagattcagggctacatagatgcatacctgcacgcctcttggacaccggtgctgtcttgtttgtacgtcgacatacctttcggtccgcgaagatacgcgtcgctatccaaatttgagtcacaattcaatactatttgtgactcgcataggctctggaaggttccagatcctgagcttaggaagaggttgcgcaaagccatcatcgagaaagtcattccatggtatgccaggtatttggagcagcgagcagcgacagggaggagaaccacatcccgcagcagtaccccacatcaactgcaggaagtcctagaagaactgtttgaaggataaatagcaacgactgctaggctttttctttctatctatctttttctttctttcagttggatgatttaagacgccaaaagtccagctctatgtgtctgcggctcgagccaagctctcaatatctgtcagtttaatttgcacgaatcatttgtgtttattactcaactctgctatgaaatagttttttttaacgaacggcacgagattgtgcacgtttttattaataaagaatagtgttaagtagtgaccaaaagacacagcacgaaaagta

SEQ ID NO: 49736 - DNA, 2444 bp, Zea Mays
gccgaggccaaccaagagcagggcagcagacttgaagcagactcgcaaccggcatccgaactctggtgcgaactcgagcttgctcggccatgctccatgcctccctgtgcggcggcgctgccgcggctgagatttcgcgccaccaggagtaataactgcttgtagccggggtcacgcgtcggccgtcgctgcttcccaccttcaccgaccactggcaaaagtgaagtgcccctccaacccaacccagcgcccagcaacaaaaaacagtgtggtacctccacgtgcagggttgcaggtgagcatgaattatggcagcagcacaccgcgtaggcttgccgcagtgcccgaaagcgtcgagctcgacagcttcgcaacgtcactgctgtggcaaagcagctaccgcgacacaatccggagtgtctccatcggcgcgggcaggtcggcacgcttctacccgcggagcgacggggatgctgagagagcgagtagcttttcgtcgagcgccagctcgacctccttacttgctgcatcgtactctggctcggggctctcctccaccgacggcatgtcgtcctttcgcggctgggggactgcaggcttcaatggcgtccacgagctccgggggatcgcgctccagatgctcaacgacggttacatccgaggcatcatccaagcgtttagtggcggctcgtcagtggaggcgaacggcggaggccctgaccacgaaaagctcatcgtggagaggtggttatcggagctagacgtggaatggatcctccatttaggagcgaattcagcagtgggccaggggtggtcggagtccccatccatttttatggaagaaggggcggaaagaagaaggggagctataatggcaagagagatggaggacgaggagcctcttctaggctctccgacgacttcgtccaccctccacacgggggaagggaaaggagaagacatggttcagttgcacctggacctggacctggacctggaatccctccgagatttgatggagaggtggatccgagccctcctggtcatggtgcacgtgctcttcatcacgtatctggagctccgcgccaagaggtcgaccgtcggcggtgtcaggactgtcaggaagaccatccgatacatccagatgcttatcggcgtggcaacgccgggagctaccggcgaaacagcaagcagccaggaggaggaggtgacactgttcgcccgattcgccgaggtgagcgttctcaggatgctgaccttcgtcgacgccgtgtgccatgccgtacccacctactattgggcgccggaggcgctcccggggatgctgcaggtgtacgcctgcgtcgctgatgcctcgccgacagtcttggctttgttcaaacaagccgcaagcagcaccaccgtgttcgaaggcatgaatgctgccttcctgaggaagagaacgaacctaagtaacaccatatggagcttgatgggcatggtcagagcttctttcttcacggaggattgctgtcgaatctcgctagagtccagtgggcctggagttcatgagaccaccaggctgatgatgaactacatcgcgctgctgtggagcaaccagggcgctctcaacttggtcctgcaggatcaccacttcagcgtcttcgtgtccgaggatgaaggcttcaactcggtggtcagcctcatcatcgacatgatctccagcttggagaaacatctcgtggacgcttcccattccattgcggaacatggattgaggtacatattcttgatgaacaactgtgatttcatcacgcagcaggtcagatccttggaccttccggcctggtttccgtcagacgacagcaagattcagggctacatagatgcatacctgcacgcctcttggacaccggtgctgtcttgtttgtacgtcgacatacctttcggtccgcgaagatacgcgtcgctatccaaatttgagtcacaattcaatactatttgtgactcgcataggctctggaaggttccagatcctgagcttaggaagaggttgcgcaaagccatcatcgagaaagtcattccatggtatgccaggtatttggagcagcgagcagcgacagggaggagaaccacatcccgcagcagtaccccacatcaactgcaggaagtcctagaagaactgtttgaaggataaatagcaacgactgctaggctttttctttctatctatctttttctttctttcagttggatgatttaagacgccaaaagtccagctctatgtgtctgcggctcgagccaagctctcaatatctgtcagtttaatttgcacgaatcatttgtgtttattactcaactctgctatgaaatagttttttttaacgaacggcacgagattgtgcacgtttttattaataaagaatagtgttaagtagtgaccaaaagacacagcacgaaaagta

SEQ ID NO: 49737 - DNA, 1019 bp, Zea Mays
ctaaaaccattcctgcctctctcccattacttcgattctggtcatttgaaactgaataactggtgttctatgaccattccaactctctactaaacatcacaggggtgtcccagtcctatatcgttggttgccttggacgtgatgaccacgccgagccttttcaccctttcaccgtggttagctgcttcaaggaatacctagaagaagtggcattgaagaagaagcctgctccaagtactgttgatctagtggtggaattccatctaactaattgtcgtgatagaagggttttggatcttctcctgcaaaaaggcaagccccggtgcatttgccaccctccttgtatttacaaaattttatcacttatatgatgcattaggtgataggagttgattgattaaacacttgatgcattaccattccttgaaagaattgattaccataccttgtcacctgatttataaaagctagagatgcttaatcatgcgatagattaaaaaatgtttttgatctatgactcataattgccaaaagaaaattggcttgggataatgaaggaatcatctgcagtgagaaattcattatccaggcatggcccctttgtcaggtgccaaatgttttgagaaatagcataagtaaacttgaggcccaggcggttgacttgcaccagaacggtgtctggttgtagtgtcaccgtctgtgtcgattaagggacagtaccaattgaaggcctattgatctaggaccttttagctggccacatacctcgtcatgggtaagcccgaacccggctattccatacgtgaaaagacaacagcgcaccgggcgtgggagatggtgggactagcagttatcctcctagcaagaggctggatggtagggtaatgtgctcccaggtagcgcggaccagttcatgtagtggaggatccaagggaagggttgacatatgcaagggttaagtgctacatatgtcatgtggttggagatcccctgctgggtaataatcgattgggttaatt

SEQ ID NO: 49738 - DNA, 333 bp, Zea Mays
aaaaccattcctgcctctctcccattacttcgattctggtcatttgaaactgaataactggtgttctatgaccattccaactctctactaaacatcacaggggtgtcccagtcctatatcgttggttgccttggacgtgatgaccacgccgagccttttcaccctttcaccgtggttagctgcttcaaggaatacctagaagaagtggcattgaagaagaagcctgctccaagtactgttgatctagtggtggaattccatctaactaattgtcgtgatagaagggttttggatcttctcctgcaaaaagcagtgaggtcacgaggatctgag

SEQ ID NO: 49739 - DNA, 616 bp, Zea Mays
caaagattcaattaaaaacgatctagtgtaggcccaagtgtatgatctagattaggcaaatccagaatcaggttagtagattcaagtaataacctaacctgtgaaataaaacttggcttaaggatctacttagtaagcttgcttttctgcaaaaaggagtctttgataattgatgagcttttcccttgactccaaaaagctagcatgcccttgagagtctttttcttagtcgggtaagtcttgctgagtaatttcctacttagggttttattccctatgttgttgcaggaaaggttttgatgtctttggtttcattagttgcttcatgtggaggttttcaagcttagtggcatatgtgtattccttatggaaagacttcacctttccaagtattgtatataagttatgcactttaaagactatcagggcttgtaaatattataactctttctagcatataaaacttgagttttggaaatgtaaagaatgttttgtaagtcttctgctctatctccgaagtgtgtgtgtatctaatgtgatttctgtaatatacatgttttgtgggagatcattgggatgatgagttcaagttaatgaactcgatagccttgttaag

SEQ ID NO: 49740 - DNA, 1113 bp, Zea Mays
aacagacagatgctgggcaaaatgaagctgcatgaggggagaaagtataagaaaaggtatggcacggaaagcaaggatggctacatcgcaatgcaaagtttaaatgaggtttcaaacttgtgtagcatgtcagaaatactcaaaaaaatacctcaatcctcaataaatgataaggctggcttgttaaaggctcctctaccataaatatagaggatcaaacggttctctacgctctccaacaacgttctctaaatttagagaacgctattggattctttatatatagagtttctctaaacagtcctctatccatttgaatactttaaataaccggtttaacaaaatcaaaatatgtacaatacatttgagagtatgacaaatacgtatgtacaaaaaataaaaaataaaaatgtctctaatataggtatttacgtatagagaacgtgatttaaataacgttgttgaagagcaagaagatatagatgatgtaatattttagagaatactgtaaatgatggatatagagaacgttgctggagatagccttaaataccgctaggaaagttttgatatatttgattatctgagcaggatggcttgacagtaatgtttttttcctatttgcatattatggtactgcaagcgcacatattccagatcatcatgacatcgtaaatttccttccgattcaagaaacgtaatacatgatagaagcagtccagactgcatcactgttactgaacatctaatacaataggatatagcactcaactggggttaatagagtcagcctgaatcgagcgagctgagcatgtatctgttgtgcttgtgcagatgcaggggggagaaggggattgtgttttacaaaaatacttggcatgtagtatttgttctgtttggtaaatgaagcaggaaaagtaatattctgtcttatctcacaagacagagcagaattagtcggcactaaaaggcaaaatgcatccaggaacttctatttggtaaatgaagcagggtaagtaatattctggcttatctcacaagacagagcagaattagtcggcactaaaaggaaaaatgcatccaagaacctatggctgtttaaggaagtgcatg

SEQ ID NO: 49741 - DNA, 975 bp, Zea Mays
gcttgttttattcggaattagaatatttaatatatttaaatatgtagaaagcatgtcacttatttctctaaatattacaacaataaggagcaggttacaacacatggtctttgtgttccacgtgctcagccttcggaattcttgacggtcttcgttctgacccattgagatggagggagcacccaagccttcgcccgctctatgcgcttcctccttagcggagctcactcttcagtcttcgcgctctttagtcttcgcttgaatcctttttgacatgttccacttttcatcgtgtagttgatcgagcgagggggcattacgcctttgccccaacacagagttcaccctgtgttagaaaaataagtatagccctttgtcctatccactataaacattatcctaggtgatatcactacaaactaaaaatacaagatgttgtgatcgttgcacttttctgcaagtgaaatgattttatatcatgtataacatagaagtatctgacaaagctggtaggcctgaatcttcccttttttgtttgtctaattctacgatgctatgtgatatgatctttgctgtgtcgataatatatgtcttgctcatcatagaagagttgcttgtaatatcaatgaagttataaactctttaaagttaagtatgattttatcatgccatggtttgtattgtggtctagttttcatctgccagattgtcattgaagagtaaagaactaacggtaaactagcataatttttatgtcatccttttaccaactgtctgaagatacatatgcatggttactcggtttctcgctactaataaacgagcaaatgcaggaataagcaaatccaggaggccagcgatctttgcaagagacacaaacgggaacacgctggagttcagccaagtatagcaacgggaagaccccttcatgttagagcatctcatggaaacctagaggtcctagactttactgct

SEQ ID NO: 49742 - DNA, 1169 bp, Zea Mays
acagtaccgtctctgtcgaagaacacgtagtacaccgtatacggctgagcggttgtgtataaccatcgtcggatcactcactctctgacccttgggaacaggcacctgtagatcctggacatgaaggacctcttggccttccccttcccgtgtcgccgcgcgcgtggcggcgctgcgtggtcgggcgacgacagcagcttcggcggctgcacgggcggcgcgggggcggtcctggcctcctcccggtggcgcttcaccttctcgaactgcaccgtgaatccctgcgccgccatcgcggcgttctgctcgtcccacacgccgaacctcggcacggccgacggcttgttggggcgcggcggcagcgggggctgctggtggcgcggcggcgacggcgacggcgaggcggacgccggcctcggcgcaccgtggtggtattgggcgccgtggccgtggctgccgccttgtggctgcggcgggaagcttcggtcgctggtactgttgctggtgtacctgggctggtacggcctgggcggcgagaacttgctgccgcggctactggcctccgacgccgcgttgctgctgctgctcccggtgcggcggtggtgcccgtggccggggtgcggatgctggtgctggtacgtccgatggtggggctgaggcgctggcgcgtgggcgtgggcgtgcgagcttggcggccgggagggcggcacgttcctggcgctgagattctcgtagtgctcgtaggggtcgaagtcgtagccagcagccggcgcgtggccgtgcgagctcggcgggcgggagggcacgttcctgctgctgaggttgtcgtagtgctcataggggtcgaagtcgccgtagccgtagccggcgccgggcgccggcgccctggcagcggcgggctggccgtgcgagctcggcgggcgtgacggcggctttctgctgatgctctcgtagtgctcgtacgggtcgaagtcgtagcctccgttaccgccggcagcgggggcggaaggcttgggagcggccgccggtggcgcagccggcggagccttgttgtctctcaccttctcgaagaagacggtgtagccgatgttctcggcgtcccacgagccgaacttgggcacgaccgcgtgcccggcctgcaatcaatctcaatgagcaattgctgcaaa

SEQ ID NO: 49743 - DNA, 5224 bp, Zea Mays
atcaatcagcatgcatctttcttcctggtggcctctgcaagctctgttccgacttcatcgcctttcacctactcccattgctccgccattaattttttaccggatcaagagcaccttccttcctgtcctgtgcatcgaggaggagagagaaagagtatgtgcgtgtgagagggagcagagtcaagaacagcaagcagcccagaacccaacatacatttaagagggggatccaaaaaaattgcagtctttacctgcaccacccctccctaccacaaatttccctctctgctggaactggaagcagccgtggcatccgccgtttcttgcgtgcttcctttcttggttctcctactagctgtcatcgctggtactgaaccagcggagaagagagaggtgaaccacggtgatccccgtgctggacaccatggccgtgtcctggtaggggataagcaacccaggaaagcagcaaccttccgctgtgcggatcacaggagggggactgcgtggggaccagaccaagcatggaggcactggcggccgcattcgccaccggccttgtccttgccctcgcggcggcgccagcgggagccgaaaccgaccccgacgacgccgcggcgctggcgaatctctacacctcctggaacagcccgtcgcagctggctgggtggtcggccagcggcggcgatccctgcggcgcggcgtggcagggcgtcgcctgctctggcgccggcgtcaccgaaatcaaacttccagggacagggctcgatggttctctgggatacgagctctccaacctgttctctctgaaaacactagatttgagcaataacaacttgcatggttcaatcccttaccagctgccacctaatctcactaatctgaatctgggtagcaacaatttcaatggcaaccttccatactctatatcaaatatggcttcgattgaataccttaatctcagtcacaactcaatttctcagcaactgggtgatatatttggaagcctcaactcactttcagacttagatgtgtctttcaacaaattgacaggggatcttcccaattctattggttctttatcaaatctttcaagtctttatatgcagaacaatcagttaacaggttctgtcaatgttctccgtgggctaagccttactacattaaacatagcaaacaacaatttcagtggttggataccaaaagaattcagctccattccagatacttgaaggaaactcatttgccaatggacctgctcccccgccgccaccttttatgccaccaccccctcaaaggccacggaatcgtcctaagcatcctcaggggccaggagatgctcctaaaggttcagaaagccacactgttcaaagtaacaagaagcaaggccttgggacaggtccgcttgtgggcataattgctggatcaatagttgctgttttatgtgtgtttctgcttctgttatgctgcatgtgcaatgctcagaaaagaactgatgatgccagcagtgaatcaaaagattttggaggacctctaacagtaaacattgagagagcttctagcagggaaatcccagagcagatggatgacacgtctatagcaactgtgaagctcccacctgctgagaaaatgactcctgagagagtttacggtaaaaatggttctgtaagaaagacaaaggtccccataactgcaacaccttatactgtcgcttctctccaagttgctactaatagtttctgtcaagattctcttctgggtgagggctcacttggtcgtgtttataaggccgatttcccgaatggaaaggttcttgctgttaaaaagatagatagcgccgcactttctttacaggaagaagacaatttccttgaggctgtatcgagcatgtctcggctaaggcatccaaacatcgtgccattgacaggatattgtgttgaacatgggcaaagacttcttgtctatgagtacattgtaaatggaacgctgcatgatatgttgcacttctctgttgaaataagcaggaagcttacatggaacatccgcgtaaggatagcactaggcactgctcgagcacttgagtacctgcatgaggtgtgcatgccgtctcttgttcatagaaatttgaagtcttcaaacattctactagatgaggagcataatccacacctatctgactgtggacttgctgccttgactccaaatactgaaagacaggtttcaactgaagtatttggatcatttggctatagcgccccagagtttgcaatgtctggcatttatactgtaaagagcgatgtatacagttttggagtggtaatgttagagctattgacagggcggaagccactagacagttccagagagaggtcagaacagtctcttgttagatgggctacccctcaacttcatgatattgatgcacttgctaggatggttgatccagcattaaacggaatgtacccagctaaatcactctctcgttttgcagacgtaattgcactctgcgttcagcctgagccagagttccgcccacccatgtcagaggttgtccagcaacttgtgcgcttgatgcagagggctagcatcgtgaggcggcaatcaggagaagagctagggttttcatacagagtcccagaacgagaaggagacctgagagacatttccttctgagcaagtgcgtccacgatagaagcgcaaaacagtttggaggcttaatgtgcaaagaaaatatctagagcactcgtatagtcatatcgattggagaactcgagctgaccgcaacaattcaggatcggatgagttttgagaagataatttcgttgcctattgttcaactttgttcattcttctacattcgtctcattttcagtcagtatacttgttgcagctgtatttaaaacgagactcaaattgatggtggtgtatagctgattattggtagagaagaaggaaaagaaatgtaaaattgatgctccgttatgttttaatgatagaaacctcaagactctacagccattcgcacatactggatagattgttttgatttcaaaccaatatgatataaaatcttcccgttctgttcagtccagcccggttcctacttcgtattctccggtttgttcctagaacaagaacagtgtacccaattcctatcacccgttctttctatgttcttgaaatatcgaaaacaccctatcataatacacaactgtcaatttcatattttgttggaaatttgatcttttatatgaagaccatgatatctgatacgtagattctcacgacatccctcagtgtgcaagtgcaactatacacctctgtaatcaccatactgaagtagcgttgcagcagcaattcctatatctgacaggaggtcctgaactgctgttgctaactgtgttttgtgaatccatctttgcaaatcgtaaatacagtgaaaatcatcgataccaaaatcagagatccaatggagatcagatcttcacgtgaaaaatgtaggtatacataccctcctcacccatctctgtcctgtatcaagttgccaatcatcttgccaagaggcacggtgcccttggccatgatctccagcctcgacgagttggaggcgttcccgaacagtgcgaggccgaacatcaagagctccggcaggaacagtctggatgacaggaaaccgtgccagtagtgtggctccaggtcgaagaaggcgtcgaagaaccgccgcgttccctcgaggtccagcttgagcaggacgtccatgccgaagcagaagaactccctctgccgccgcctgttggctggccacagctgcttccacacctcggcggagagcgcgtcccctgccaggccacccatgccgttgccggtgccggtgtcgaggaaccttacgatggcgtccgccacgataggcgcggtggcaagcgtgcgcgccaccatgtagcccgtggacgggtgcaccatccctgccgtgccgccgatgccgacaaccctctgcggcaggacgggcagcggccctcccatggggatgacgcagcgctcgtcctcctcgacgcttcggacgcgtatacccaggtgcctgaggcgcgcggccatgcgctcctggatgtcgtccatggcgagccccgggcgcgcgaccagggacgtctcctcgaggaagatcctggtgggggagaagggcatggcgtagaggaaggtggggatgcggcggttgcgctccctgatctccgacccttcggggaggtgcgagtcgcgccagtccatgaagagcatcttgtcgatgtcgaacgggtgggcgtcgacctcggcgaggatgccgtaggcgacctggtaccccgggttgtacggcttgtcgtactgcacgaggcagcgcgagaagcccgtggcgtcgagcacgacgcttgccgggacggcgacgccgtcgtcacagatgaggagggacgaggcgtcgtagtggacggccttggcgaccttggcctggtggaagacgacgccgttggcgacgcagcggtccatcatggtggacttgagcttgcggcgcgcgacgcgggcgtaggggcggtcgagcgacttggcgccgccatcgtcgatgaagacggaggcggagggccagacggtgtcgaggcagtgggagaggcccatggcctcgaactcgtccacccacacgccgtagttgttgggccacacgaccgcgggggacgggtcgatggcgcacaccgacaggcccgcctccgcgacgcgctgcgccacagcgaggcccgcgggcccgccgcccaccacggcgaggtccacggggcgggcgggcgctgggtcgtagcggggcaggtcgagcgacagcagctccggccgcgtgggcggggccagggaccgcagcgccgcggccgacgccggcccagccatccccgccgtggcgcggcagagtacggacgcgcgcggcgccggcggcttgcagggatggtggtgagtgcggaggaggagggcggtagtggccatggtgctggcctggtggaaggtggggggaattcgagcgcggcggagccgtgcaatcctgagcctgaggcggtggtgataagctgcagctgctttgagtgggggcaccaccgtcgatccaattccattgtggcattcttcacccaagcacctcaaatgttttttgaatattacttttggccttaaagacgaaggacaagtccacgaaaacgctgctggccgattctaccgatagatcctg

SEQ ID NO: 49744 - DNA, 5215 bp, Zea Mays
aatcagcatgcatctttcttcctggtggcctctgcaagctctgttccgacttcatcgcctttcacctactcccattgctccgccattaattttttaccggatcaagagcaccttccttcctgtcctgtgcatcgaggaggagagagaaagagtatgtgcgtgtgagagggagcagagtcaagaacagcaagcagcccagaacccaacatacatttaagagggggatccaaaaaaattgcagtctttacctgcaccacccctccctaccacaaatttccctctctgctggaactggaagcagccgtggcatccgccgtttcttgcgtgcttcctttcttggttctcctactagctgtcatcgctggtactgaaccagcggagaagagagaggtgaaccacggtgatccccgtgctggacaccatggccgtgtcctggtaggggataagcaacccaggaaagcagcaaccttccgctgtgcggatcacaggagggggactgcgtggggaccagaccaagcatggaggcactggcggccgcattcgccaccggccttgtccttgccctcgcggcggcgccagcgggagccgaaaccgaccccgacgacgccgcggcgctggcgaatctctacacctcctggaacagcccgtcgcagctggctgggtggtcggccagcggcggcgatccctgcggcgcggcgtggcagggcgtcgcctgctctggcgccggcgtcaccgaaatggacagggctcgatggttctctgggatacgagctctccaacctgttctctctgaaaacactagatttgagcaataacaacttgcatggttcaatcccttaccagctgccacctaatctcactaatctgaatctgggtagcaacaatttcaatggcaaccttccatactctatatcaaatatggcttcgattgaataccttaatctcagtcacaactcaatttctcagcaactgggtgatatatttggaagcctcaactcactttcagacttagatgtgtctttcaacaaattgacaggggatcttcccaattctattggttctttatcaaatctttcaagtctttatatgcagaacaatcagttaacaggttctgtcaatgttctccgtgggctaagccttactacattaaacatagcaaacaacaatttcagtggttggataccaaaagaattcagctccattccagatgtaacacttgaaggaaactcatttgccaatggacctgctcccccgccgccaccttttatgccaccaccccctcaaaggccacggaatcgtcctaagcatcctcaggggccaggagatgctcctaaaggttcagaaagccacactgttcaaagtaacaagaagcaaggccttgggacaggtccgcttgtgggcataattgctggatcaatagttgctgttttatgtgtgtttctgcttctgttatgctgcatgtgcaatgctcagaaaagaactgatgatgccagcagtgaatcaaaagattttggaggacctctaacagtaaacattgagagagcttctagcagggaaatcccagagcagatggatgacacgtctatagcaactgtgaagctcccacctgctgagaaaatgactcctgagagagtttacggtaaaaatggttctgtaagaaagacaaaggtccccataactgcaacaccttatactgtcgcttctctccaagttgctactaatagtttctgtcaagattctcttctgggtgagggctcacttggtcgtgtttataaggccgatttcccgaatggaaaggttcttgctgttaaaaagatagatagcgccgcactttctttacaggaagaagacaatttccttgaggctgtatcgagcatgtctcggctaaggcatccaaacatcgtgccattgacaggatattgtgttgaacatgggcaaagacttcttgtctatgagtacattgtaaatggaacgctgcatgatatgttgcacttctctgttgaaataagcaggaagcttacatggaacatccgcgtaaggatagcactaggcactgctcgagcacttgagtacctgcatgaggtgtgcatgccgtctcttgttcatagaaatttgaagtcttcaaacattctactagatgaggagcataatccacacctatctgactgtggacttgctgccttgactccaaatactgaaagacaggtttcaactgaagtatttggatcatttggctatagcgccccagagtttgcaatgtctggcatttatactgtaaagagcgatgtatacagttttggagtggtaatgttagagctattgacagggcggaagccactagacagttccagagagaggtcagaacagtctcttgttagatgggctacccctcaacttcatgatattgatgcacttgctaggatggttgatccagcattaaacggaatgtacccagctaaatcactctctcgttttgcagacgtaattgcactctgcgttcagcctgagccagagttccgcccacccatgtcagaggttgtccagcaacttgtgcgcttgatgcagagggctagcatcgtgaggcggcaatcaggagaagagctagggttttcatacagagtcccagaacgagaaggagacctgagagacatttccttctgagcaagtgcgtccacgatagaagcgcaaaacagtttggaggcttaatgtgcaaagaaaatatctagagcactcgtatagtcatatcgattggagaactcgagctgaccgcaacaattcaggatcggatgagttttgagaagataatttcgttgcctattgttcaactttgttcattcttctacattcgtctcattttcagtcagtatacttgttgcagctgtatttaaaacgagactcaaattgatggtggtgtatagctgattattggtagagaagaaggaaaagaaatgtaaaattgatgctccgttatgttttaatgatagaaacctcaagactctacagccattcgcacatactggatagattgttttgatttcaaaccaatatgatataaaatcttcccgttctgttcagtccagcccggttcctacttcgtattctccggtttgttcctagaacaagaacagtgtacccaattcctatcacccgttctttctatgttcttgaaatatcgaaaacaccctatcataatacacaactgtcaatttcatattttgttggaaatttgatcttttatatgaagaccatgatatctgatacgtagattctcacgacatccctcagtgtgcaagtgcaactatacacctctgtaatcaccatactgaagtagcgttgcagcagcaattcctatatctgacaggaggtcctgaactgctgttgctaactgtgttttgtgaatccatctttgcaaatcgtaaatacagtgaaaatcatcgataccaaaatcagagatccaatggagatcagatcttcacgtgaaaaatgtaggtatacataccctcctcacccatctctgtcctgtatcaagttgccaatcatcttgccaagaggcacggtgcccttggccatgatctccagcctcgacgagttggaggcgttcccgaacagtgcgaggccgaacatcaagagctccggcaggaacagtctggatgacaggaaaccgtgccagtagtgtggctccaggtcgaagaaggcgtcgaagaaccgccgcgttccctcgaggtccagcttgagcaggacgtccatgccgaagcagaagaactccctctgccgccgcctgttggctggccacagctgcttccacacctcggcggagagcgcgtcccctgccaggccacccatgccgttgccggtgccggtgtcgaggaaccttacgatggcgtccgccacgataggcgcggtggcaagcgtgcgcgccaccatgtagcccgtggacgggtgcaccatccctgccgtgccgccgatgccgacaaccctctgcggcaggacgggcagcggccctcccatggggatgacgcagcgctcgtcctcctcgacgcttcggacgcgtatacccaggtgcctgaggcgcgcggccatgcgctcctggatgtcgtccatggcgagccccgggcgcgcgaccagggacgtctcctcgaggaagatcctggtgggggagaagggcatggcgtagaggaaggtggggatgcggcggttgcgctccctgatctccgacccttcggggaggtgcgagtcgcgccagtccatgaagagcatcttgtcgatgtcgaacgggtgggcgtcgacctcggcgaggatgccgtaggcgacctggtaccccgggttgtacggcttgtcgtactgcacgaggcagcgcgagaagcccgtggcgtcgagcacgacgcttgccgggacggcgacgccgtcgtcacagatgaggagggacgaggcgtcgtagtggacggccttggcgaccttggcctggtggaagacgacgccgttggcgacgcagcggtccatcatggtggacttgagcttgcggcgcgcgacgcgggcgtaggggcggtcgagcgacttggcgccgccatcgtcgatgaagacggaggcggagggccagacggtgtcgaggcagtgggagaggcccatggcctcgaactcgtccacccacacgccgtagttgttgggccacacgaccgcgggggacgggtcgatggcgcacaccgacaggcccgcctccgcgacgcgctgcgccacagcgaggcccgcgggcccgccgcccaccacggcgaggtccacggggcgggcgggcgctgggtcgtagcggggcaggtcgagcgacagcagctccggccgcgtgggcggggccagggaccgcagcgccgcggccgacgccggcccagccatccccgccgtggcgcggcagagtacggacgcgcgcggcgccggcggcttgcagggatggtggtgagtgcggaggaggagggcggtagtggccatggtgctggcctggtggaaggtggggggaattcgagcgcggcggagccgtgcaatcctgagcctgaggcggtggtgataagctgcagctgctttgagtgggggcaccaccgtcgatccaattccattgtggcattcttcacccaagcacctcaaatgttttttgaatattacttttggccttaaagacgaaggacaagtccacgaaaacgctgctggccgattctaccgatagatcctg

SEQ ID NO: 49745 - DNA, 4944 bp, Zea Mays
aatcagcatgcatctttcttcctggtggcctctgcaagctctgttccgacttcatcgcctttcacctactcccattgctccgccattaattttttaccggatcaagagcaccttccttcctgtcctgtgcatcgaggaggagagagaaagagtatgtgcgtgtgagagggagcagagtcaagaacagcaagcagcccagaacccaacatacatttaagagggggatccaaaaaaattgcagtctttacctgcaccacccctccctaccacaaatttccctctctgctggaactggaagcagccgtggcatccgccgtttcttgcgtgcttcctttcttggttctcctactagctgtcatcgctggtactgaaccagcggagaagagagaggtgaaccacggtgatccccgtgctggacaccatggccgtgtcctggtaggggataagcaacccaggaaagcagcaaccttccgctgtgcggatcacaggagggggactgcgtggggaccagaccaagcatggaggcactggcggccgcattcgccaccggccttgtccttgccctcgcggcggcgccagcgggagccgaaaccgaccccgacgacgccgcggcgctggcgaatctctacacctcctggaacagcccgtcgcagctggctgggtggtcggccagcggcggcgatccctgcggcgcggcgtggcagggcgtcgcctgctctggcgccggcgtcaccgaaatagatgtgtctttcaacaaattgacaggggatcttcccaattctattggttctttatcaaatctttcaagtctttatatgcagaacaatcagttaacaggttctgtcaatgttctccgtgggctaagccttactacattaaacatagcaaacaacaatttcagtggttggataccaaaagaattcagctccattccagatgtaacacttgaaggaaactcatttgccaatggacctgctcccccgccgccaccttttatgccaccaccccctcaaaggccacggaatcgtcctaagcatcctcaggggccaggagatgctcctaaaggttcagaaagccacactgttcaaagtaacaagaagcaaggccttgggacaggtccgcttgtgggcataattgctggatcaatagttgctgttttatgtgtgtttctgcttctgttatgctgcatgtgcaatgctcagaaaagaactgatgatgccagcagtgaatcaaaagattttggaggacctctaacagtaaacattgagagagcttctagcagggaaatcccagagcagatggatgacacgtctatagcaactgtgaagctcccacctgctgagaaaatgactcctgagagagtttacggtaaaaatggttctgtaagaaagacaaaggtccccataactgcaacaccttatactgtcgcttctctccaagttgctactaatagtttctgtcaagattctcttctgggtgagggctcacttggtcgtgtttataaggccgatttcccgaatggaaaggttcttgctgttaaaaagatagatagcgccgcactttctttacaggaagaagacaatttccttgaggctgtatcgagcatgtctcggctaaggcatccaaacatcgtgccattgacaggatattgtgttgaacatgggcaaagacttcttgtctatgagtacattgtaaatggaacgctgcatgatatgttgcacttctctgttgaaataagcaggaagcttacatggaacatccgcgtaaggatagcactaggcactgctcgagcacttgagtacctgcatgaggtgtgcatgccgtctcttgttcatagaaatttgaagtcttcaaacattctactagatgaggagcataatccacacctatctgactgtggacttgctgccttgactccaaatactgaaagacaggtttcaactgaagtatttggatcatttggctatagcgccccagagtttgcaatgtctggcatttatactgtaaagagcgatgtatacagttttggagtggtaatgttagagctattgacagggcggaagccactagacagttccagagagaggtcagaacagtctcttgttagatgggctacccctcaacttcatgatattgatgcacttgctaggatggttgatccagcattaaacggaatgtacccagctaaatcactctctcgttttgcagacgtaattgcactctgcgttcagcctgagccagagttccgcccacccatgtcagaggttgtccagcaacttgtgcgcttgatgcagagggctagcatcgtgaggcggcaatcaggagaagagctagggttttcatacagagtcccagaacgagaaggagacctgagagacatttccttctgagcaagtgcgtccacgatagaagcgcaaaacagtttggaggcttaatgtgcaaagaaaatatctagagcactcgtatagtcatatcgattggagaactcgagctgaccgcaacaattcaggatcggatgagttttgagaagataatttcgttgcctattgttcaactttgttcattcttctacattcgtctcattttcagtcagtatacttgttgcagctgtatttaaaacgagactcaaattgatggtggtgtatagctgattattggtagagaagaaggaaaagaaatgtaaaattgatgctccgttatgttttaatgatagaaacctcaagactctacagccattcgcacatactggatagattgttttgatttcaaaccaatatgatataaaatcttcccgttctgttcagtccagcccggttcctacttcgtattctccggtttgttcctagaacaagaacagtgtacccaattcctatcacccgttctttctatgttcttgaaatatcgaaaacaccctatcataatacacaactgtcaatttcatattttgttggaaatttgatcttttatatgaagaccatgatatctgatacgtagattctcacgacatccctcagtgtgcaagtgcaactatacacctctgtaatcaccatactgaagtagcgttgcagcagcaattcctatatctgacaggaggtcctgaactgctgttgctaactgtgttttgtgaatccatctttgcaaatcgtaaatacagtgaaaatcatcgataccaaaatcagagatccaatggagatcagatcttcacgtgaaaaatgtaggtatacataccctcctcacccatctctgtcctgtatcaagttgccaatcatcttgccaagaggcacggtgcccttggccatgatctccagcctcgacgagttggaggcgttcccgaacagtgcgaggccgaacatcaagagctccggcaggaacagtctggatgacaggaaaccgtgccagtagtgtggctccaggtcgaagaaggcgtcgaagaaccgccgcgttccctcgaggtccagcttgagcaggacgtccatgccgaagcagaagaactccctctgccgccgcctgttggctggccacagctgcttccacacctcggcggagagcgcgtcccctgccaggccacccatgccgttgccggtgccggtgtcgaggaaccttacgatggcgtccgccacgataggcgcggtggcaagcgtgcgcgccaccatgtagcccgtggacgggtgcaccatccctgccgtgccgccgatgccgacaaccctctgcggcaggacgggcagcggccctcccatggggatgacgcagcgctcgtcctcctcgacgcttcggacgcgtatacccaggtgcctgaggcgcgcggccatgcgctcctggatgtcgtccatggcgagccccgggcgcgcgaccagggacgtctcctcgaggaagatcctggtgggggagaagggcatggcgtagaggaaggtggggatgcggcggttgcgctccctgatctccgacccttcggggaggtgcgagtcgcgccagtccatgaagagcatcttgtcgatgtcgaacgggtgggcgtcgacctcggcgaggatgccgtaggcgacctggtaccccgggttgtacggcttgtcgtactgcacgaggcagcgcgagaagcccgtggcgtcgagcacgacgcttgccgggacggcgacgccgtcgtcacagatgaggagggacgaggcgtcgtagtggacggccttggcgaccttggcctggtggaagacgacgccgttggcgacgcagcggtccatcatggtggacttgagcttgcggcgcgcgacgcgggcgtaggggcggtcgagcgacttggcgccgccatcgtcgatgaagacggaggcggagggccagacggtgtcgaggcagtgggagaggcccatggcctcgaactcgtccacccacacgccgtagttgttgggccacacgaccgcgggggacgggtcgatggcgcacaccgacaggcccgcctccgcgacgcgctgcgccacagcgaggcccgcgggcccgccgcccaccacggcgaggtccacggggcgggcgggcgctgggtcgtagcggggcaggtcgagcgacagcagctccggccgcgtgggcggggccagggaccgcagcgccgcggccgacgccggcccagccatccccgccgtggcgcggcagagtacggacgcgcgcggcgccggcggcttgcagggatggtggtgagtgcggaggaggagggcggtagtggccatggtgctggcctggtggaaggtggggggaattcgagcgcggcggagccgtgcaatcctgagcctgaggcggtggtgataagctgcagctgctttgagtgggggcaccaccgtcgatccaattccattgtggcattcttcacccaagcacctcaaatgttttttgaatattacttttggccttaaagacgaaggacaagtccacgaaaacgctgctggccgattctaccgatagatcctg

SEQ ID NO: 49746 - DNA, 4357 bp, Zea Mays
aaaacactgaatctgggtagcaacaatttcaatggcaaccttccatactctatatcaaatatggcttcgattgaataccttaatctcagtcacaactcaatttctcagcaactgggtgatatatttggaagcctcaactcactttcagacttagatgtgtctttcaacaaattgacaggggatcttcccaattctattggttctttatcaaatctttcaagtctttatatgcagaacaatcagttaacaggttctgtcaatgttctccgtgggctaagccttactacattaaacatagcaaacaacaatttcagtggttggataccaaaagaattcagctccattccagatgtaacacttgaaggaaactcatttgccaatggacctgctcccccgccgccaccttttatgccaccaccccctcaaaggccacggaatcgtcctaagcatcctcaggggccaggagatgctcctaaaggttcagaaagccacactgttcaaagtaacaagaagcaaggccttgggacaggtccgcttgtgggcataattgctggatcaatagttgctgttttatgtgtgtttctgcttctgttatgctgcatgtgcaatgctcagaaaagaactgatgatgccagcagtgaatcaaaagattttggaggacctctaacagtaaacattgagagagcttctagcagggaaatcccagagcagatggatgacacgtctatagcaactgtgaagctcccacctgctgagaaaatgactcctgagagagtttacggtaaaaatggttctgtaagaaagacaaaggtccccataactgcaacaccttatactgtcgcttctctccaagttgctactaatagtttctgtcaagattctcttctgggtgagggctcacttggtcgtgtttataaggccgatttcccgaatggaaaggttcttgctgttaaaaagatagatagcgccgcactttctttacaggaagaagacaatttccttgaggctgtatcgagcatgtctcggctaaggcatccaaacatcgtgccattgacaggatattgtgttgaacatgggcaaagacttcttgtctatgagtacattgtaaatggaacgctgcatgatatgttgcacttctctgttgaaataagcaggaagcttacatggaacatccgcgtaaggatagcactaggcactgctcgagcacttgagtacctgcatgaggtgtgcatgccgtctcttgttcatagaaatttgaagtcttcaaacattctactagatgaggagcataatccacacctatctgactgtggacttgctgccttgactccaaatactgaaagacaggtttcaactgaagtatttggatcatttggctatagcgccccagagtttgcaatgtctggcatttatactgtaaagagcgatgtatacagttttggagtggtaatgttagagctattgacagggcggaagccactagacagttccagagagaggtcagaacagtctcttgttagatgggctacccctcaacttcatgatattgatgcacttgctaggatggttgatccagcattaaacggaatgtacccagctaaatcactctctcgttttgcagacgtaattgcactctgcgttcagcctgagccagagttccgcccacccatgtcagaggttgtccagcaacttgtgcgcttgatgcagagggctagcatcgtgaggcggcaatcaggagaagagctagggttttcatacagagtcccagaacgagaaggagacctgagagacatttccttctgagcaagtgcgtccacgatagaagcgcaaaacagtttggaggcttaatgtgcaaagaaaatatctagagcactcgtatagtcatatcgattggagaactcgagctgaccgcaacaattcaggatcggatgagttttgagaagataatttcgttgcctattgttcaactttgttcattcttctacattcgtctcattttcagtcagtatacttgttgcagctgtatttaaaacgagactcaaattgatggtggtgtatagctgattattggtagagaagaaggaaaagaaatgtaaaattgatgctccgttatgttttaatgatagaaacctcaagactctacagccattcgcacatactggatagattgttttgatttcaaaccaatatgatataaaatcttcccgttctgttcagtccagcccggttcctacttcgtattctccggtttgttcctagaacaagaacagtgtacccaattcctatcacccgttctttctatgttcttgaaatatcgaaaacaccctatcataatacacaactgtcaatttcatattttgttggaaatttgatcttttatatgaagaccatgatatctgatacgtagattctcacgacatccctcagtgtgcaagtgcaactatacacctctgtaatcaccatactgaagtagcgttgcagcagcaattcctatatctgacaggaggtcctgaactgctgttgctaactgtgttttgtgaatccatctttgcaaatcgtaaatacagtgaaaatcatcgataccaaaatcagagatccaatggagatcagatcttcacgtgaaaaatgtaggtatacataccctcctcacccatctctgtcctgtatcaagttgccaatcatcttgccaagaggcacggtgcccttggccatgatctccagcctcgacgagttggaggcgttcccgaacagtgcgaggccgaacatcaagagctccggcaggaacagtctggatgacaggaaaccgtgccagtagtgtggctccaggtcgaagaaggcgtcgaagaaccgccgcgttccctcgaggtccagcttgagcaggacgtccatgccgaagcagaagaactccctctgccgccgcctgttggctggccacagctgcttccacacctcggcggagagcgcgtcccctgccaggccacccatgccgttgccggtgccggtgtcgaggaaccttacgatggcgtccgccacgataggcgcggtggcaagcgtgcgcgccaccatgtagcccgtggacgggtgcaccatccctgccgtgccgccgatgccgacaaccctctgcggcaggacgggcagcggccctcccatggggatgacgcagcgctcgtcctcctcgacgcttcggacgcgtatacccaggtgcctgaggcgcgcggccatgcgctcctggatgtcgtccatggcgagccccgggcgcgcgaccagggacgtctcctcgaggaagatcctggtgggggagaagggcatggcgtagaggaaggtggggatgcggcggttgcgctccctgatctccgacccttcggggaggtgcgagtcgcgccagtccatgaagagcatcttgtcgatgtcgaacgggtgggcgtcgacctcggcgaggatgccgtaggcgacctggtaccccgggttgtacggcttgtcgtactgcacgaggcagcgcgagaagcccgtggcgtcgagcacgacgcttgccgggacggcgacgccgtcgtcacagatgaggagggacgaggcgtcgtagtggacggccttggcgaccttggcctggtggaagacgacgccgttggcgacgcagcggtccatcatggtggacttgagcttgcggcgcgcgacgcgggcgtaggggcggtcgagcgacttggcgccgccatcgtcgatgaagacggaggcggagggccagacggtgtcgaggcagtgggagaggcccatggcctcgaactcgtccacccacacgccgtagttgttgggccacacgaccgcgggggacgggtcgatggcgcacaccgacaggcccgcctccgcgacgcgctgcgccacagcgaggcccgcgggcccgccgcccaccacggcgaggtccacggggcgggcgggcgctgggtcgtagcggggcaggtcgagcgacagcagctccggccgcgtgggcggggccagggaccgcagcgccgcggccgacgccggcccagccatccccgccgtggcgcggcagagtacggacgcgcgcggcgccggcggcttgcagggatggtggtgagtgcggaggaggagggcggtagtggccatggtgctggcctggtggaaggtggggggaattcgagcgcggcggagccgtgcaatcctgagcctgaggcggtggtgataagctgcagctgctttgagtgggggcaccaccgtcgatccaattccattgtggcattcttcacccaagcacctcaaatgttttttgaatattacttttggccttaaagacgaaggacaagtccacgaaaacgctgctggccgattctaccgatagatcctg

SEQ ID NO: 49747 - DNA, 1116 bp, Zea Mays
aacaaacaccgtagctgccttcgcttgcaggctcctctcgcggccatataagccgactcccctctgcagtctccctcgcgtccgggttccgtgaaccaccccgaggccagtagttgaaagctctgtctacatcaccgggcgagcgtatagaaaggtaggagcccgtcattggaggaacttcgatttgccatccttgatgcacctggggcgggccagggagatgcgcctagcatctgggagggttctcttgggattcgcttatgaagagctcgatcagtttctgaacggtgcaatggctccatcgcgtgccgcaccgtgccgtgggtggctctccagacatcgtatctgtctccggtaagttcccagctacttttgccacgttcgtagaatcgtgtagctgctgaccaatttgagtttggtgctcgggagggccgttcgggcatcttgtcggcggtgctccaccgtgggagtcacgagcgccgccgtggttggcatatgccgtcatggggatgaagggaatggctgctcgatctgtattgtgcggtgtagattagacagccggataactcttcgtcattgctgatcgtggctatcgatcgtagtatccacgtgtgagatggggttcggacttcatagaattcgggccgtcggatctcgattcagtggtgactatcacgtactgatttactggtgatgggatctaatctgatccgttggtttaagatctaggggccgaaaaggaagcacgtgacatagccaactagtttttcataaagaacccccccaaaaaagttcataaactaagctgatgtccattgtagttgtaaaatcattgcaccaggtcctttattttgcagactaacccctggactccctaaatatattaaccgttgtccttttgaaaacttaaatttataaaatgaatcaggagtttcataaaagcctttattaaacacattttaagtgtaaaaaattattttataaatgtataaaaaccataactcctctgttttagatctgattaaacccactccagttgcagtaacttagtaattaaatttcctacacattaacaacattattttatcatataacattctacattctacattggag

SEQ ID NO: 49748 - DNA, 587 bp, Zea Mays
aacaaacaccgtagctgccttcgcttgcaggctcctctcgcggccatataagccgactcccctctgcagtctccctcgcgtccgggttccgtgaaccaccccgaggccagtagttgaaagctctgtctacatcaccgggcgagcgtatagaaaggtaggagcccgtcattggaggaacttcgatttgccatccttgatgcacctggggcgggccagggagatgcgcctagcatctgggagggttctcttgggattcgcttatgaagagctcgatcagtttctgaacggtgcaatggctccatcgcgtgccgcaccgtgccgtgggtggctctccagacatcgtatctgtctccggtcaagaacatgtatcgataagacgaggagcatgaaggatgccatgatgagttcgtgagaggtctaggccatcgtctcccagtcaactatggttgtggaggatcgttgtctccatatgttgtaattatataactattttgaacagaactcctattatatagtaaagatgtgatatccgtttctgttccatgagttatcatatgtgtgagacttgatcctatcacacatttgat

SEQ ID NO: 49749 - DNA, 623 bp, Zea Mays
cccaaaagaggcaagggcgatagaggagttgccggtgtagggagctctcgggtcgatcatgctgcgatggcttttcgaatgagggattcctatatcgctcttctcacaaaatcgtagcaagttttctgaagctagtggaactttataaaggcctcgtagtggatccctaaccattcagctcagaagtgtctaagtgccttgcaaaccctggctagatgggatacacgacttgtgggtaaagggagcaacctctgcagagtgtaaaactgctatatcagtcgtgctcacggtcttgagcggctcggaccctcacatgagtaacttatggaattaaacttaatctatcgtttgcattgcattgtgggatttattattaattgtgatatcttattttattggaatggtatctacttatacttagtaaatgctaatgaaattttgaccaacttgttaaaagcaacactcagccttaaccattctatttggtaagccttacacttcacatgagccccaccgtaagtgagcccatgcacattattccccaaaacttgttgagcgatgaatgtatgtgagctcacccttgttgtactcacacccctaggtcaagaacatgtatcgataag

SEQ ID NO: 49750 - DNA, 562 bp, Zea Mays
gccgccggcgcctccgccctcatgcccaggggtcgacgccgacttactctcgccccaatttcgtcgcctctgccggagggcggtcagactgaagatgggcgcgcccagggcggacagactgaagatggccgcgatgctgctgctaccgaggaagcgagttcggaggatgaagttcttcggtcggcgatgtacgctgggttctcgtcggaggaagcaagtgtttttttgcaagagaagaagaattcgcaggtgtctcaggtcatttattccattgcacattggcttcgaacatgggctattttacagaaggcggagttgcgacctatggttgtggaggctacgcagtacttggtgcaggtggccatggactatttttcccgggctcatgggtggcggtctagtctgcggattgattaccattagagtgtgtggattatcatctttattttgtctttaagctgtgtgcttcttaagcagaggctggaagaaatttcaagaattgtatcccctcgatgtaatgtgcttgaaattattaataaaatcttcctttatcaaaaaaaaa

SEQ ID NO: 49751 - DNA, 3059 bp, Zea Mays
gccggcgcctccgccctcatgcccaggggtcgacgccgacttactctcgccccaatttcgtcgcctctgccggagggcggtcagactgaagatgggcgcgcccagggcggacagactgaagatggccgcgatgctgctgctaccgaggaagcgagttcggaggatgaagttcttcggtcggcgatgtacgctgggttctcgtcggaggaagcaagtgtttttttgcaagagaagaagaattcgcaggtgtctcaggtacgttttgatgctcaatttagagaagatttctggattgatttgggctttcctaagggcagccgctggtgggagaactcggattctcccattcatggtgcgcctgtgaatcctaatgctgttgttcgatccgatgctagtctgggcgttcatgaatcttcagagagcctacaggctagcctgaatgctttggatctggaatctaggatcggaacacatacggatcaaaataaaagatcattcgtaaacagttcatcgatccaggattcaggtgcacacctaaaaccttctcgtcgtggtgtccatatccggccttggcgcggtcctctcccgcggcctagaaggaaggaagctatttctcttgctgcgttctggccttcttcggcacaggccttccatgggtcctgttcgccggtctcaacttccaaggtgggatggacgatgccacagcccccaaagctagatgtgcgcagcgagtttccaccgctgattgctgctgtttcggtagattcccgatcgggtccagcagtgatcccggcggagattgaggcagtcgggattttgaattctgtaagtttggaaacaaatcgtgcggctttggtgaatcgggccaagggatatggtttgacaagaaaacttttacgaagacctattcctaggacttgccgtcacttctcctctcggctcggcctcattcccatgagcgacaacaaccgaccttcatacgcagcgatggcggcccgtcagccgacgcgtgaaggtcagcgcccaccgatgccgcaagcacgtggtggtgggcttgctgctccgcgtgggggtagaggatctctcccaaggtccagccgtggacgggccatcttggggggtcgtgatcgcggtcatgcccgtgggagtggccgcgggtggttcaatcctggacgtgggcgtggctttgggcaggttcaggctgctgctcctcaacaacgctatgtcccggttgaccttcaggaagctagccaaggaactcaggcagaggcgccggaaccaatcaaggccaaaaagcctcgtacaccattctgttttcgctgtaagtgtcttgggcacctgcaagagaattgctcagctattcttgactgctgcatctgcaacaaaaaaaataatcatgtgccggcaaagtgtcctattctcaagatgccaaggcctactgcatctatgttggggtgtgcaaaaaatgaattgaccttttttcggatcccggagtttgacttgatggtcgaggctcctgcaccggcaccaactgctttgatatcagtatcaggtggtaaattagatgcgttggccattcaattggagcttgccaaattgtctagagtggagtggaactgggaagctctaccccatggggatgattcttttctggtagtatttccctcagaggatgaactgctccggatggctgatattgagtataaactcaagagtggaatttctattagtatcagtcaatgggaaaggactggggatgctagtccagcctattatttggatgagatttgggtgcatgttacaggtgttcctcatgactggcgtcacttcttggccttctgggcagttgggtctatgattggcactacgattgaggttgatatgttgacatacaggaagaaggggattattcgccttctggttggtattttagacagagaacagttgcctctaacaacagatattgtcttccacaaggttggatatgatattactttcacccctgagctgccagattttgaaccggctatgccttccctggtcctggatgcttctgagaaagaggacggagacaacaaggaagatggggctccgagggtcagtgaatttgatccatcaagaaagaaacaaaagaatgtactgggttccttcggtccaaattcctctagtgataggcaggactcggcccccatgcatgttgattgcagtgaggttcataggccaatgtacacaacagggtcaggagtatgtgttgtagcacctacagagaagagtgtaatcaaatcgtctttaccacctggtttcaagacaggcaaaccaaatggttcaattagtctgatgaagcctctttctccttcgaaggaaaggacaactgatcacgctaagcaggtttcagtgcatgttgtgcctggttccgctttggttgcagggacaggtgccgcaatcccagcaggtgatcttgcctcggataattgggcaccggtggtccctcaggctgggccatctttaacctccatggtcaatgggactacgatgcctctgcagtttggatctctgaacatggccaaccaaaccttggctgcttgttcacggcctgctgtggagaggaacctggtggcgactcagcaaatgaagaccacccaaggtgttgtccaggatcagagcctgcgtggcgagtctgagcccgaaaattatgcacctgctccggttatttcttatgatattgatatgacagaaaaggcaatgcggcgcgctgcagcacggaatcttgacgctgatttgggctccaagacggtggcttcctcacaagagatgctacattcgcctttaacgcccgtgcagcaggaaactggtatgtcacaacacataaattccatgtcttttgtcacaatgactgatcgggattgtgctataaacttagacaatttaggtctaacaatgaaaagaagtagctcagggactaacttatcaaattaaagctcttaaaaggatagaaattgatagaacaaggttgtatcaatctaacaagcgtgaggcctcaaagaaaatatcgcctaacc

SEQ ID NO: 49752 - DNA, 1231 bp, Zea Mays
caccgttactcggttgcgtgcgctgccacggtgtgggcgactcagtgttccgcgggcccggggcatcagcagctgaactaccttgccgacgagggcgggcgtgccctgaagacccggtgcttctccgttgcttgcatggcgctccacctcgcggccatatagatcgggccatcgtgatcctcctccttgttttcccaccgagcccagccgaaaccgctctaccattgtcgcctccaagattccacccgccattgttgccgagagtgggacctcgccaggattggtgtgccgctcgaattgagtaggtcggggagctccactacgactcgacgagcgtgtccacggccttatgtcaggttgggtgctcttgtgcccttctaatttctcgtcggagctcggcttgtgcatagatccgccgtgagacctcctgcgcccagtctaccttccctttcggggttcgtcgggacgccatccgtatcgcgggcagagctactcaactgtgtggcggccggtgtaatcgttcctcatgtgttcgccttgggtctagcttcgggttgcacgggctcccttcaaggttgtagcagtcgcaccccgtggggacttcctccgtccatggcttcgctgcggcgcaacttggttagtcgccggcgttcaaccaggaagaggaagacgcgatctggctgttgatacgctgatgtggggcaaggattagaaattaccataccccttcgctgagttcatctcggtcgtggatttcaatcagacggctcacaactgatttagggtaggtgattccttcaccgtcgatcgtagatccgacgtctcacgtggcacactggttcgcttcactctagatctaatctgggtcgttggaatttgatccaacaacagggaaacagccatacccctttggccctgtaaaattgtataagagaccctggataattatagaatcaacaagccatccacattcactgttcactgagtcttaggaattcttacactgagacccctgtgcttttcacttttggtgtgcagtccagatagttaatataacagagaaattaaactagaaatggatttttaatgtaaaaataaatgctagaacttgtttaattcatagaaaattcatacttagtccaatttaatccattcccgttcctataattctgtaataatgttgtttatcacctagtgtctctattttgacatgaaaacaataatgaaattg

SEQ ID NO: 49753 - DNA, 3227 bp, Zea Mays
caccgttactcggttgcgtgcgctgccacggtgtgggcgactcagtgttccgcgggcccggggcatcagcagctgaactaccttgccgacgagggcgggcgtgccctgaagacccggtgcttctccgttgcttgcatggcgctccacctcgcggccatatagatcgggccatcgtgatcctcctccttgttttcccaccgagcccagccgaaaccgctctaccattgtcgcctccaagattccacccgccattgttgccgagagtgggacctcgccaggattggtgtgccgctcgaattgagtaggtcggggagctccactacgactcgacgagcgtgtccacggccttatgtcaggttgggtgctcttgtgcccttctaatttctcgtcggagctcggcttgtgcatagatccgccgtgagacctcctgcgcccagtctaccttccctttcggggttcgtcgggacgccatccgtatcgcgggcagagctactcaactgtgtggcggccggtgtaatcgttcctcatgtgttcgccttgggtctagcttcgggttgcacgggctcccttcaaggttgtagcagtcgcaccccgtggggacttcctccgtccatggcttcgctgcggcgcaacttggttagtcgccggcgttcaaccaggaagaggaagacgcgatctggctgttgatacgctgatgtggggcaaggattagaaattaccataccccttcgctgagttcatctcggtcgtggatttcaatcagacggctcacaactgatttaggaagagcctgtggctgaggatcccggtgtttagcagatagaagttgctgagcaggagctcattgaaggcaagttgtgcccttgaccactttttacccaataatgttctttaatatcacttaattatgcataggtgtaattttgataggacccaataggtcacccttgactggttatcctctaccttgtttacccctgaatcatttgggtagttttgctattgctttatatggttttgggttaatattacattttatccatgttccagttattttatttatgttcatgtcaagatcattatttttaattggaacatggagcttaacttgagaaacaccaagggtggaatgggtcgtccttggctgactaattaggaaagctagtgggagactaccttacccgaaaggggcaagggcagtaggggagcaggcgtgtagggaggttctcgggttgattttgctgcgatggcggtcagacgagggtttcctgcattgctcttcccagaaactgtagcggattttcggaagctagtggaactttgtaaaggccgcgtagtgttatcctgcctcgctttccttgggagaggtgtatggggcccatacaaccaccgtggcagatgggtaacatgacttgtgggtacagggtacaacctctgcggagtgtaaaactggtatactagccgagctcgctgtcatgagcagcttaggactctcgcatgattaaattatggaacttaaatttaatttgtcatttgcattgcatgggtttatttattaattttcttctattcttattatggtttggtatttacttacacttagtaactgctaataaaatttgaccaacttattaaaagcaatgctcagctatcacccctattgttgataagccttacacctcacatgaactatcacctttggtgagttcatgcacattattccccacaacttgttgagctatgaacgtatgtgagctcacccttgctgcctcacaaccccccccccacataggagaagaaaaggtggcccaggaggagccgcacaatgaggagtttgacttgatctaggtgtcgtctcccagtcgactttgtggcgccaaggatgaactttagtttgttttatatttatcttttattttgtaagacatccgctatgtaataagtacttttatgatattgtgacatttatctctatacactttattattatatgtgttgcttctttggcgcatatatgagatgcacccgactttatcccttaaatctgggtgtaacacatatccaatctaaaggaagttacttaaacaagttagttaatactggtaacacaaattagaccatattcctataaatgggttttaaaacctaaattggtgttttagaccaactcgtccgtgaaaccacgacctagcctatgttataggttaccaaacccatttatcccaaaagcaaagtaaaactctgtttaatctacctaccccttgtacccgcaatagttatcccaactcagataatggcatctaacaccaccgatggtccctaaatcagacccaagaagaaggttaaactcgacaatgaaggagataagtagaaactgaattcatatgaatcaagatccaccacccgaaattaaagtctcccctacttaattttctcttaccccttaatcttctctacactcaccaaataactaaagcatgatgtacccttgttttctatgccacacctgttaatggcatgaaatttttaggtgtataaaaaaatattaattggaagttccacttagaaaaaaagatactagaatttcataaagataaagtcggccagatatgctcaactaaatgatattcttaaatagcattatagaatctaatgtgatctaatctagtatgatctaacctgatgtggcttacttaaacagattagtgatactggtagaataaaggagacctatctaatctaatgtgatctaactagagtgagttacttaatgttgggggccttcgtcttccaaaggtcctcaaaaaaatgatttaacaatgtttcccaagtgtaatatatgaacaggtaccatcggactcgggttaaaacaatacatgatgtcaaaagcatgttcaagacgaaggctgatgttgctccgaagctacgcgcaagggagcttcggtccaatggcggaaaaaggaaccgacttaaaggggacaaggctatctagtcctcgttgggttgttcataagtcaatagtaaatatgaagggcataaatttacacaggttgcgccctgtgcctataaatagatgaacagtacccccgtactgttcacgctgacttgatactcgcttgtgtgtcacgcttgtacttttaccttctgtcaagccgaaggtacatatgtaatcttgtattgtttctattcattcatgattatataacaaaaagatatattatgatatc

SEQ ID NO: 49754 - DNA, 1189 bp, Zea Mays
agccaactgacaacccgaccgtgttgcctctctcctcctttcgtgtcgtctctctcctctcctctcctctcgcgtctgcagcttcccttgccggctagggtttgcagatgacgacggtggcacccacattttcggcccctcccagaagtactcgtcccgcgacctcgccgcgcatacctcgctcaagcccagaaaagacggtcaatagacccaagaggagttacagaagaggaatctcagggaggaacttgaggaacgtgagcgcaagcactactcttccaaggataagtcctatgctaaagaaagagaccggcggaaaagctcaagccagctactcctagaaggttcaaagagagaggcagaggataagatagttccatgagaaattgatgcagatgactccgatgtggagcctaaaagtgatgatgacagagaagacaacacaacatctttcttgacattgtttaggcagaagtggagcaactgcgagaagaacttaggcgacatcaggattaattgaagcaacaagctgcgcaacatgaatattatgctacacagattcaacaacagcaaacactcataaaagtaagttcaaaagataatagctttcactttaagatatatattgatttaaaacgctgatgtgaatgagttcgacaaatttgtagcaactagcataggcctaagggatacaagtcccggtgcccccaccaccactacctcccgttcattatccttggtcttcacctccaccgacacctacatcaccatctaccgaacatcaggtatgcaaattcatcatcatttacttgttgttagttatattatgatgtaactcagcaaatatcatttgtacatgtatattagacccctccagctaccttgtcgacgcatgaacgagaagacgggttagactttgtcgaaaccctctttgctagtggaggtatcgaccatcagtcgtcattgtaacccgatggtgatcggtgaccgtgagcttccatgttattgtgttctgatacttgagacttttattatgactatgtatgagatattgtctcttattagtactggatgatgagatgtgtcttattatgactatggatatgacttttgtgatgtaattgatgagactataaatttaaatattgttatgtgattgtgtgtgagatgttttatgtgaaaatatgtt

SEQ ID NO: 49755 - DNA, 1092 bp, Zea Mays
gttttaggcctgtttcagtttgttaccattcttgacacatgagttaactctgagatgaagctgaatcgattcaatctgatggctgcaaattcgagaaaagacggtcaatagacccaagaggagttacagaagaggaatctcagggaggaacttgaggaacgtgagcgcaagcactactcttccaaggataagtcctatgctaaagaaagagaccggcggaaaagctcaagccagctactcctagaaggttcaaagagagaggcagaggataagatagttccatgagaaattgatgcagatgactccgatgtggagcctaaaagtgatgatgacagagaagacaacacaacatctttcttgacattgtttaggcagaagtggagcaactgcgagaagaacttaggcgacatcaggattaattgaagcaacaagctgcgcaacatgaatattatgctacacagattcaacaacagcaaacactcataaaagtaagttcaaaagataatagctttcactttaagatatatattgatttaaaacgctgatgtgaatgagttcgacaaatttgtagcaactagcataggcctaagggatacaagtcccggtgcccccaccaccactacctcccgttcattatccttggtcttcacctccaccgacacctacatcaccatctaccgaacatcaggtatgcaaattcatcatcatttacttgttgttagttatattatgatgtaactcagcaaatatcatttgtacatgtatattagacccctccagctaccttgtcgacgcatgaacgagaagacgggttagactttgtcgaaaccctctttgctagtggaggtatcgaccatcagtcgtcattgtaacccgatggtgatcggtgaccgtgagcttccatgttattgtgttctgatacttgagacttttattatgactatgtatgagatattgtctcttattagtactggatgatgagatgtgtcttattatgactatggatatgacttttgtgatgtaattgatgagactataaatttaaatattgttatgtgattgtgtgtgagatgttttatgtgaaaatatgtt

SEQ ID NO: 49756 - DNA, 792 bp, Zea Mays
atgccatttctgaatgttattcttgcactctgtgtacaagaaccagttcaacaggtcaatgaaggcgatagtttggatgatggaaatgatgacatggatgagcaagctagatcttcacaacacctgtcctcatcaacagctgagatttccttgcccccatctgaggatagtgatcgaatgagtgggcaagtagagaatgatgatgggctgggattagttcagagtgacactccagttggagcagcagatggtgacagtacccagatcacctcgactttgactactttttcggcttattgtcataaagatcctaatattcatacaaccaatgaggcccagctatatgaactggtggagcctaatgtacatccacaagcattagcttcctcttctcaggctcttaaagtcccttactctcatcagggatacccttcagaaaatccagaagcagataatgttgtgcaagtctacaggatgccagattctaatgttcactcacaagttctcccgtccacatctgagcttccttccggtggttggggagaaagctatttatcatctcaagaccaggcttgcagctacatgaccaacattttgaagacaaccaatttgtacataaggttctgcattttccttgaggacaaccaatttctccttaacggaaatccatttcatcttagcaatctcaatatgaggttgaattcattaacaccttgttgataccttttgtacattatgttctacattttcttgaggagaaccaatttctccttaacaggaatccatttcttc

SEQ ID NO: 49757 - DNA, 676 bp, Zea Mays
atgccatttctgaatgttattcttgcactctgtgtacaagaaccagttcaacaggtcaatgaaggcgatagtttggatgatggaaatgatgacatggatgagcaagctagatcttcacaacacctgtcctcatcaacagctgagatttccttgcccccatctgaggatagtgatcgaatgagtgggcaagtagagaatgatgatgggctgggattagttcagagtgacactccagttggagcagcagatggtgacagtacccagatcacctcgactttgactactttttcggcttattgtcataaagatcctaatattcatacaaccaatgaggcccagctatatgaactggtggagcctaatgtacatccacaagcattagcttcctcttctcaggctcttaaagtcccttactctcatcagggatacccttcagaaaatccagaagcagataatgttgtgcaagtctacaggatgccagattctaatgttcactcacaagttctcccgtccacatctgagcttccttccggtggttggggagaaagctatttatcatctcaagaccaggcttgcagctacatgaccaacattttgaagacaaccaatttgtacataaggttctgcattttccttgaggacaaccaatttctccttaacggaaatccatttcatc

SEQ ID NO: 49758 - DNA, 474 bp, Zea Mays
atataataacatagtgtatagagataaatgtcacaataatcagagtatttattacatagcggaagtcttacaaaataaaagataaatataaaaggatctaaaatccatccttggcgccagaaagtcaactgggagatgccacctagatcgaattgaactcctcgatgtgtggctccacctgaaccacctgttcttcttctgtggggggtgtgagacagcaagggtgagctcacacatgttcatcgctcaacaagttgtggggaataatgtggcatgaactcaccaaaggtggaagttcatgtgatgtgtaaggctgatcaataatagaggttcaagctgagcactgcttttaataagttggtcaaattttattagtagttactaaatgtaagtaaataccaaaccataataaataataatagaacaaaattaataataaatctcatgtaatgcatatgacaaattgagtttaag

SEQ ID NO: 49759 - DNA, 693 bp, Zea Mays
tagacatggccaacatgcagtgaagcagtgtgtccgagagcgccagcaacatatggacttcaacacgtggctaacatgctctcataccccaccagtacacaaccttggttaggacactgaacctggtccattttctcaacacaaatatcagttggggatatgctttaatatgtccaagaacaggatattctttccagctgagggtgggttctagacctcagttataccctccacacttatctcaactatacacatacatgtatctcttttgtcccctactgcagacagcagaccaaccaatcaattctccactatttactgctccaaaatagtccaaattagatatttttggtggagagtagcctcaaagtatcagtcatgcacttcccccatatgacagcttaatatgtcagtggagcacagcaaagaaaaagattcttctttagttacacctccacacactgaatcacttcatcaacctgctgccccatttaattcctcccagttcagaccctctgatctttcaatttttcatagcaacagaccatgctcccttcacaaaagttgttctctatacatagttctaccaacttggtatagaaatcacaggttgaaaatatttagagcaagagttattgcaatccaaagttaagcaaaacactcaaaattcagtttcggatttattaaacagca

SEQ ID NO: 49760 - DNA, 817 bp, Zea Mays
acggttggtccacctcctcctgctcctctggcctctgcggtgcctcctcccggtcccgagtcccggccatgtcgtcgccgctggaggatgtcagcgtgggcatggaggaggaggatcagcggcccctgaaccgggccctgctccaccggagcgccaccaccaacgcctcccaggtggccatggtcggctccaatccctgccctatcgagagcctcgactacgagatgatagagaacgagctgttcgaccagaactggaggacgaggcgcaaggcggaccaggtgcggtacgtggtgctcaagtggaccttctgcttcgccatcggcatcctcaccgggatcgtcggcttcttcatcaacctcgccgtcgagaacgtcgcgggcttcaagcaccaggccgtttccgccctcatggactccgccagctactggacggcgttctgggtgttcgccggctgcaacctggcgctcctgctgctggcgtcgtccatcacggcgttcttgtcgccggcggccggcgggtcgggaatcccggaggtcaaggcctacctcaacggcgtcgacgcgcccaacatcttctcgctgcggaccctcgctgtcaaggtgcgccgtgtgtgttccgttcccatcctcctgccctcgccgtcgctttcgcttgctgcagtgcacatgctcccctcaccatttcctggtgccagctgcgcaaatggattaccatccacactaatataatgtaacaagggcattcattcctccatccaactgcatgatctacgagaaaggaaagcaaccagcaaacgccaccaataatgtcgggc

SEQ ID NO: 49761 - DNA, 2757 bp, Zea Mays
acggttggtccacctcctcctgctcctctggcctctgcggtgcctcctcccggtcccgagtcccggccatgtcgtcgccgctggaggatgtcagcgtgggcatggaggaggaggatcagcggcccctgaaccgggccctgctccaccggagcgccaccaccaacgcctcccaggtggccatggtcggctccaatccctgccctatcgagagcctcgactacgagatgatagagaacgagctgttcgaccagaactggaggacgaggcgcaaggcggaccaggtgcggtacgtggtgctcaagtggaccttctgcttcgccatcggcatcctcaccgggatcgtcggcttcttcatcaacctcgccgtcgagaacgtcgcgggcttcaagcaccaggccgtttccgccctcatggactccgccagctactggacggcgttctgggtgttcgccggctgcaacctggcgctcctgctgctggcgtcgtccatcacggcgttcttgtcgccggcggccggcgggtcgggaatcccggaggtcaaggcctacctcaacggcgtcgacgcgcccaacatcttctcgctgcggaccctcgctgtcaaggtagtggggaacatcgcggccgtatcatcgtcgctgcacgtcggcaaggcggggccgatggtccacaccggcgcgtgcatcgctgccatcttcgggcagggaggctcccgcaagtacggcctcacctgccgctggctgcgctacttcaaaaacgaccgcgaccggcgcgacctggtgaccatcggcgccggcgcgggggtggcggcggcgttccgcgcgcctgtcggcggcgtgctgttcgcgctcgagtcgctgtcgtcgtggtggcgcagcgcgctcatctggcggtcgttctttacgacggcagtggtggcggtggtgctgcgcctcttcatcgagctgtgcgggaccgggcgctgcggcatgttcggccggggcggtctcatcatgtacgatgtcagcaccgtgttcgacgacctcatgacctaccacctcaaggacatccccaccgtcatcctcatcggcgtcaccggcgccctgctcggcggactctacaacttcctcatgataaaggttctccgactctacaacgccatcaacgagagaggtggagcgcacaagctgctgttagcggccaccgtctccatcgtgacgtcgtgctgcgtcttcggcctgccatggctggcgccgtgccggccgtgccccacgacgggtccactttcgtcgccggacgggacctgccacgcgctgaaccgtttccggcggttccactgcccaaagggccactacaacgatctcgccagcctgttcctcaacatcaacgacgacgcgatccgcaacctctactccaccggcaccaacgacgtgtaccacccggtttccatggtcatcttcttcgtggcgtcctacgcgctcggcgtgctcagttacggcgttgtggcgccgtccgggcttttcgtccccatcatcctcacgggcgccacctacggccgcctcgtggcaatgctgctcgggggccgctccggcctcgaccacggcctcgtcgccatcctcggctccgcgtcattcctcggcgggacgctccggatgacggtgtccgtgtgcgtcatcatcctcgagctcaccaacaacctgctactgctgccgctcgtcatgctcgtgctgctcatctccaagacggtcgccgactccttcaactccagcatctacgacctcatcctgcgcctcaagggcctgccccacctcgatggccacgctgagccgtacatgcggcagctggccgtcggcgacgtggtggccgggccgctgcggagcttcggcggcgtggagaaggtcggcaacgtcgtgcacacgctccgcaccacggggcaccacgcgttccccgtcgtggacgagccgcccttttcgccggcgccggtgctctacggcctggtgctgcgcgcgcacctgctggtgctgctcaagaagagggagttcctggtggcgccggagcggtgcccaaaggagtacgtggccgagaggttccaggcggaggacttcgacaagcgcgggtccgggaagcaggataccatcgccgacgtggtgctgtcgccggaggagatggagatgtacgtcgacctgcaccccttcaccaacacgtcgccgtacacggtggtcgagaccatgtcgctggccaaggcgctcgtgctcttccgggaggtcggcctgcgccacctcctcgtcgtgcccaaggcctgcgataggtcgccggtggtcggcatcttgacgaggcatgacttcatgccagagcacattctggagctgcaccctgtccttctgaggagcaggtggaagaggctccggtggcagaggggcgccatggccaagtacttccgatcgctcatcgtgtgggtcgccaacagcggctgaagcagatacattgctgccaggaaactgctgctggctcctgcagattgaaggagtcatcatcattgggtatttgtgaaataacaacacgtgttgatagcttcatatacatatatgcatatatatgttcagtcaaaattttgtcgttgtcttttggtactacgtttgtataattttcattttagtgaaagaagacgagttcgccacattgttttatgtcttctatacacttgaacaggtggcgtcctttggacgccctgcaatgactaaatgaagcaagtccctgctgatcacaggcaacagaaggttt

SEQ ID NO: 49762 - DNA, 1260 bp, Zea Mays
aacccttatatatgtcaactcgcacccgggtttctcaagaccagaacgagttcacacgacccgagagcacagtaccccaccatccagccacttgccaggtgggcacacgttactcccaccatctctccactcccagtgcgtgcgagatgttatggtattggtccgaccgaggctaagcttacccatgatgaggcatgtggccagttaaagggtcctacatcagcaggccaacaatcgttgcggtccttaatcggcacaggcggacgacctttcctgctcaacgtctggtctagaattattatttccttcccaaaatcatatacttgacagaggtaccataattgaatgatgaattcatcattgtagatgatgatctcaccattgcaagtcctttttcataaaacaaactcatacctagtgttacacatcattctagaaacaagttttaattctctaggcaggtctaagcatcattagttctctttataaaacaggtatcaaggaagataatcaaatttcaaggaatggcaatgcatcaattatttcatcactcaactcctatcacctaatgcaacatataagtgataaaagttttataacaacaatgaggtagcaaatgcatcggggctttccagggacaacactaagttagtgttgttagataatattttcttggcaagtatcatccatcctggcacttgtttgattcatccactttggcttcgttcatcagcatcaccttgagattaatccaactcttgtcctccacatcacgtgatcgattaatgttcctatatgatatgcaataatgcatatgagtaaggacatgaatagcaaatgataaaacacctataataaagaggggaaacacttcaagcaagacatcacaaacattcataattcttgatagaattgctggggcatctcgaccttgtggcatctcgacctttccgtgtaaatacttcaagcaagatcttctcccttgtggcatctcgacctttccgtgtaaatacctggggctgcctctgtccctgaaaaatctcaccaaggatcaggtgcagcctattgtggatagaattgctgatcagctgccaggctggaaagcagatttgatgacaagagcaggtcgtaaagtgcaagttcagcatgtgcttaccggaatgcttatttatctttctatggcagtaaatattccctcttgggctattaaggccattgataaaattagaaaaagtttcctttggagagggcgcaaggagg

SEQ ID NO: 49763 - DNA, 2358 bp, Zea Mays
aaagaacttgctttgggaactagtggccccgtggtcaaagaaacaactttcaccgttaccttcccagttccgttccctcccaaaccctaactcccgaatcccctcgctctcctctaatggccgccgatgccgacgcagccgaggtggagcggctttacgagctcggcgagcgcctctcttccgccaaggacaagtccgagcttgcggcggactacgaggcgattattgcagcagtgaaggggcagagtgtcaaggcgaagcagctcgcagcgcagctcatcccgaggttcttccggagcttccctgcactcgccacccgcgccatgtcggccatgttcgacctcgttgatatggaggagctcgcgatcagaatacaagctattcggggttttccacttcttggtaaagatactgaatttgtgtcaaaaattgcagatgttttgggacaactccttacaagcgaggaaaatgtggaacgtgatgctgttcataaagcactcatgtcccttatacgagaagatgttaaaaattctttacaacctttatttaagcatgtggagcaaggatcagagattcgtgagaagattatttgttttcttcgagacaaggtttttcctcttaaagcagagctactgaaacctcaagcagaaatggagagatttataacggatttggtaaagaaaagtgtgcaagatgtaactggttcagaatttgaactattcatggggtttctgcgaagcttgagcatatttggggattctgctcctagagagtcctttcaagaactaattgaaattattcaagcacaggctgatctcaactcacaattcaatgtttcggacattgaccacattgaaaggtggatttcatgcatgtatatggctcttcctatcttcatgagaggagcatcagcaagcaagttcctcaattacttcgttaagcaaattgttccagcattcgagaagattcctgaagaaaagaaactggatttgctcaagactattgcttcaagttcaccgtacgcgacagctcaagattcacgtcagctgcttccatctgttgttcagttactcaacaaatatatgcctgggaagaaggtggacgatatcaaccataattatgttgaatgcttgctgtacacttatcatcatttggctcataagactccaaacacaacgaacagtctatgtggttacaagattgttactgggcaaccatcggatagacttggagaggacttcacagagcattacaaagattttacagagaggttaactggaacagaagagacggtaagagcagcctcaaagcgactaactcagggaatggcagatttcagcaaggcaatatcttcagcaaaaaccgaagaggaaaaaactaaaattaaaggcgatcaacaaacttcaacaaggacaatgaggtcatataacaatatattggcaatggcacagccattgcattcaaaatcccctttatttatcggtgataagaaaatcgctctatcatggatggagcatcccaagaaaccaacagctacgacagcaggggggaagaggtcacaacctgctactacaaatgggaatggccctgcaaacaagaaagggagaggaggaatgcacaaccagcttgtgaacagagcttttgaaggactgtctcgtggtggtagaggcactggaagggggcgtggcaggggtggccgaggacgaagagggtggggtggctaccgctgagatgacctggaaactctgttcaaacctgacatgggatgagctttctgcttccacttgagagtaaatgcaaaggtcgatatttatttgtgtgcctcagcgcaacaagtttaaattggaaggcacacaacagcagaatgcgtacagaaagagtaaaaaagaatgcttgagaaatgtccgcaagatctgtgcatctttcctattcatttgccatcaagccgtgttctttgccaccctccgtcgcttcacctgagttggctgtttgatgaaatgttggcaagatctgtgcatcatctttcatattcacttaccatctcaccgtgttctttgaaccctaacagtcgtttcacctgtgttggctgttagaactcaacagtaagatatcgttcatttattttatttgattttaccagtgtttgaagaggcgaccgagcttttgtgttggacttcgtttaagttcgttttatgatccgttttaccggcacagaggtatagtgatgtttaaattttatagtaaggattgatctattttaggatccgatttacctgctgtacaacccacataaaaatgataaatgacctgtattttaaggggtattaagtgtttaagggtatcaaaggggtaagtgtt

SEQ ID NO: 49764 - DNA, 2385 bp, Zea Mays
gccccgtggtcaaagaaacaactttcaccgttaccttcccagttccgttccctcccaaaccctaactcccgaatcccctcgctctcctctaatggccgccgatgccgacgcagccgaggtggagcggctttacgagctcggcgagcgcctctcttccgccaaggacaagtccgagcttgcggcggactacgaggcgattattgcagcagtgaaggggcagagtgtcaaggcgaagcagctcgcagcgcagctcatcccgaggttcttccggagcttccctgcactcgccacccgcgccatgtcggccatgttcgacctcgttgatatggaggagctcgcgatcagaatacaagctattcggggttttccacttcttggtaaagatactgaatttgtgtcaaaaattgcagatgttttgggacaactccttacaagcgaggaaaatgtggaacgtgatgctgttcataaagcactcatgtcccttatacgagaagatgttaaaaattctttacaacctttatttaagcatgtggagcaaggatcagagattcgtgagaagattatttgttttcttcgagacaagcagagctactgaaacctcaagcagaaatggagagatttataacggatttggtaaagaaaagtgtgcaagatgtaactggttcagaatttgaactattcatggggtttctgcgaagcttgagcatatttggggattctgctcctagagagtcctttcaagaactaattgaaattattcaagcacaggctgatctcaactcacaattcaatgtttcggacattgaccacattgaaaggtggatttcatgcatgtatatggctcttcctatcttcatgagaggagcatcagcaagcaagttcctcaattacttcgttaagcaaattgttccagcattcgagaagattcctgaagaaaagaaactggatttgctcaagactattgcttcaagttcaccgtacgcgacagctcaagattcacgtcagctgcttccatctgttgttcagttactcaacaaatatatgcctgggaagaaggtggacgatatcaaccataattatgttgaatgcttgctgtacacttatcatcatttggctcataagactccaaacacaacgaacagtctatgtggttacaagattgttactgggcaaccatcggatagacttggagaggacttcacagagcattacaaagattttacagagaggttaactggaacagaagagacggtaagagcagcctcaaagcgactaactcagggaatggcagatttcagcaaggcaatatcttcagcaaaaaccgaagaggaaaaaactaaaattaaaggcgatcaacaaacttcaacaaggacaatgaggtcatataacaatatattggcaatggcacagggcaaggcgaggccggcgcccagaagaatccggctcatgaacgcctaggcgacgccttttaaaccatgccattgcattcaaaatcccctttatttatcggtgataagaaaatcgctctatcatggatggagcatcccaagaaaccaacagctacgacagcaggggggaagaggtcacaacctgctactacaaatgggaatggccctgcaaacaagaaagggagaggaggaatgcacaaccagcttgtgaacagagcttttgaaggactgtctcgtggtggtagaggcactggaagggggcgtggcaggggtggccgaggacgaagagggtggggtggctaccgctgagatgacctggaaactctgttcaaacctgacatgggatgagctttctgcttccacttgagagtaaatgcaaaggtcgatatttatttgtgtgcctcagcgcaacaagtttaaattggaaggcacacaacagcagaatgcgtacagaaagagtaaaaaagaatgcttgagaaatgtccgcaagatctgtgcatctttcctattcatttgccatcaagccgtgttctttgccaccctccgtcgcttcacctgagttggctgtttgatgaaatgttggcaagatctgtgcatcatctttcatattcacttaccatctcaccgtgttctttgaaccctaacagtcgtttcacctgtgttggctgttagaactcaacagtaagatatcgttcatttattttatttgattttaccagtgtttgaagaggcgaccgagcttttgtgttggacttcgtttaagttcgttttatgatccgttttaccggcacagaggtatagtgatgtttaaattttatagtaaggattgatctattttaggatccgatttacctgctgtacaacccacataaaaatgataaatgacctgtattttaaggggtattaagtgtttaagggtatcaaaggggtaagtgtt

SEQ ID NO: 49765 - DNA, 1526 bp, Zea Mays
gtcaaagaaacaactttcaccgttaccttcccagttccgttccctcccaaaccctaactcccgaatcccctcgctctcctctaatggccgccgatgccgacgcagccgaggtggagcggctttacgagctcggcgagcgcctctcttccgccaaggacaagtccgagcttgcggcggactacgaggcgattattgcagcagtgaaggggcagagtgtcaaggcgaagcagctcgcagcgcagctcatcccgaggttcttccggagcttccctgcactcgccacccgcgccatgtcggccatgttcgacctcgttgatatggaggagctcgcgatcagaatacaagctattcggggttttccacttcttggtaaagatactgaatttgtgtcaaaaattgcagatgttttgggacaactccttacaagcgaggaaaatgtggaacgtgatgctgttcataaagcactcatgtcccttatacgagaagatgttaaaaattctttacaacctttatttaagcatgtggagcaaggatcagagattcgtgagaagattatttgttttcttcgagacaaggtttttcctcttaaagcagagctactgaaacctcaagcagaaatggagagatttataacggatttggtaaagaaaagtgtgcaagatgtaactggttcagaatttgaactattcatggggtttctgcgaagcttgagcatatttggggattctgctcctagagagtcctttcaagaactaattgaaattattcaagcacaggctgatctcaactcacaattcaatgtttcggacattgaccacattgaaaggtggatttcatgcatgtatatggctcttcctatcttcatgagaggagcatcagcaagcaagttcctcaattacttcgttaagcaaattgttccagcattcgagaagattcctgaagaaaagaaactggatttgctcaagactattgcttcaagttcaccgtacgcgacagctcaagattcacgtcagctgcttccatctgttgttcagttactcaacaaatatatgcctgggaagaaggtggacgatatcaaccataattatgttgaatgcttgctgtacacttatcatcatttggctcataagactccaaacacaacgaacagtctatgtggttacaagattgttactgggcaaccatcggatagacttggagaggacttcacagagcattacaaagattttacagagaggttaactggaacagaagagacggtaagagcagcctcaaagcgactaactcagggaatggcagatttcagcaaggcaatatcttcagcaaaaaccgaagaggaaaaaactaaaattaaaggcgatcaacaaacttcaacaaggacaatgaggtcatataacaatatattggcaatggcacagccattgcattcaaaatcccctttatttatcggtgataagaaaatcgctctatcatggatggagcatcccaagaaaccaacagctacgacagcaggtttgcaaatcatt

SEQ ID NO: 49766 - DNA, 2271 bp, Zea Mays
gtcaaagaaacaactttcaccgttaccttcccagttccgttccctcccaaaccctaactcccgaatcccctcgctctcctctaatggccgccgatgccgacgcagccgaggtggagcggctttacgagctcggcgagcgcctctcttccgccaaggacaagtccgagcttgcggcggactacgaggcgattattgcagcagtgaaggggcagagtgtcaaggcgaagcagctcgcagcgcagctcatcccgaggttcttccggagcttccctgcactcgccacccgcgccatgtcggccatgttcgacctcgttgatatggaggagctcgcgatcagaatacaagctattcggggttttccacttcttggtaaagatactgaatttgtgtcaaaaattgcagatgttttgggacaactccttacaagcgaggaaaatgtggaacgtgatgctgttcataaagcactcatgtcccttatacgagaagatgttaaaaattctttacaacctttatttaagcatgtggagcaaggatcagagattcgtgagaagattatttgttttcttcgagacaagagctactgaaacctcaagcagaaatggagagatttataacggatttggtaaagaaaatgtaactggttcagaatttgaactattcatggggtttctgcgaagcttgagcatatttggggattctgctcctagagagtcctttcaagaactaattgaaattattcaagcacaggctgatctcaactcacaattcaatgtttcggacattgaccacattgaaaggtggatttcatgcatagaggagcatcagcaagcaagttcctcaattacttcgttaagcaaattgttccagcattcgagaagattcctgaagaaaagaaactggatttgctcaagactattgcttcaagttcaccgtacgcgacagctcaagattcacgtcagctgcttccatctgttgttcagttactcaacaaatatatgcctgggaagaaggtggacgatatcaaccataattatgttgaatgcttgctgtacacttatcatcatttggctcataagactccaaacacaacgaacagtctatgtggttacaagattgttactgggcaaccatcggatagacttggagaggacttcacagagcattacaaagattttacagagaggttaactggaacagaagagacggtaagagcagcctcaaagcgactaactcagggaatggcagatttcagcaaggcaatatcttcagcaaaaaccgaagaggaaaaaactaaaattaaaggcgatcaacaaacttcaacaaggacaatgaggtcatataacaatatattggcaatggcacagccattgcattcaaaatcccctttatttatcggtgataagaaaatcgctctatcatggatggagcatcccaagaaaccaacagctacgacagcaggggggaagaggtcacaacctgctactacaaatgggaatggccctgcaaacaagaaagggagaggaggaatgcacaaccagcttgtgaacagagcttttgaaggactgtctcgtggtggtagaggcactggaagggggcgtggcaggggtggccgaggacgaagagggtggggtggctaccgctgagatgacctggaaactctgttcaaacctgacatgggatgagctttctgcttccacttgagagtaaatgcaaaggtcgatatttatttgtgtgcctcagcgcaacaagtttaaattggaaggcacacaacagcagaatgcgtacagaaagagtaaaaaagaatgcttgagaaatgtccgcaagatctgtgcatctttcctattcatttgccatcaagccgtgttctttgccaccctccgtcgcttcacctgagttggctgtttgatgaaatgttggcaagatctgtgcatcatctttcatattcacttaccatctcaccgtgttctttgaaccctaacagtcgtttcacctgtgttggctgttagaactcaacagtaagatatcgttcatttattttatttgattttaccagtgtttgaagaggcgaccgagcttttgtgttggacttcgtttaagttcgttttatgatccgttttaccggcacagaggtatagtgatgtttaaattttatagtaaggattgatctattttaggatccgatttacctgctgtacaacccacataaaaatgataaatgacctgtattttaaggggtattaagtgtttaagggtatcaaaggggtaagtgtt

SEQ ID NO: 49767 - DNA, 2216 bp, Zea Mays
ctttcaccgttaccttcccagttccgttccctcccaaaccctaactcccgaatcccctcgctctcctctaatggccgccgatgccgacgcagccgaggtggagcggctttacgagctcggcgagcgcctctcttccgccaaggacaagtccgagcttgcggcggactacgaggcgattattgcagcagtgaaggggcagagtgtcaaggcgaagcagctcgcaatcagaatacaagctattcggggttttccacttcttggtaaagatactgaatttgtgtcaaaaattgcagatgttttgggacaactccttacaagcgaggaaaatgtggaacgtgatgctgttcataaagcactcatgtcccttatacgagaagatgttaaaaattctttacaacctttatttaagcatgtggagcaaggatcagagattcgtgagaagattatttgttttcttcgagacaaggtttttcctcttaaagcagagctactgaaacctcaagcagaaatggagagatttataacggatttggtaaagaaaagtgtgcaagatgtaactggttcagaatttgaactattcatggggtttctgcgaagcttgagcatatttggggattctgctcctagagagtcctttcaagaactaattgaaattattcaagcacaggctgatctcaactcacaattcaatgtttcggacattgaccacattgaaaggtggatttcatgcatgtatatggctcttcctatcttcatgagaggagcatcagcaagcaagttcctcaattacttcgttaagcaaattgttccagcattcgagaagattcctgaagaaaagaaactggatttgctcaagactattgcttcaagttcaccgtacgcgacagctcaagattcacgtcagctgcttccatctgttgttcagttactcaacaaatatatgcctgggaagaaggtggacgatatcaaccataattatgttgaatgcttgctgtacacttatcatcatttggctcataagactccaaacacaacgaacagtctatgtggttacaagattgttactgggcaaccatcggatagacttggagaggacttcacagagcattacaaagattttacagagaggttaactggaacagaagagacggtaagagcagcctcaaagcgactaactcagggaatggcagatttcagcaaggcaatatcttcagcaaaaaccgaagaggaaaaaactaaaattaaaggcgatcaacaaacttcaacaaggacaatgaggtcatataacaatatattggcaatggcacagccattgcattcaaaatcccctttatttatcggtgataagaaaatcgctctatcatggatggagcatcccaagaaaccaacagctacgacagcaggggggaagaggtcacaacctgctactacaaatgggaatggccctgcaaacaagaaagggagaggaggaatgcacaaccagcttgtgaacagagcttttgaaggactgtctcgtggtggtagaggcactggaagggggcgtggcaggggtggccgaggacgaagagggtggggtggctaccgctgagatgacctggaaactctgttcaaacctgacatgggatgagctttctgcttccacttgagagtaaatgcaaaggtcgatatttatttgtgtgcctcagcgcaacaagtttaaattggaaggcacacaacagcagaatgcgtacagaaagagtaaaaaagaatgcttgagaaatgtccgcaagatctgtgcatctttcctattcatttgccatcaagccgtgttctttgccaccctccgtcgcttcacctgagttggctgtttgatgaaatgttggcaagatctgtgcatcatctttcatattcacttaccatctcaccgtgttctttgaaccctaacagtcgtttcacctgtgttggctgttagaactcaacagtaagatatcgttcatttattttatttgattttaccagtgtttgaagaggcgaccgagcttttgtgttggacttcgtttaagttcgttttatgatccgttttaccggcacagaggtatagtgatgtttaaattttatagtaaggattgatctattttaggatccgatttacctgctgtacaacccacataaaaatgataaatgacctgtattttaaggggtattaagtgtttaagggtatcaaaggggtaagtgtt

SEQ ID NO: 49768 - DNA, 1228 bp, Zea Mays
cagttccgttccctcccaaaccctaactcccgaatcccctcgctctcctctaatggccgccgatgccgacgcagccgaggtggagcggctttacgagctcggcgagcgcctctcttccgccaaggacaagtccgagcttgcggcggactacgaggcgattattgcagcagtgaaggggcagagtgtcaaggcgaagcagctcgcagcgcagctcatcccgaggttcttccggagcttccctgcactcgccacccgcgccatgtcggccatgttcgacctcgttgatatggaggagctcgcgatcagaatacaagctattcggggttttccacttcttggtaaagatactgaatttgtgtcaaaaattgcagatgttttgggacaactccttacaagcgaggaaaatgtggaacgtgatgctgttcataaagcactcatgtcccttatacgagaagatgttaaaaattctttacaacctttatttaagcatgtggagcaaggatcagagattcgtgagaagattatttgttttcttcgagacaaggtttttcctcttaaagcagagctactgaaacctcaagcagaaatggagagatttataacggatttggtaaagaaaagtgtgcaagatgtaactggttcagaatttgaactattcatggggtttctgcgaagcttgagcatatttggggattctgctcctagagagtcctttcaagaactaattgaaattattcaagcacaggctgatctcaactcacaattcaatgtttcggacattgaccacattgaaaggtggatttcatgcatgtatatggctcttcctatcttcatgagaggagcatcagcaagcaagttcctcaattacttcgttaagcaaattgttccagcattcgagaagattcctgaagaaaagaaactggatttgctcaagactattgcttcaagttcaccgtacgcgacagctcaagattcacgtcagctgcttccatctgttgttcagttactcaacaaatatatgcctgggaagaaggtggacgatatcaaccataattatgttgaatgcttgctgtacacttatcatcatttggctcataagactccaaacacaacgaacagtctatgtggttacaagattgttactgggcaaccatcggatagacttggagaggacttcacagagcattacaaagattttacagagagaaacaacaaaactcgacagttt

SEQ ID NO: 49769 - DNA, 2275 bp, Zea Mays
cagttccgttccctcccaaaccctaactcccgaatcccctcgctctcctctaatggccgccgatgccgacgcagccgaggtggagcggctttacgagctcggcgagcgcctctcttccgccaaggacaagtccgagcttgcggcggactacgaggcgattattgcagcagtgaaggggcagagtgtcaaggcgaagcagctcgcagcgcagctcatcccgaggttcttccggagcttccctgcactcgccacccgcgccatgtcggccatgttcgacctcgttgatatggaggagctcgcgatcagaatacaagctattcggggttttccacttcttggtaaagatactgaatttgtgtcaaaaattgcagatgttttgggacaactccttacaagcgaggaaaatgtggaacgtgatgctgttcataaagcactcatgtcccttatacgagaagatgttaaaaattctttacaacctttatttaagcatgtggagcaaggatcagagattcgtgagaagattatttgttttcttcgagacaagagctactgaaacctcaagcagaaatggagagatttataacggatttggtaaagaaaagtgtgcaagatgtaactggttcagaatttgaactattcatggggtttctgcgaagcttgagcatatttggggattctgctcctagagagtcctttcaagaactaattgaaattattcaagcacaggctgatctcaactcacaattcaatgtttcggacattgaccacattgaaaggtggatttcatgcatgtatatggctcttcctatcttcatgagaggagcatcagcaagcaagttcctcaattacttcgttaagcaaattgttccagcattcgagaagattcctgaagaaaagaaactggatttgctcaagactattgcttcaagttcaccgtacgcgacagctcaagattcacgtcagctgcttccatctgttgttcagttactcaacaaatatatgcctgggaagaaggtggacgatatcaaccataattatgttgaatgcttgctgtacacttatcatcatttggctcataagactccaaacacaacgaacagtctatgtggttacaagattgttactgggcaaccatcggatagacttggagaggacttcacagagcattacaaagattttacagagaggttaactggaacagaagagacggtaagagcagcctcaaagcgactaactcagggaatggcagatttcagcaaggcaatatcttcagcaaaaaccgaagaggaaaaaactaaaattaaaggcgatcaacaaacttcaacaaggacaatgaggtcatataacaatatattggcaatggcacagccattgcattcaaaatcccctttatttatcggtgataagaaaatcgctctatcatggatggagcatcccaagaaaccaacagctacgacagcaggggggaagaggtcacaacctgctactacaaatgggaatggccctgcaaacaagaaagggagaggaggaatgcacaaccagcttgtgaacagagcttttgaaggactgtctcgtggtggtagaggcactggaagggggcgtggcaggggtggccgaggacgaagagggtggggtggctaccgctgagatgacctggaaactctgttcaaacctgacatgggatgagctttctgcttccacttgagagtaaatgcaaaggtcgatatttatttgtgtgcctcagcgcaacaagtttaaattggaaggcacacaacagcagaatgcgtacagaaagagtaaaaaagaatgcttgagaaatgtccgcaagatctgtgcatctttcctattcatttgccatcaagccgtgttctttgccaccctccgtcgcttcacctgagttggctgtttgatgaaatgttggcaagatctgtgcatcatctttcatattcacttaccatctcaccgtgttctttgaaccctaacagtcgtttcacctgtgttggctgttagaactcaacagtaagatatcgttcatttattttatttgattttaccagtgtttgaagaggcgaccgagcttttgtgttggacttcgtttaagttcgttttatgatccgttttaccggcacagaggtatagtgatgtttaaattttatagtaaggattgatctattttaggatccgatttacctgctgtacaacccacataaaaatgataaatgacctgtattttaaggggtattaagtgtttaagggtatcaaaggggtaagtgtt

SEQ ID NO: 49770 - DNA, 1331 bp, Zea Mays
cacttcttaatttaaatatgtatctgaggcctgagcacaattactcaacaaatatatgcctgggaagaaggtggacgatatcaaccataattatgttgaatgcttgctgtacacttatcatcatttggctcataagactccaaacacaacgaacagtctatgtggttacaagattgttactgggcaaccatcggatagacttggagaggacttcacagagcattacaaagattttacagagaggttaactggaacagaagagacggtaagagcagcctcaaagcgactaactcagggaatggcagatttcagcaaggcaatatcttcagcaaaaaccgaagaggaaaaaactaaaattaaaggcgatcaacaaacttcaacaaggacaatgaggtcatataacaatatattggcaatggcacagccattgcattcaaaatcccctttatttatcggtgataagaaaatcgctctatcatggatggagcatcccaagaaaccaacagctacgacagcaggggggaagaggtcacaacctgctactacaaatgggaatggccctgcaaacaagaaagggagaggaggaatgcacaaccagcttgtgaacagagcttttgaaggactgtctcgtggtggtagaggcactggaagggggcgtggcaggggtggccgaggacgaagagggtggggtggctaccgctgagatgacctggaaactctgttcaaacctgacatgggatgagctttctgcttccacttgagagtaaatgcaaaggtcgatatttatttgtgtgcctcagcgcaacaagtttaaattggaaggcacacaacagcagaatgcgtacagaaagagtaaaaaagaatgcttgagaaatgtccgcaagatctgtgcatctttcctattcatttgccatcaagccgtgttctttgccaccctccgtcgcttcacctgagttggctgtttgatgaaatgttggcaagatctgtgcatcatctttcatattcacttaccatctcaccgtgttctttgaaccctaacagtcgtttcacctgtgttggctgttagaactcaacagtaagatatcgttcatttattttatttgattttaccagtgtttgaagaggcgaccgagcttttgtgttggacttcgtttaagttcgttttatgatccgttttaccggcacagaggtatagtgatgtttaaattttatagtaaggattgatctattttaggatccgatttacctgctgtacaacccacataaaaatgataaatgacctgtattttaaggggtattaagtgtttaagggtatcaaaggggtaagtgtt

SEQ ID NO: 49771 - DNA, 527 bp, Zea Mays
cttaatttaaatatgtatctgaggcctgagcacaattactcaacaaatatatgcctgggaagaaggtggacgatatcaaccataattatgttgaatgcttgctgtacacttatcatcatttggctcataagactccaaacacaacgaacagtctatgtggttacaagattgttactgggcaaccatcggatagacttggagaggacttcacagagcattacaaagattttacagagaggttaactggaacagaagagacggtaagagcagcctcaaagcgactaactcagggaatggcagatttcagcaaggcaatatcttcagcaaaaaccgaagaggaaaaaactaaaattaaaggcgatcaacaaacttcaacaaggacaatgaggtcatataacaatatattggcaatggcacagccattgcattcaaaatcccctttatttatcggtgataagaaaatcgctctatcatggatggagcatcccaagaaaccaacagctacgacagcaggtttgcaaatcatt

SEQ ID NO: 49772 - DNA, 1119 bp, Zea Mays
catggatatgcaactgtacaacaaaaagacagttaactggaacagaagagacggtaagagcagcctcaaagcgactaactcagggaatggcagatttcagcaaggcaatatcttcagcaaaaaccgaagaggaaaaaactaaaattaaaggcgatcaacaaacttcaacaaggacaatgaggtcatataacaatatattggcaatggcacagccattgcattcaaaatcccctttatttatcggtgataagaaaatcgctctatcatggatggagcatcccaagaaaccaacagctacgacagcaggggggaagaggtcacaacctgctactacaaatgggaatggccctgcaaacaagaaagggagaggaggaatgcacaaccagcttgtgaacagagcttttgaaggactgtctcgtggtggtagaggcactggaagggggcgtggcaggggtggccgaggacgaagagggtggggtggctaccgctgagatgacctggaaactctgttcaaacctgacatgggatgagctttctgcttccacttgagagtaaatgcaaaggtcgatatttatttgtgtgcctcagcgcaacaagtttaaattggaaggcacacaacagcagaatgcgtacagaaagagtaaaaaagaatgcttgagaaatgtccgcaagatctgtgcatctttcctattcatttgccatcaagccgtgttctttgccaccctccgtcgcttcacctgagttggctgtttgatgaaatgttggcaagatctgtgcatcatctttcatattcacttaccatctcaccgtgttctttgaaccctaacagtcgtttcacctgtgttggctgttagaactcaacagtaagatatcgttcatttattttatttgattttaccagtgtttgaagaggcgaccgagcttttgtgttggacttcgtttaagttcgttttatgatccgttttaccggcacagaggtatagtgatgtttaaattttatagtaaggattgatctattttaggatccgatttacctgctgtacaacccacataaaaatgataaatgacctgtattttaaggggtattaagtgtttaagggtatcaaaggggtaagtgtt

SEQ ID NO: 49773 - DNA, 1198 bp, Zea Mays
ccttatcccaaaccccataccactcagctccactgccaccatggtgccgctccactgctcagctagcgtccacctccacttcctatcgccatctctccccctttcgtcatccttctctctcctctgccatcgcgtccgccgccccaccgccatccgcgccgaagctgaagtgcggcctccgctacctgtctccgcggcggagtcagagccccctgacgccggcgctgtggaagccgaaggtcagggacccgtggagctccgcgctccgacgctcttctcgactgatgacaatcccaccccgctccagactgccaccagtctcctcctcaccggcgccatctcggtcttcctcttccgcgccctccgccgccgcgcccgccgcgccaaggagctcagagtgcggtcgagcgggttgaagaagcccaacaatctcaccgaggaggccctggagaggctgagattgatgagcgcctcaccgatcgagaccgagaaggcaacttcgcccatccaggctctgctcggcgggattgcggcgggggtcatcgcactcatcctctacaagttcagcaccacagtcgaggctgcgctcaaccgtcagaccatctccgacagcttctcggttcgtcagattacaatcacaataagaacaattgtcactgggctgtgctacctagcaacttctgtctttggaatcaatgcgggaagattagtgaacaatctaatacactggcatcatctgatagctccacaagtagcagggaatcagacagtagtgacatgcaagtcactgacaaaagtaaaaactcagcagagaagcagagctagacatgtaatccagacagccaaaatctgagatctgagggtacatatctgatgaaatcattttaagcattccttctcattattagctgaaaaatctgatgagagcgatctcaactcgagagtttcaattatgctagtattccgtccaaaatccgtccaaaaaaaagaagagaactcaattctagatttgagctaagttaaattgtcttaagtttgattatgtttttttaaaaatatcattatttatatcattaaatatgtttgttataaaatatattctatgattagtggaagtacctctagttgagttggtatttctcaggactgtcgttggatttatgtgggaatgtcaaaggcttggccggtatttctcagg

SEQ ID NO: 49774 - DNA, 723 bp, Zea Mays
aagctttgaagattgactttattgagcacatggaaccaaaactccctggcgaatacacagttaaccagcaggttcgtcagattacaatcacaataagaacaattgtcactgggctgtgctacctagcaacttctgtctttggaatcaatgcggtgggattagttttgtattccctccaactcactttacaatcaatcatggacgatgactccagctcttccacagggaagattagtgaacaatctaatacactggcatcatctgatagctccacaagtagcagggaatcagacagtagtgacatgcaagtcactgacaaaagtaaaaactcagcagagaagcagagctagacatgtaatccagacagccaaaatctgagatctgagggtacatatctgatgaaatcattttaagcattccttctcattattagctgaaaaatctgatgagagcgatctcaactcgagagtttcaattatgctagtattccgtccaaaatccgtccaaaaaaaagaagagaactcaattctagatttgagctaagttaaattgtcttaagtttgattatgtttttttaaaaatatcattatttatatcattaaatatgtttgttataaaatatattctatgattagtggaagtacctctagttgagttggtatttctcaggactgtcgttggatttatgtgggaatgtcaaaggcttggccggtatttctcagg

SEQ ID NO: 49775 - DNA, 3634 bp, Zea Mays
agtgaggccgcgatgatgcagatgctaggcctccgcggctccgcgtccaaggaccgtggccgcgggggcgacgcgtccccgtcctctgctgtggcaggggccacgggaaccccgcgctcgccgtggactccggcgtcggcatcgtcgccgcgctcgccgttcgcggcggaggcgggcggcgagggagggggcggccggccgctgcggctggtatactgtgacgagcgcggtcggtttcggatggacccagaggccgtggccgcgctgcagctcgtcaagggacctgtcggggtcgtctctgtctgcggccgcgcgcgccaggggaagagcttcatccttaaccaggtagaagtagcgggtttcaagtggcaagtactcatcgtccctgcaccaagggcctttggatgtggagtgccccaataaagagaactgcctttgatggaactgaatatagtcttttgctacttgacagcgagggcattgatgcctatgatcagacgggcacttacagcattcagatattctcattggctgtcctactatcgagcatgttcatatataatcagatgggtggtatagatgaggcagcccttgatcgcctttcacttgttactgaaatgaccaagcatatccgtgtgagggcaaatggtgggaggtctactgcatctgaacttgcgcagttttcacctattttcatctggctactgagggatttctatctagatttagtggagaatggtagaaagataactccacgagattacctggaaatcgcactgaggcctcttgaaggcagaggaaaggacatatcttcaaagaatgagatccgtgagtccatccgtgcccttttccctgatcgagaatgtttcacactggtgcgcccattgaacaatgaaaatgaacttcaacgtcttgatcaaatccctctcgagaaattgcgccctgaatttcaagctggactggacgaattaacaaggtttatttttgagaggacaaggcctaagcaagttgctggtacaatcatgacaggaccagtactagctggtattacacagtccttcctggatgcaataaacaatggagctgtgcctaccatttcatcttcttggcagagcgtagaagaagcagaatgccgtagagcatatgattctgctgctgaggtttacatgtcatctttcagccacatcaaattagctgaagaagatgctttaagggatgaatatgaagctgctttaaggaaggcacttgatgcatacaatactactgctgttggaactggcacttcacgtgcccattatgagaaagttcttaacaatttctgcagaaaggcgtttcaggattataaaaagaatgctttcttagaggctgacaagcagtgctcaaatgcgaagcacaacatggagaagaagatccgagcggcatgcactgctcctggtgtcaaagtttctgctgtgattcaggtcctggaaactgcacttgctgaatatgaaacatcttgtactggcccagccaaatggagaatgcttgctgcctttttaagacagtgtttggaaggacctatattggacctctgcttgaagttaataaatgaagtggaatcagagaagacttccttcactttaagatgccggtcaaatgaagaccaactagaacttctaaaaaagcaacttgaggccaatgaatcacacaagtctgaatatctaaaacgctacaaagctgctataaatgagaaacagaaagcctctgttgatcttagtagtaatcttgcaaacctgaggaccaagtgtagcacattagaagaacgatgtgtaagcatatctaaagaacttgatcatgtccgacatgaatgcactgattggagggtgaagtatgagcaatctgtttctcagcacaaggctgaacaagatagatttgtcgctcagttggcatctcttgagtctaggcatagctctgcagaaggaaagttgggagcagctcgggaacatgcagcatctgctcaagatgaggctgcagaatggaagaagaaatatgaaatggctgccgtgcaggctaaaactgcattggagagactagcatcagtgcaagaacaaattaacaaaattgcacaagaaagggaaagttctataagggcagaatttgcctcacatttggagggaaaggaagaggaaataaggaaattagttgctaagattagagaagcggagagtgaagaaagtgtattgactgaacgcttgctggttgtggaatcaaaaacacaaggccacaacaaggaaactacaggcttgagggatgaaatcaaagaactaacaagcaagttagagtatctaagagatagagcagtatcatatgaaaagcaagctagaatgctcgagcaagaaaaaaaccatcttcaagagaagttcttatctgaatgtaagaaatatgatgaggcagaacaaagatacaagtctgcagaaagggatgcgaagaaagctgttgagttggctgatgcagctcgaacagaggctattgcataccagaaagagaaggacaaggcacagcagttatctattgaaaaggtagcagttatagagagggttcaaagacaggtagacagactagagcaggaaaaggttaatctattgggcgaagttcagaggatgcataattctgaatctgatgcctggtccaaggttactttgcttgagagtagggttgctgagagggagaaagaaatggatgatttactgagccgtagcaacgaacaaaggtctagcactgttcgtgtccttgagagtctgttggcaacggaacgtgcagctagagctgaagccaataagcgtgcagaggccttatctctacagctacaatctgcccaaggtaaacttgatatactccatcaggagctgacatcgattcgccttgttgagactgcacttgacagcaagctcaggaccactacctatggcaaaaggttgagagataatgaagtacgactgtattctatccaagatatggacattgatcctccagagaggagcagaaaaagaaccaaaagcaacactagccccttgaagcctgtccaaactgaggatggtggttctgttcacatgagagaagacagcgttacagttagcacggatgtaaaagatgacaatccagatggttacaaaaagttcaccatagctaaactgaaagaagagctaactaagcatggatttggcacgcagttgttagagctcaagaatccaaacaagaaagatatactcgcactttataagaagcatgttttgtgcgagtaaataatggccacgtgaagttccagtcttcaacacataatctatccaaactagggaaacaatagagtagtctgtcagtatttttaacaagctgatgcctcattgttctccaggcattcgtttctgctgattggtttgtattttggtgttaacatcgaattagttccggtttgtgtctaggctttgtatttcttagcttgctggttggctgggtgaagttcttaggacttctgagtgctaaatgacctcgaccaacgctagtcgtgggcaagtttgtggtacgtttgtatatggtatattgctgtgtaaagagtgctttatccaattcaaatatgatatactcttcaagtctgcat

SEQ ID NO: 49776 - DNA, 3618 bp, Zea Mays
atgatgcagatgctaggcctccgcggctccgcgtccaaggaccgtggccgcgggggcgacgcgtccccgtcctctgctgtggcaggggccacgggaaccccgcgctcgccgtggactccggcgtcggcatcgtcgccgcgctcgccgttcgcggcggaggcgggcggcgagggagggggcggccggccgctgcggctggtatactgtgacgagcgcggtcggtttcggatggacccagaggccgtggccgcgctgcagctcgtcaagggacctgtcggggtcgtctctgtctgcggccgcgcgcgccaggggaagagcttcatccttaaccagcttctaggtagaagtagcgggtttcaagtggcaagtactcatcgtccctgcaccaagggcctttggatgtggagtgccccaataaagagaactgcctttgatggaactgaatatagtcttttgctacttgacagcgagggcattgatgcctatgatcagacgggcacttacagcattcagatattctcattggctgtcctactatcgagcatgttcatatataatcagatgggtggtatagatgaggcagcccttgatcgcctttcacttgttactgaaatgaccaagcatatccgtgtgagggcaaatggtgggaggtctactgcatctgaacttgcgcagttttcacctattttcatctggctactgagggatttctatctagatttagtggagaatggtagaaagataactccacgagattacctggaaatcgcactgaggcctcttgaaggcagaggaaaggacatatcttcaaagaatgagatccgtgagtccatccgtgcccttttccctgatcgagaatgtttcacactggtgcgcccattgaacaatgaaaatgaacttcaacgtcttgatcaaatccctctcgagaaattgcgccctgaatttcaagctggactggacgaattaacaaggtttatttttgagaggacaaggcctaagcaagttgctggtacaatcatgacaggaccagtactagctggtattacacagtccttcctggatgcaataaacaatggagctgtgcctaccatttcatcttcttggcagagcgtagaagaagcagaatgccgtagagcatatgattctgctgctgaggtttacatgtcatctttcagccacatcaaattagctgaagaaggatgaatatgaagctgctttaaggaaggcacttgatgcatacaatactactgctgttggaactggcacttcacgtgcccattatgagaaagttcttaacaatttctgcagaaaggcgtttcaggattataaaaagaatgctttcttagaggctgacaagcagtgctcaaatgcgaagcacaacatggagaagaagatccgagcggcatgcactgctcctggtgtcaaagtttctgctgtgattcaggtcctggaaactgcacttgctgaatatgaaacatcttgtactggcccagccaaatggagaatgcttgctgcctttttaagacagtgtttggaaggacctatattggacctctgcttgaagttaataaatgaagtggaatcagagaagacttccttcactttaagatgccggtcaaatgaagaccaactagaacttctaaaaaagcaacttgaggccaatgaatcacacaagtctgaatatctaaaacgctacaaagctgctataaatgagaaacagaaagcctctgttgatcttagtagtaatcttgcaaacctgaggaccaagtgtagcacattagaagaacgatgtgtaagcatatctaaagaacttgatcatgtccgacatgaatgcactgattggagggtgaagtatgagcaatctgtttctcagcacaaggctgaacaagatagatttgtcgctcagttggcatctcttgagtctaggcatagctctgcagaaggaaagttgggagcagctcgggaacatgcagcatctgctcaagatgaggctgcagaatggaagaagaaatatgaaatggctgccgtgcaggctaaaactgcattggagagactagcatcagtgcaagaacaaattaacaaaattgcacaagaaagggaaagttctataagggcagaatttgcctcacatttggagggaaaggaagaggaaataaggaaattagttgctaagattagagaagcggagagtgaagaaagtgtattgactgaacgcttgctggttgtggaatcaaaaacacaaggccacaacaaggaaactacaggcttgagggatgaaatcaaagaactaacaagcaagttagagtatctaagagatagagcagtatcatatgaaaagcaagctagaatgctcgagcaagaaaaaaaccatcttcaagagaagttcttatctgaatgtaagaaatatgatgaggcagaacaaagatacaagtctgcagaaagggatgcgaagaaagctgttgagttggctgatgcagctcgaacagaggctattgcataccagaaagagaaggacaaggcacagcagttatctattgaaaaggtagcagttatagagagggttcaaagacaggtagacagactagagcaggaaaaggttaatctattgggcgaagttcagaggatgcataattctgaatctgatgcctggtccaaggttactttgcttgagagtagggttgctgagagggagaaagaaatggatgatttactgagccgtagcaacgaacaaaggtctagcactgttcgtgtccttgagagtctgttggcaacggaacgtgcagctagagctgaagccaataagcgtgcagaggccttatctctacagctacaatctgcccaaggtaaacttgatatactccatcaggagctgacatcgattcgccttgttgagactgcacttgacagcaagctcaggaccactacctatggcaaaaggttgagagataatgaagtacgactgtattctatccaagatatggacattgatcctccagagaggagcagaaaaagaaccaaaagcaacactagccccttgaagcctgtccaaactgaggatggtggttctgttcacatgagagaagacagcgttacagttagcacggatgtaaaagatgacaatccagatggttacaaaaagttcaccatagctaaactgaaagaagagctaactaagcatggatttggcacgcagttgttagagctcaagaatccaaacaagaaagatatactcgcactttataagaagcatgttttgtgcgagtaaataatggccacgtgaagttccagtcttcaacacataatctatccaaactagggaaacaatagagtagtctgtcagtatttttaacaagctgatgcctcattgttctccaggcattcgtttctgctgattggtttgtattttggtgttaacatcgaattagttccggtttgtgtctaggctttgtatttcttagcttgctggttggctgggtgaagttcttaggacttctgagtgctaaatgacctcgaccaacgctagtcgtgggcaagtttgtggtacgtttgtatatggtatattgctgtgtaaagagtgctttatccaattcaaatatgatatactcttcaagtctgcat

SEQ ID NO: 49777 - DNA, 2724 bp, Zea Mays
caaagcaatttcgaacaagcttggacatggtagaggtaaaaccaatgtctccaacaaaacatgactaccagcaaaagacaggtgtatataaaacagagagtttgagtaaaaataatagttcatcgaataagacaagtaccagtatccttaagaatggtgagaagatttggtcgtgcatcgttcggaagtataatgaactgagagcgtagaagaagcagaatgccgtagagcatatgattctgctgctgaggtttacatgtcatctttcagccacatcaaattagctgaagaagatgctttaagggatgaatatgaagctgctttaaggaaggcacttgatgcatacaatactactgctgttggaactggcacttcacgtgcccattatgagaaagttcttaacaatttctgcagaaaggcgtttcaggattataaaaagaatgctttcttagaggctgacaagcagtgctcaaatgcgaagcacaacatggagaagaagatccgagcggcatgcactgctcctggtgtcaaagtttctgctgtgattcaggtcctggaaactgcacttgctgaatatgaaacatcttgtactggcccagccaaatggagaatgcttgctgcctttttaagacagtgtttggaaggacctatattggacctctgcttgaagttaataaatgaagtggaatcagagaagacttccttcactttaagatgccggtcaaatgaagaccaactagaacttctaaaaaagcaacttgaggccaatgaatcacacaagtctgaatatctaaaacgctacaaagctgctataaatgagaaacagaaagcctctgttgatcttagtagtaatcttgcaaacctgaggaccaagtgtagcacattagaagaacgatgtgtaagcatatctaaagaacttgatcatgtccgacatgaatgcactgattggagggtgaagtatgagcaatctgtttctcagcacaaggctgaacaagatagatttgtcgctcagttggcatctcttgagtctaggcatagctctgcagaaggaaagttgggagcagctcgggaacatgcagcatctgctcaagatgaggctgcagaatggaagaagaaatatgaaatggctgccgtgcaggctaaaactgcattggagagactagcatcagtgcaagaacaaattaacaaaattgcacaagaaagggaaagttctataagggcagaatttgcctcacatttggagggaaaggaagaggaaataaggaaattagttgctaagattagagaagcggagagtgaagaaagtgtattgactgaacgcttgctggttgtggaatcaaaaacacaaggccacaacaaggaaactacaggcttgagggatgaaatcaaagaactaacaagcaagttagagtatctaagagatagagcagtatcatatgaaaagcaagctagaatgctcgagcaagaaaaaaaccatcttcaagagaagttcttatctgaatgtaagaaatatgatgaggcagaacaaagatacaagtctgcagaaagggatgcgaagaaagctgttgagttggctgatgcagctcgaacagaggctattgcataccagaaagagaaggacaaggcacagcagttatctattgaaaaggtagcagttatagagagggttcaaagacaggtagacagactagagcaggaaaaggttaatctattgggcgaagttcagaggatgcataattctgaatctgatgcctggtccaaggttactttgcttgagagtagggttgctgagagggagaaagaaatggatgatttactgagccgtagcaacgaacaaaggtctagcactgttcgtgtccttgagagtctgttggcaacggaacgtgcagctagagctgaagccaataagcgtgcagaggccttatctctacagctacaatctgcccaaggtaaacttgatatactccatcaggagctgacatcgattcgccttgttgagactgcacttgacagcaagctcaggaccactacctatggcaaaaggttgagagataatgaagtacgactgtattctatccaagatatggacattgatcctccagagaggagcagaaaaagaaccaaaagcaacactagccccttgaagcctgtccaaactgaggatggtggttctgttcacatgagagaagacagcgttacagttagcacggatgtaaaagatgacaatccagatggttacaaaaagttcaccatagctaaactgaaagaagagctaactaagcatggatttggcacgcagttgttagagctcaagaatccaaacaagaaagatatactcgcactttataagaagcatgttttgtgcgagtaaataatggccacgtgaagttccagtcttcaacacataatctatccaaactagggaaacaatagagtagtctgtcagtatttttaacaagctgatgcctcattgttctccaggcattcgtttctgctgattggtttgtattttggtgttaacatcgaattagttccggtttgtgtctaggctttgtatttcttagcttgctggttggctgggtgaagttcttaggacttctgagtgctaaatgacctcgaccaacgctagtcgtgggcaagtttgtggtacgtttgtatatggtatattgctgtgtaaagagtgctttatccaattcaaatatgatatactcttcaagtctgcat

SEQ ID NO: 49778 - DNA, 2133 bp, Zea Mays
ctccaagccataaaaatttcatgttcattcctgctgatctttctgtttggaaggacctatattggacctctgcttgaagttaataaatgaagtggaatcagagaagacttccttcactttaagatgccggtcaaatgaagaccaactagaacttctaaaaaagcaacttgaggccaatgaatcacacaagtctgaatatctaaaacgctacaaagctgctataaatgagaaacagaaagcctctgttgatcttagtagtaatcttgcaaacctgaggaccaagtgtagcacattagaagaacgatgtgtaagcatatctaaagaacttgatcatgtccgacatgaatgcactgattggagggtgaagtatgagcaatctgtttctcagcacaaggctgaacaagatagatttgtcgctcagttggcatctcttgagtctaggcatagctctgcagaaggaaagttgggagcagctcgggaacatgcagcatctgctcaagatgaggctgcagaatggaagaagaaatatgaaatggctgccgtgcaggctaaaactgcattggagagactagcatcagtgcaagaacaaattaacaaaattgcacaagaaagggaaagttctataagggcagaatttgcctcacatttggagggaaaggaagaggaaataaggaaattagttgctaagattagagaagcggagagtgaagaaagtgtattgactgaacgcttgctggttgtggaatcaaaaacacaaggccacaacaaggaaactacaggcttgagggatgaaatcaaagaactaacaagcaagttagagtatctaagagatagagcagtatcatatgaaaagcaagctagaatgctcgagcaagaaaaaaaccatcttcaagagaagttcttatctgaatgtaagaaatatgatgaggcagaacaaagatacaagtctgcagaaagggatgcgaagaaagctgttgagttggctgatgcagctcgaacagaggctattgcataccagaaagagaaggacaaggcacagcagttatctattgaaaaggtagcagttatagagagggttcaaagacaggtagacagactagagcaggaaaaggttaatctattgggcgaagttcagaggatgcataattctgaatctgatgcctggtccaaggttactttgcttgagagtagggttgctgagagggagaaagaaatggatgatttactgagccgtagcaacgaacaaaggtctagcactgttcgtgtccttgagagtctgttggcaacggaacgtgcagctagagctgaagccaataagcgtgcagaggccttatctctacagctacaatctgcccaaggtaaacttgatatactccatcaggagctgacatcgattcgccttgttgagactgcacttgacagcaagctcaggaccactacctatggcaaaaggttgagagataatgaagtacgactgtattctatccaagatatggacattgatcctccagagaggagcagaaaaagaaccaaaagcaacactagccccttgaagcctgtccaaactgaggatggtggttctgttcacatgagagaagacagcgttacagttagcacggatgtaaaagatgacaatccagatggttacaaaaagttcaccatagctaaactgaaagaagagctaactaagcatggatttggcacgcagttgttagagctcaagaatccaaacaagaaagatatactcgcactttataagaagcatgttttgtgcgagtaaataatggccacgtgaagttccagtcttcaacacataatctatccaaactagggaaacaatagagtagtctgtcagtatttttaacaagctgatgcctcattgttctccaggcattcgtttctgctgattggtttgtattttggtgttaacatcgaattagttccggtttgtgtctaggctttgtatttcttagcttgctggttggctgggtgaagttcttaggacttctgagtgctaaatgacctcgaccaacgctagtcgtgggcaagtttgtggtacgtttgtatatggtatattgctgtgtaaagagtgctttatccaattcaaatatgatatactcttcaagtctgcat

SEQ ID NO: 49779 - DNA, 2239 bp, Zea Mays
tttggcttgacagaaggtgagaatccaagtgtgacgtgcgagtgaatactgtggcagaacctcccaagttattgggcccacatgcacctgtccttgtctcaaagacctcagacggttatgcatgtgcaccagataacttaacaggatccatccaagtgcccaaaggaccccggataaaccacttacaaccaggaccgcaggattaagtaaacacaaatcacacacaccaacattttgcagcggaaatcttattaccaaattttacaagttacatcaagttttacaatgtacatgatcggagtgattacaaaagtgattcaaagaaataactttgaactgtcataaattattgtgtagttttgaaatatatgctagcttaagtgatcatcctcaataagaagtatagaagaagtacttagacttataagaatgtcgtgcccaccggcgcttaacaccaatcacaatcaatgtgactcgtaacctgcagcaacattgggaataaaaccccaagtacgcaagtactcagcaggactaacccgactaaagaatagactctcaagggtatgctggttttaaaagggattcaaggtaaggcttatcaagaatcaaagactctgttttgcagaaaagcttactatgagtggatccttaaaatccatttttacttgtcaagttaagtaaaatttacctacatctagaattctttctatcctacttcaaacacttggcctacactagccgtctttttatcaacccttcagttcactgaattgctacgtgtaagttagtgaccaagtcttcatgtccgggaagtaacggcgatctgaatcgattaatactcagttgaggatctccaatcacacgacatatgtagcacttaacccttgcatatgtcaacttgccaccggggttcttaagaccaaaccgggttcacgccaaccgagagcacagatacaccaccgtccagcctcttgcccggagggtacacgctactctcgccatctctccacttctattgcgtgttggcctttctagtattagtctgcccaaggcaaagcttacccatgacgaggcatgtgaccagttaaagggtcctcgatcatccagcctacatcgacaaggtccttaatcgactcagacggagacactataccgagactctcttctcgtgcaagtcacccgtctggtctcagctttatcattttaaacccaaagtttggtacctgtcagaggtacatcttttccgtgttgaacccatcatggccatgatggatccaccatcaagctttatttttgaaaacatcccatccactgtgaagcatcaccttttgttttaaaacaaaacatttgtctttctaaagcaggactaagcatcagaaaaatccttttcataaaagggtatcaaggaagggtaattaattttccaaggaaggaaatgcagcaacggtttagcacacaactcctatcacctaatgcatcatataaggtgataaagatttaaaacagcaaggaggtggcaaatgcaccggggcttgcctggataacactaggttagtgttgttagacgtcgatcacttgacaatcagccttgtcctggcacttgatcagatcatcccatcttcaggttcattcatcagtatcactttgcgaagaagccacgcttaacagcatcttggggtcgactcagctcgtctttcgcatcacatgatgaattatcatacctatatggtatgcataatgcacatgtatgaacataaaaacaacttgtacgttactaaataatgttacacggtagatgattaaatattgactagctagacattagaaccaatcacaagtaaacgctagctatcgtcataagactaactataataattacgcttcttatttaattggatctaatataaacattaagcactcgtaaaccatgcttaaacactaaatctccttaaccttaccacacttaaacttattaacctagggcatctacaacttagaagaaaacaaaacttgaagtgcctaaatacatttcctcactataaagttctcggatttgcatagaaacaaatttatctatgttactcacttctaaataccaggaggagcaagcaacatctatctatgatgtttaaccaaccattaaacctcgagtataatgacgactaaaacacagcgtcacgttcttttaattcatttaacaatttattacacgtataatatgatgacaattaaagcaaag

SEQ ID NO: 49780 - DNA, 1188 bp, Zea Mays
ccagccgttcctagcgtcatccacagcaggtcgttgctccgtctgctccctccgttccaactctccctctaacctccagctcgccagcaccctcagccgtcgcaggttccctcccatggcgcccagctgagcatcttcttccccacctcttgccgcccacgtgccattccctggaaggtgctcgcgcgtcctcatgtgcttgtcagggactccggcatctagattctgactccatgccggcgctgccctctcatgctcgccgagctgctctcaaatggctgctcacgagtttcccccagccccgtcagcttgccggtctccatctcagcgcgtgagctcctctacagggctcaacagccgccgttctgcgccactagaccacgcccaacgcatacgcagtccgtcgctgggactccatcagcgctgatgtcgttcttcttcgtcaacatccaccagccagcgcccatcctcgccaccaaccacactcgcccggatccgcgactccctggtaccagccgaccgtccctgtgccccacgcccagatcgacctggccccatgctcgactgctcgttgtccaatccatccaggcatcaacgtcgacatatgctcctctgctgctcacctggactgaagctgccaagctgtcgaactccatcgcgcccctccgttcaggccgcgccctgctcggcttctctggtgcacgcgcagttcatcggccaagtcccctcaccggcatcctccacagctcgccctaccacgccgatgcccttccctatttagccgttcgtcgaggtcgccaatggccttcatcaatgccgcacctgctccgatctcatgtagctcggtccaactgtgcatcgctaccactcttctgtccatggaaatctgctccaccgggccgcacctcacctgcgatgtcgtgcacaccaagccgaagtgtcgtcgctgctcatacttcgtttgtcggtcaccatgggcatgccctacagttgcgtttcttccccagcgttggccgccattcacagcactcggcctcaggtcttcgagctcccaagccgacctccttcattagtctcaagctccgccccttcgtgctcgacgtaaagcctgaaccgaatgtcatcgccgtttcgcaattgtcaagtcaaaatttagtcatggcgcgtcgtgttagtgttaaatgtttg

SEQ ID NO: 49781 - DNA, 2645 bp, Zea Mays
tccacagcaggtcgttgctccgtctgctccctccgttccaactctccctctaacctccagctcgccagcaccctcagccgtcgcaggttccctcccatggcgcccagctgagcatcttcttccccacctcttgccgcccacgtgccattccctggaaggtgctcgcgcgtcctcatgtgcttgtcagggactccggcatctagattctgactccatgccggcgctgccctctcatgctcgccgagctgctctcaaatggctgctcacgagtttcccccagccccgtcagcttgccggtctccatctcagcgcgtgagctcctctacagggctcaacagccgccgttctgcgccactagaccacgcccaacgcatacgcagtccgtcgctgggactccatcagcgctgatgtcgttcttcttcgtcaacatccaccagccagcgcccatcctcgccaccaaccacactcgcccggatccgcgactccctggtaccagccgaccgtccctgtgccccacgcccagatcgacctggccccatgctcgactgctcgttgtccaatccatccaggcatcaacgtcgacatatgctcctctgctgctcacctggactgaagctgccaagctgtcgaactccatcgcgcccctccgttcaggccgcgccctgctcggcttctctggtgcacgcgcagttcatcggccaagtcccctcaccggcatcctccacagctcgccctaccacgccgatgcccttccctatttagccgttcgtcgaggtcgccaatggccttcatcaatgccgcacctgctccgatctcatgtagctcggtccaactgtgcatcgctaccactcttctgtccatggaaatctgctccaccgggccgcacctcacctgcgatgtcgtgcacaccaagccgaagtgtcgtcgctgctcatacttcgtttgtcggtcaccatgggcatgccctacagttgcgtttcttccccagcgttggccgccattcacagcactcggcctcaggtcttcgagctcccaagccgacctccttcattagtctcaagctccgccccttcgtgctcgacgtaaagcctgaaccgaatgtcatcgccgtttcgcaattgtcaagtcaaaatttagtcatgatttgctagttgatcacgtgatgcgtggcacaagagccgaggcgagcccaagatgatgtaacgggtgggctactccacaaggtaatgttggtggatcaacctaaagatggataaatcaagcaagtgctcgcctaagagatgtttggatcaagcgctaggatgtgagatgctcgccaagtggacgtcatctaacaaacactaacctagtgttattccaggcaagccccagtgtattatcccttttccttgttgttttaaaatctttatcaccttatatgatgcattaggtgataggagttgtgtgctaaacaatttatgcattcccttccttggaaaccgattaccattccttgttacctgatttacttaaaagttttctgatgcttagccttgctttagaaaacaaaatgttttgttttaaacaaaaggtgatgcttcatattggatgggaatttttacaaagaaaagacttgtgatggtgaatccatcatgcccatgatgggtttaacatctgaaaagatgtacctctgtcaggtaccaaactttgggttttaaataataaagacgagactgggcgcgtgacttgtatgagaaggaagtctcggtgtagtgtctctgtctgagtcgcttaaggaccgagccgatgtaggcctggtgactgaggaccttttaactggccatatgcctcgtcatgggtaagctttgcctcgatcggaccattaccagaaaggccaccacgcaatgagagtggagagatggcgagagtatcgtgcaccctccgtggcaagaggttggacggtggagtatttgtgcactcggttggcgtgaacccattctagtcttgagaaaaccggtggcgagttgacatatgcaagggttaagtgctacatatgtcgtgtggttggagatccccagctaggtattaatcgattcggatcaccgttacttctcgaacatgaagacttggtcactaacttacacgtagcaatccagcaaactgaagggatgataaaagatggctagtataggccaagtgcttgatctaggataaaagaaatctagatacaggtaactacttgacctgataagtaaaatgaattcttaaggatccactcatagtaagcttttctgcaaaaagagtctttgaatcttgataagctttaccttgatttccaaaagctagcatatccttgagagtatttttccttagatgggtgagacttgcgaaagtacactacgtacttagggttttcgaacccatgttattgtaggcactagatttgtgctgctgtggatggtgctaagcgccggtgggcatgaccttcttataggttaaagtagctcttctatacttcttattgaggattgtcattgagctagcatataattcaaacttataaataatttataacatttcaaagtatatttttttgaatcacttttgtaatcactttgataaatataatgtaaatttgttgtaacttgtaactttttgtaataaag

SEQ ID NO: 49782 - DNA, 2016 bp, Zea Mays
ctcttccttccttctccagactcgttcccagagacatgtcaacaatctcacctcggttgctgccctgccatgctgctctttgtccttcccctgctcctgctcgccttgcccctctggctcttgcattcaatggagctgggctttggatcatgagcggagcacatgggaggaaactagcgcagaccgagcttcttgatctggttcggaccgacgcctcgcctaacggtagcggagccggagctggtgcgcgagatcttcctcacgcgagcagaggcgttcgaccgctacgaggcgcatcccgtcgtgcgccagcttgagggcgacggcctcgtcagcctccacggagacaagtgggcgctccaccgccgcgtgctcaccgacgccttctacccggacaacctcaaccggctggtgccccacgtcggcaggtcggtggcggcgctggcggcgaagtggaacgccatggcggccgccgctgggaacggcgaggtggaggtggacgtagcggagtggttccaggctgtgacggaggaggccatcacgcgcgtcaccttcggccgcagctacgacgacggccgcgtcgtgttcgccatgcagggccgcctgatggcctacgcctccgaggccttccgcaaggtcctcgtccccggctaccggtgcgtactacctgatggcggcgcatctcgtctccgtctcggattttcattcaagatacgacgcgttgtttgcaggttcttgcccaccaagaagaactggcagtcgtggaagctgggcagggagatacggcggagcctgacccggctcatcgcccggcgcagcggcatggccgaggaggaggaggaggttcaggccggccactccggaggcttccgcgaccttctcggtgccatgatcaatgccggtgagaggaagacgccggcggcgatcccggtggcggacatgctggaggagtgcaagactttcttcttcgccggcaagcagacgacgacgaaccttctggtctgggccaccgtgctcctggccatgcacccggagtggcaggagcgcgcccgcagcgaggtgctcgacatctgcggccccgacgagctcccgtccaaggagcacctcccgagactcaagactctgggcatgatcataaacgagaccctccggctgtacccgccggcggtggccaccatccgccgcgccaagacggacgtgcagctctcggacgggtgcatgatcccccgcgacacggagctgctcatcccgatcatggccatccaccacgacgccaggttctggggccccgacgccgcgcagttcaaccccgcacggttcgccggcggcacggccagggcggcgaagcacccgctggcgttcatcccgttcgggctgggctcccggatgtgcatcggccagaacctggcacggctggaggccaagctcaccatggcgatcctgctgcagcggttcgagatgaaggcgtccccgaactacatccacgcgccgacggtcctgatgctcctctacccgcagtacggagcgccggtgatcttccggccacgttcggcgcatccggcagcctcatagcgcagatgcttcgcctgtcccccacattcttttgttgattgaaactgatgggaacgccgcaggtctgcctggtgctcgaaagccataggacgtgtcccaaatactccttccgcgaccccctgtgtatatgccaagtgatactagaagccaagaagcactaactttctgtcctagcctgcgcctcggggcctacccaggttgcccgccggaaatgccctcgttaatagaccagatcaggcccagccttttttgttccctgccccatggcgtttgtgtggtatgtgtatgtatttgtaatctgtatagaggtttgctattccatcttctacgttcctagtagagacgaaaatgcaatgggaaaaaaacagagattgagaacaatagcatttgtttaacttgtactccctctgtttttttatttgtcacgctttagtttaaaaatat

SEQ ID NO: 49783 - DNA, 3181 bp, Zea Mays
cagaactgtacttggcccgtctcagggctcgcagaacagggagcgtagggtaatactttgcgtggcggccgctgcgctcctcccctccaccctcctatccccccacctcactccgcttgtgcggccgcgtggtggtgcctcccgcggcgctgcggctgctctccgatcccgagcgagcacatatcctcgccaccttatcacgaggccctcgcaccgcgccgacgcgatcagcgcgtcgagccaccggagtctccccttgcgggattgcatctcaagaatatggggagaaagaagaaccccattgtctttctggatgtatccgtaggtgacgagccagatgaaagaatgatctttgagttgtttgctgatgttgcaccccttacaactgagaacttcagagctttatgcacaggtgagctgggaattggacagaagactaagaagcccttatgttacaagggaacattgttccaccgcgtgatcaaggggtttatggcacaagatgcaagacagatgatatcgactgcttttcttatcatatagtatttaagggaggtgacattgcaaaagaaaatgggtctggtggtgaaaacatatatagtggaaaatttacagatgaaacttgtgttctacttcatgatgatcgtggcctcttgacaacagcagatactggattcaaacctagtggctcccagttctgcattactttcaagcctaattctcatcttgacaggaagcacacagtttttggcaagcttgttgttggaagtgatgttctgaagaggatcgagcaagtagatgtgcaatcccctgattcaactcctgttattccagttactatagtaaattgtggagagctcattgaacgcaaagatattggctctatgtcaatagaaattgataaaaaaagggctgccaaatcaaagttgacaagggatataacttctgacgaggaaagtaatgaaggacaacacaagagacgtcgtaacaaatcttcaaaaaggagaaggaagaagaggagatattcttattcggaatcagatagctcttctgagtcagagactgaatcatctgattatgagagcgattctgatacttactctagtgactcatctgatgtcagcagctcaagtgatgacaggcgaaggcgcagaaagagacactcgaagaaaaataaacgcaagcattcaagaagaaagcgtgaccataggcgcgaaagaaggcgtaggaagcgtggtaggaaatcaaaacagaagtcaaaaaggatagtaaagggtgatagtgaagctgaaagtacgggcgatagcagttctgaagatgctagaagcaagagacaccgccgtgggcggaagttcaaggcatcatctcaagtttctgaggaaaatcttgctggagtggctgctttgaaggatgccacctcacctcaacaaaagagtggaatacagaggagtccagcacaagatgtctcctccctgcaaaatggggaagtccatacaaatggtgttaatgactcaaaaattgaaagaaatgccgctgtcatgcctgttttaactggcaatcgaagcaaatctaggagccagagcatgagtgttaatcactcaatgagcaagagtatgagtatcagtccaagaagaagcccaatgaaaaggtcaagtaccagcccgaagaggtcacttagcaggagccctgttgacaataatcacagtagaagccctatccgtactcccaaaagaagcgtgagcaggagtccagccaggcggcagatcatgagcaggagccctgctaggagcccacccagaaattcaagcagaagccttcacataagcaggagtcctgttaaagcccacagaagaagcattagcaggagctcagctaggtccatgcaacagagaagtccaagcaggagtctggagagaactcatgtacgaaaaagtatcagtccaagcccacctttggagaagggaagaagcattacccgtacctctgtggtatctccattgcgaagtgttagtcggagcccagcaaggatttcaaggagcccacataggccttctaggagaagccctatgagaagtccacgatggaacatacgcagaagcctcagcaggagccctgcaagaatacctagaagaagtgtgagcagaagcccagtaagaggtggtcgacctcgcaggaacattagcagaagtcccagtccacatcgcagggtagtaacaccaccaaacaatggaagaagcccatccaggagtggttctcctgatgggtcaccaaaacgcataagacgtggacggggttttactcagaggtactcatacgcaagacaatatcgctcaccttctgctgatcgctcacatcgttatggtggaagaaatgaccgtgacagatacatgggttaccggggttcccgccatcgatcacctcctagacggtatagaagcccacccagaggaagagtgtcatcgccaaggtacaggaggaggagccgaagcgcctcacgcagccctgtctacagggaaagaggaaggggaggtggatacagcaaaagccctatacggagcagttcaccccctgccaggaaaccaaggtcacatggtgaccgtgcacggtcagtttcaagaagccacctttctgggtcagtatcaaggtctcctccagtgcatcatccctctccacctgattccccatcagtgaagcatgcaagtgatgagaaatctcagtccgcgtccccagctctgtcactgtctggtagccctaatcgtggaggcaagaaaggtttggtttcctacggggatggctcacctgattcagctgggaagtaggtttccaccggggcattgaaatgtatcttacaccgttagccattggctgttgatcaggtccatcaatactttttgttatatttctactgtaagaagcggtttggtccttgagctgcccagctgttacatatgttgtttgggatgatcggctatgtcctttggttatcacaagagtcgtaatttgagcttaggttttgctgttgctaaacatgtagcacagattcagtgtgggattttgatgttatataagcttcaacgcaaagaatcattacaatgttttgacctcggatgcctaagtacgattcacaatttatttcttttgcatattcaattctaatgtttatgcatctattcaacaatta

SEQ ID NO: 49784 - DNA, 3082 bp, Zea Mays
cttggcccgtctcagggctcgcagaacagggagcgtagggtaatactttgcgtggcggccgctgcgctcctcccctccaccctcctatccccccacctcactccgcttgtgcggccgcgtggtggtgcctcccgcggcgctgcggctgctctccgatcccgagcgagcacatatcctcgccaccttatcacgaggccctcgcaccgcgccgacgcgatcagcgcgtcgagccaccggagtctccccttgcgggattgcatctcaagaatatggggagaaagaagaaccccattgtctttctggatgtatccgtaggtgacgagccagatgaaagaatgatctttgagttgtttgctgatgttgcaccccttacaactgagaacttcagagctttatgcacaggtgagctgggaattggacagaagactaagaagcccttatgttacaagggaacattgttccaccgcgtgatcaaggggtttatggcacaaggaggtgacattgcaaaagaaaatgggtctggtggtgaaaacatatatagtggaaaatttacagatgaaacttgtgttctacttcatgatgatcgtggcctcttgacaacagcagatactggattcaaacctagtggctcccagttctgcattactttcaagcctaattctcatcttgacaggaagcacacagtttttggcaagcttgttgttggaagtgatgttctgaagaggatcgagcaagtagatgtgcaatcccctgattcaactcctgttattccagttactatagtaaattgtggagagctcattgaacgcaaagatattggctctatgtcaatagaaattgataaaaaaagggctgccaaatcaaagttgacaagggatataacttctgacgaggaaagtaatgaaggacaacacaagagacgtcgtaacaaatcttcaaaaaggagaaggaagaagaggagatattcttattcggaatcagatagctcttctgagtcagagactgaatcatctgattatgagagcgattctgatacttactctagtgactcatctgatgtcagcagctcaagtgatgacaggcgaaggcgcagaaagagacactcgaagaaaaataaacgcaagcattcaagaagaaagcgtgaccataggcgcgaaagaaggcgtaggaagcgtggtaggaaatcaaaacagaagtcaaaaaggatagtaaagggtgatagtgaagctgaaagtacgggcgatagcagttctgaagatgctagaagcaagagacaccgccgtgggcggaagttcaaggcatcatctcaagtttctgaggaaaatcttgctggagtggctgctttgaaggatgccacctcacctcaacaaaagagtggaatacagaggagtccagcacaagatgtctcctccctgcaaaatggggaagtccatacaaatggtgttaatgactcaaaaattgaaagaaatgccgctgtcatgcctgttttaactggcaatcgaagcaaatctaggagccagagcatgagtgttaatcactcaatgagcaagagtatgagtatcagtccaagaagaagcccaatgaaaaggtcaagtaccagcccgaagaggtcacttagcaggagccctgttgacaataatcacagtagaagccctatccgtactcccaaaagaagcgtgagcaggagtccagccaggcggcagatcatgagcaggagccctgctaggagcccacccagaaattcaagcagaagccttcacataagcaggagtcctgttaaagcccacagaagaagcattagcaggagctcagctaggtccatgcaacagagaagtccaagcaggagtctggagagaactcatgtacgaaaaagtatcagtccaagcccacctttggagaagggaagaagcattacccgtacctctgtggtatctccattgcgaagtgttagtcggagcccagcaaggatttcaaggagcccacataggccttctaggagaagccctatgagaagtccacgatggaacatacgcagaagcctcagcaggagccctgcaagaatacctagaagaagtgtgagcagaagcccagtaagaggtggtcgacctcgcaggaacattagcagaagtcccagtccacatcgcagggtagtaacaccaccaaacaatggaagaagcccatccaggagtggttctcctgatgggtcaccaaaacgcataagacgtggacggggttttactcagaggtactcatacgcaagacaatatcgctcaccttctgctgatcgctcacatcgttatggtggaagaaatgaccgtgacagatacatgggttaccggggttcccgccatcgatcacctcctagacggtatagaagcccacccagaggaagagtgtcatcgccaaggcgtggtaggtacaggaggaggagccgaagcgcctcacgcagccctgtctacagggaaagaggaaggggaggtggatacagcaaaagccctatacggagcagttcaccccctgccaggaaaccaaggtcacatggtgaccgtgcacggtcagtttcaagaagccacctttctgggtcagtatcaaggtctcctccagtgcatcatccctctccacctgattccccatcagtgaagcatgcaagtgatgagaaatctcagtccgcgtccccagctctgtcactgtctggtagccctaatcgtggaggcaagaaaggtttggtttcctacggggatggctcacctgattcagctgggaagtaggtttccaccggggcattgaaatgtatcttacaccgttagccattggctgttgatcaggtccatcaatactttttgttatatatgttgtttgggatgatcggctatgtcctttggttatcacaagagtcgtaatttgagcttaggttttgctgttgctaaacatgtagcacagattcagtgtgggattttgatgttatataagcttcaacgcaaagaatcattacaatgttttgacctcggatgcctaagtacgattcacaatttatttcttttgcatattcaattctaatgtttatgcatctattcaacaatta

SEQ ID NO: 49785 - DNA, 3558 bp, Zea Mays
ctcagggctcgcagaacagggagcgtagggtaatactttgcgtggcggccgctgcgctcctcccctccaccctcctatccccccacctcactccgcttgtgcggccgcgtggtggtgcctcccgcggcgctgcggctgctctccgatcccgagcgagcacatatcctcgccaccttatcacgaggccctcgcaccgcgccgacgcgatcagcgcgtcgagccaccggagtctccccttgcgggattgcatctcaagaatatggggagaaagaagaaccccattgtctttctggatgtatccgtaggtgacgagccagatgaaagaatgatctttgagttgtttgctgatgttgcaccccttacaactgagaacttcagagctttatgcacaggtgagctgggaattggacagaagactaagaagcccttatgttacaagggaacattgttccaccgcgtgatcaaggggtttatggcacaagatgcaagacagatgatatcgactgcttttcttatcatatagtatttaagggaggtgacattgcaaaagaaaatgggtctggtggtgaaaacatatatagtggaaaatttacagatgaaacttgtgttctacttcatgatgatcgtggcctcttgacaacagcagatactggattcaaacctagtggctcccagttctgcattactttcaagcctaattctcatcttgacaggaagcacacagtttttggcaagcttgttgttggaagtgatgttctgaagaggatcgagcaagtagatgtgcaatcccctgattcaactcctgttattccagttactatagtaaattgtggagagctcattgaacgcaaagatattggctctatgtcaatagaaattgataaaaaaagggctgccaaatcaaagttgacaagggatataacttctgacgaggaaagtaatgaaggacaacacaagagacgtcgtaacaaatcttcaaaaaggagaaggaagaagaggagatattcttattcggaatcagatagctcttctgagtcagagactgaatcatctgattatgagagcgattctgatacttactctagtgactcatctgatgtcagcagctcaagtgatgacaggcgaaggcgcagaaagagacactcgaagaaaaataaacgcaagcattcaagaagaaagcgtgaccataggcgcgaaagaaggcgtaggaagcgtggtaggaaatcaaaacagaagtcaaaaaggatagtaaagggtgatagtgaagctgaaagtacgggcgatagcagttctgaagatgctagaagcaagagacaccgccgtgggcggaagttcaaggcatcatctcaagtttctgaggaaaatcttgctggagtggctgctttgaaggatgccacctcacctcaacaaaagagtggaatacagaggagtccagcacaagatgtctcctccctgcaaaatggggaagtccatacaaatggtgttaatgactcaaaaattgaaagaaatgccgctgtcatgcctgttttaactggcaatcgaagcaaatctaggagccagagcatgagtgttaatcactcaatgagcaagagtatgagtatcagtccaagaagaagcccaatgaaaaggtcaagtaccagcccgaagaggtcacttagcaggagccctgttgacaataatcacagtagaagccctatccgtactcccaaaagaagcgtgagcaggagtccagccaggcggcagatcatgagcaggagccctgctaggagcccacccagaaattcaagcagaagccttcacataagcaggagtcctgttaaagcccacagaagaagcattagcaggagctcagctaggtccatgcaacagagaagtccaagcaggagtctggagagaactcatgtacgaaaaagtatcagtccaagcccacctttggagaagggaagaagcattacccgtacctctgtggtatctccattgcgaagtgttagtcggagcccagcaaggatttcaaggagcccacataggccttctaggagaagccctatgagaagtccacgatggaacatacgcagaagcctcagcaggagccctgcaagaatacctagaagaagtgtgagcagaagcccagtaagaggtggtcgacctcgcaggaacattagcagaagtcccagtccacatcgcagggtagtaacaccaccaaacaatggaagaagcccatccaggagtggttctcctgatgggtcaccaaaacgcataagacgtggacggggttttactcagaggtactcatacgcaagacaatatcgctcaccttctgctgatcgctcacatcgttatggtggaagaaatgaccgtgacagatacatgggttaccggggttcccgccatcgatcacctcctagacggtatagaagcccacccagaggaagagtgtcatcgccaaggtaaataaactgtttatatgtgatatttttctatgtgtatcagcttgtattatcatttgtgatgctatgtcatggaactaactctgaataggcatagatttttgtttgctatacttgctcccctcagtttaaatttataagccattttaacattttcggtacatcaattttactatgtatctagatataacatatctagatacataacaaaattgatgtatcacagaagtcaaagcgacttataatttggaatggagtattatttttctgaagttattatttgcaaatgattgaagcaattttatttcgagttttttctcaatcggtatgcatagctgattcttgtggttggttctttgtcatgatttcttttattttggtacttgaggcgtggtaggtacaggaggaggagccgaagcgcctcacgcagccctgtctacagggaaagaggaaggggaggtggatacagcaaaagccctatacggagcagttcaccccctgccaggaaaccaaggtcacatggtgaccgtgcacggtcagtttcaagaagccacctttctgggtcagtatcaaggtctcctccagtgcatcatccctctccacctgattccccatcagtgaagcatgcaagtgatgagaaatctcagtccgcgtccccagctctgtcactgtctggtagccctaatcgtggaggcaagaaaggtttggtttcctacggggatggctcacctgattcagctgggaagtaggtttccaccggggcattgaaatgtatcttacaccgttagccattggctgttgatcaggtccatcaatactttttgttatatttctactgtaagaagcggtttggtccttgagctgcccagctgttacatatgttgtttgggatgatcggctatgtcctttggttatcacaagagtcgtaatttgagcttaggttttgctgttgctaaacatgtagcacagattcagtgtgggattttgatgttatataagcttcaacgcaaagaatcattacaatgttttgacctcggatgcctaagtacgattcacaatttatttcttttgcatattcaattctaatgtttatgcatctattcaacaatta

SEQ ID NO: 49786 - DNA, 3224 bp, Zea Mays
cgcagaacagggagcgtagggtaatactttgcgtggcggccgctgcgctcctcccctccaccctcctatccccccacctcactccgcttgtgcggccgcgtggtggtgcctcccgcggcgctgcggctgctctccgatcccgagcgagcacatatcctcgccaccttatcacgaggccctcgcaccgcgccgacgcgatcagcgcgtcgagccaccggagtctccccttgcgggattgcatctcaagaatatggggagaaagaagaaccccattgtctttctggatgtatccgtaggtgacgagccagatgaaagaatgatctttgagttgtttgctgatgttgcaccccttacaactgagaacttcagagctttatgcacaggtgagctgggaattggacagaagactaagaagcccttatgttacaagggaacattgttccaccgcgtgatcaaggggtttatggcacaagatgcaagacagatgatatcgactgcttttcttatcatatagtatttaagggaggtgacattgcaaaagaaaatgggtctggtggtgaaaacatatatagtggaaaatttacagatgaaacttgtgttctacttcatgatgatcgtggcctcttgacaacagcagatactggattcaaacctagtggctcccagttctgcattactttcaagcctaattctcatcttgacagtttttggcaagcttgttgttggaagtgatgttctgaagaggatcgagcaagtagatgtgcaatcccctgattcaactcctgttattccagttactatagtaaattgtggagagctcattgaacgcaaagatattggctctatgtcaatagaaattgataaaaaaagggctgccaaatcaaagttgacaagggatataacttctgacgaggaaagtaatgaaggacaacacaagagacgtcgtaacaaatcttcaaaaaggagaaggaagaagaggagatattcttattcggaatcagatagctcttctgagtcagagactgaatcatctgattatgagagcgattctgatacttactctagtgactcatctgatgtcagcagctcaagtgatgacaggcgaaggcgcagaaagagacactcgaagaaaaataaacgcaagcattcaagaagaaagcgtgaccataggcgcgaaagaaggcgtaggaagcgtggtaggaaatcaaaacagaagtcaaaaaggatagtaaagggtgatagtgaagctgaaagtacgggcgatagcagttctgaagatgctagaagcaagagacaccgccgtgggcggaagttcaaggcatcatctcaagtttctgaggaaaatcttgctggagtggctgctttgaaggatgccacctcacctcaacaaaagagtggaatacagaggagtccagcacaagatgtctcctccctgcaaaatggggaagtccatacaaatggtgttaatgactcaaaaattgaaagaaatgccgctgtcatgcctgttttaactggcaatcgaagcaaatctaggtttcctatttttcttcatacataaatcattctttctgcttactgcttctggaagcggtgtttcatctgacattgataagcaggagccagagcatgagtgttaatcactcaatgagcaagagtatgagtatcagtccaagaagaagcccaatgaaaaggtcaagtaccagcccgaagaggtcacttagcaggagccctgttgacaataatcacagtagaagccctatccgtactcccaaaagaagcgtgagcaggagtccagccaggcggcagatcatgagcaggagccctgctaggagcccacccagaaattcaagcagaagccttcacataagcaggagtcctgttaaagcccacagaagaagcattagcaggagctcagctaggtccatgcaacagagaagtccaagcaggagtctggagagaactcatgtacgaaaaagtatcagtccaagcccacctttggagaagggaagaagcattacccgtacctctgtggtatctccattgcgaagtgttagtcggagcccagcaaggatttcaaggagcccacataggccttctaggagaagccctatgagaagtccacgatggaacatacgcagaagcctcagcaggagccctgcaagaatacctagaagaagtgtgagcagaagcccagtaagaggtggtcgacctcgcaggaacattagcagaagtcccagtccacatcgcagggtagtaacaccaccaaacaatggaagaagcccatccaggagtggttctcctgatgggtcaccaaaacgcataagacgtggacggggttttactcagaggtactcatacgcaagacaatatcgctcaccttctgctgatcgctcacatcgttatggtggaagaaatgaccgtgacagatacatgggttaccggggttcccgccatcgatcacctcctagacggtatagaagcccacccagaggaagagtgtcatcgccaaggtacaggaggaggagccgaagcgcctcacgcagccctgtctacagggaaagaggaaggggaggtggatacagcaaaagccctatacggagcagttcaccccctgccaggaaaccaaggtcacatggtgaccgtgcacggtcagtttcaagaagccacctttctgggtcagtatcaaggtctcctccagtgcatcatccctctccacctgattccccatcagtgaagcatgcaagtgatgagaaatctcagtccgcgtccccagctctgtcactgtctggtagccctaatcgtggaggcaagaaaggtttggtttcctacggggatggctcacctgattcagctgggaagtaggtttccaccggggcattgaaatgtatcttacaccgttagccattggctgttgatcaggtccatcaatactttttgttatatttctactgtaagaagcggtttggtccttgagctgcccagctgttacatatgttgtttgggatgatcggctatgtcctttggttatcacaagagtcgtaatttgagcttaggttttgctgttgctaaacatgtagcacagattcagtgtgggattttgatgttatataagcttcaacgcaaagaatcattacaatgttttgacctcggatgcctaagtacgattcacaatttatttcttttgcatattcaattctaatgtttatgcatctattcaacaatta

SEQ ID NO: 49787 - DNA, 678 bp, Zea Mays
ggattacctctctcgcgtgcgtgcgtcttcttcgttggaggcggcgtctatcgagctcacgtcctggcgatcacgccggtggccaggggcatgacaggcgcacacgcactccaacggcgccgtctacgccaacggcaccaccgagatcccctccccttctgctgccaggcagcctttcatcatcggggtttctggagagacggcgttggggaagacgacggtgtgcgacatgattatccaacagctgcacgaccaccgcgtcgtgctcgttagccaggattcattctactgtggtctaaccgctgaagagtctgcacatgcacaagactacaattttgatcaccctaatgcatttgatacagaacaacttatggaatgcatgagaaatttgctgttttgccactctcaaatttggctgtctgttattatgccatcccgtgtctatgactggtgggaccgtctgtgtctatgatttgtgggtccgatgacatactggcgaaggccacaaatgataatggcaaaattgccaatggctcggaatgcatggtgcagctgaaacgtgctcaacctgcaaatgttcctatatatgatttcaagaagcatcgacggtgttctgaaacctttaggaagataccgacattaggcttgctcggtgaatcagacgtgatacagttgaaa

SEQ ID NO: 49788 - DNA, 2675 bp, Zea Mays
agaacctgcctagtcgctgcgtgtgctagtgtccgagccacccggccacaacctcgctttgctcctcgcgtcgctactcgccgaattcttccccagtccgcgccataaagctcgcccagccgtgaccttgccttgctcctcgtgtcactattagtcgagctcatccaacacttgctttatcctagccacaactcgtgcatcctcgaattccctccctggcctgtcgtcgtgtgtgctcgcgctcagctgcgcttgcttgcatccgcgtcgttcattgactcagtgctagactacatctacttggctctagctcgctagctatctgcgctcgctgttggtcccggttttgagctcgtcgtctggtacctagccactgtctagcgctcgcgtcggccacgcaaaacctcgacgtcgaacgtgctgttctacgcaaaacaggcccgcgtcatcatcattcttgtcgtggattgtcgacgtcattcgcctcaacaacaaccacatccatgactccgccgttccaataattttaccgcactgcccttcaaattcgagtcctcgtccgtaggatcatcgttggcctcgcaatttcagctcgagttagttatggtaagttgatctgttatttccgtcaactaaatagatggtgggattaaatagatgtatcatttggaacgattctcttgtctattacttgatgtggagggtaaagttagatttcaggtttatgtgataagtatattggtaaaaatgtatgttgtgtgatgattctctacttaatagattaagtgtagtgtgatgttttattagtcgagataatttaaggattaattcagaagagtgtttaaatagttagttaagttgtttcgatccatacttcgattttggtgtcccaaaattatgattctaagtaattagtctttcggtgttcgctttagtcaaagagaaatgtggaactcatatgatctattcttttcctaatgactgagctaggtccttttaaacagaaagcaagtgatgtatgagctacctccgaataggctggaaaggtgtaattattataattaattatatatcgctagttagtatttgcttaatgctttattataagtgtttcatccactttggtgtagattatctatcttatactatttatactcgtgctcatacatgtgcatcatgcatctcatgaggtacgctagttgatcacgtgaggtgaagggcaagagctggagtaatctcaaggtgatgctgatggacgatcctgaagatggataatctgaacaagtgccaagacaatggatggtcgtcaagtgttcgtcacctaacaacactaacctcgtgttatccaggcaagctccggtgcatttgccacctccttgatgttttaaaatctttatcaccttgtttaatgcattaggtgataggagttgtgtgctaaacaattgatgcattttcttccttgaaaaactgattacccttccttgataccctttttgaaaagaattttatgatgcttagccttgctttagcaaacaaaaatgttttgttttaaaacaaaagtgatgcttcagcgggtgggaatgttttcaaaaagaaaaacttgtgatggtggatccatcagggccttgatgggttcaacatcggaaaagatgtacctctgccaggtaccaaactttgggtttaaataataaagctgagaccgggcgggtggcttgcacgagaagagagtctcagtgtagtgcctccgtctgagtcgattaaggactgtctcaatgtaggcttgctgatcgaggaccttttaactggtcacatgcctcatcatgggtaagctttgcctcgggcagactaatactagaaaggccaacacgcaatgggagtggagagatggcgagagtagtgtgtaccctccatggcaagaggctggacggtggtgtatctgtgctctcggttggcgtgaacctggtctggtcttaagaaacccgttggcgagttgacatatgcaagggttaagtgcaacatatgtcgtatgattggagatccccagctgggtatttatcgattcggatcgccgttacttctcagacatgaagacttggtcactgccctacacatagcaatccagtgaactgaagggatgataaaaagacggctagtataggccatgttcttgaactaggatagaaagaactctagatgcaggtaactttacttaacctgactgttgggggccttcggcttccgaaggtcctcaaaaacgtaatttgactatgttttccaaaagaaatatgtgaacaggtaccttcgaagtcagattgcgagtatacaagaacatggttaagacgaagcttgattgggacggcgatcacgacgaaggataagacgatcacgaagctacgtgcagaagagcttcggcataacggcagaaagaggaaaccgacttaaagatgaaaggccaaattagacctcgaagaattactatagagttattgataaatataaagggcattaatgtaattttgcatgggctgcgacccgtgcctataaataggtgaacagtattcccgtactgttcacgctgactgggcatttacttttgtgtcacacctgtattctcattccttcaaaccgaaggtacatttgtaatttattattatttacacaagtaatataaatgg

SEQ ID NO: 49789 - DNA, 1975 bp, Zea Mays
aagctcgcccagccgtgaccttgccttgctcctcgtgtcactattagtcgagctcatccaacacttgctttatcctagccacaactcgtgcatcctcgaattccctccctggcctgtcgtcgtgtgtgctcgcgctcagctgcgcttgcttgcatccgcgtcgttcattgactcagtgctagactacatctacttggctctagctcgctagctatctgcgctcgctgttggtcccggttttgagctcgtcgtctggtacctagccactgtctagcgctcgcgtcggccacgcaaaacctcgacgtcgaacgtgctgttctacgcaaaacaggcccgcgtcatcatcattcttgtcgtggattgtcgacgtcattcgcctcaacaacaaccacatccatgactccgccgttccaataattttaccgcactgcccttcaaattcgagtcctcgtccgtaggatcatcgttggcctcgcaatttcagctcgagttagttatgttgatcacgtgaggtgaagggcaagagctggagtaatctcaaggtgatgctgatggacgatcctgaagatggataatctgaacaagtgccaagacaatggatggtcgtcaagtgttcgtcacctaacaacactaacctcgtgttatccaggcaagctccggtgcatttgccacctccttgatgttttaaaatctttatcaccttgtttaatgcattaggtgataggagttgtgtgctaaacaattgatgcattttcttccttgaaaaactgattacccttccttgataccctttttgaaaagaattttatgatgcttagccttgctttagcaaacaaaaatgttttgttttaaaacaaaagtgatgcttcagcgggtgggaatgttttcaaaaagaaaaacttgtgatggtggatccatcagggccttgatgggttcaacatcggaaaagatgtacctctgccaggtaccaaactttgggtttaaataataaagctgagaccgggcgggtggcttgcacgagaagagagtctcagtgtagtgcctccgtctgagtcgattaaggactgtctcaatgtaggcttgctgatcgaggaccttttaactggtcacatgcctcatcatgggtaagctttgcctcgggcagactaatactagaaaggccaacacgcaatgggagtggagagatggcgagagtagtgtgtaccctccatggcaagaggctggacggtggtgtatctgtgctctcggttggcgtgaacctggtctggtcttaagaaacccgttggcgagttgacatatgcaagggttaagtgcaacatatgtcgtatgattggagatccccagctgggtatttatcgattcggatcgccgttacttctcagacatgaagacttggtcactgccctacacatagcaatccagtgaactgaagggatgataaaaagacggctagtataggccatgttcttgaactaggatagaaagaactctagatgcaggtaactttacttaacctgactgttgggggccttcggcttccgaaggtcctcaaaaacgtaatttgactatgttttccaaaagaaatatgtgaacaggtaccttcgaagtcagattgcgagtatacaagaacatggttaagacgaagcttgattgggacggcgatcacgacgaaggataagacgatcacgaagctacgtgcagaagagcttcggcataacggcagaaagaggaaaccgacttaaagatgaaaggccaaattagacctcgaagaattactatagagttattgataaatataaagggcattaatgtaattttgcatgggctgcgacccgtgcctataaataggtgaacagtattcccgtactgttcacgctgactgggcatttacttttgtgtcacacctgtattctcattccttcaaaccgaaggtacatttgtaatttattattatttacacaagtaatataaatgg

SEQ ID NO: 49790 - DNA, 2238 bp, Zea Mays
ctgtttccaaaatccaaagtagtaagggtaaccaatacagctgaggaaacactcttaagaacctcattaaggaagaggacgagctcgccttctgcacactgagaactgccccattttgaattcatatgttcttgataagtttaaaaaatcgatgatgtccttatgaccacaatttgaaggatgagaccgcaagctttagggtcactatcaatctaccacgatacaaattttaaaaagttaacaatacagatatggggggtttatctacagaatcaactctaggaagcccaataattagttctgttcatgaaatagaaacctggttaatatataccttcacttagtacatattgcataaacccgtagttctttatggttgtctaagctttagaaaacagagaatctttcagtagcctcaacttctgtcaaatgatataccatcacgaaaattaatattgtgcaaaagacatgtcatcaacatgtagaattaggagccctgcacagcaaatcagttttgcataaacaatccttccagatcgctccccaagccggtccaaggaacggtggcgggtgagcctcgtcatacagtcataaccgccatcgtcgcttgggtatggtgtgtgttgcctctgggcacagagtttacgctgcacaacattggggctcttggtgatgggtgccccaagcagcatgagggtgtggacgagatggtacaggataaaagttgttctaattatcaatctttgatctagactgttgcactcagaggaaagaatgtccgtttcaaaggctttgaggttgaaaatttggcagaatttgaccatctaccagtccaccatacaaaacagaaggaaaaaaacggacgtcctaagacttagtttattgtttcgaattcaaccagaatccccattcataatttggcaaacgtcatagacatgaaggaataggagaaaaatgataagatttgataaagtaacgtgataactttttcctattcatacacattacagtccgacagtactatcaatttctaaaatgtgcctttctagcctaagctattttttacatcacggctcaattctccacttaagcaaaaaacaacatcaatttactaaatgaactaaaaagaatcaggaggaaaatataagaataattagactgcaaaaactttgagctaagcaaatcatgcaatgaagttcacaaattcaaagtgattgaaggaagcccacaagaccagactggcaaacctatcaaattgaatttctaaaataacatttgccaaaaataactatctaaccatatggggggatcatagtttgcaaaatgactggaagtacctccaagcagaccaatgccatctacaaataatcaggaaagaagaaaacatgaatgtaatcttcagccatgttgaggataaacagaaaggacttagattccatgtggtcctactctcaccttcagttagaatgcccttaccgtactgaattcatccaacaaacaaagtaacctcgatgttgcatgcctgaaaaacaaattgagcataaaacctagagctgaaaataaacatgctcattttcagcttgtttggtactcgtgttgataagtaccctataaatatctaatacgaccgatagtgattatggtttcgcagcaaagttgtctctactctgcagcagctatcctttcttatcccttatcagtgcaaatcccagcctaagtgggtaaatcaactcaatggtgctgatatgaccggagtcccagagtttcagaggagaggtggtactcgtgttgataattgccctataaatatctaatacgaccgatggtgattatggtttttcagcaaggctgtctccactctgcagtagctatcatatctatcccctatttctcacaatgcaaacggtgtaatctacagtgcaaatcgacagcctaagtgggtaaatcaactcaacggtgcaaatccagagtgatgactgatgagaacataacacaatctgttaccagcattgtggcatgtgcagcaggtccacaggctgcggcgagcagcaagaggagcgtgagacagaaaggcgctttagaacccatccgtatggcgaactcgcgatgctttccttctcaacctaccatgggaaaaaatatactatgacatacaatatagagcttcagatttttttaaaaaaaatcgagtgaatttcggttaaccagtaacaaaggaagcgggccaatcagtcaagc

SEQ ID NO: 49791 - DNA, 297 bp, Zea Mays
atgcataatcttcaatctagacaccaatatcagggagatagcgagatgaaaataaacttgcctggctcgtctccctggtggttgacggtttgctacttatctctgatgattagtcacaccaccacggcaccaccacagcagaaacgtggcagagcagatgtcgcactacagcctacctttcttcgagagcggaccacttcggcttggtgtttgtcgttgccccgccggccacaagcagtggtgtcgcacaagatactactgactgcagatccgcgccgcctccttttcaggtcttaa

SEQ ID NO: 49792 - DNA, 1595 bp, Zea Mays
gagcaggtttttcagggaggacctttccgtttggaaaccatgaggtagacccccctacggtctgtgttgttcccacgcagatggacctggacgtaaaaagtggaagggttttatggaattctcggggctgttgaggagctgaatcgtaggaacctgccgtgcgtggcgtcaaaaaagcactcttggtccaaccaaatacaatacaagcaagcgaccaggagggacaggaaggatcgcagcggaggagatagctagggaagggcaaatctgcagggcctgagagggtgaggtagagcgcgccagccagaatgcaggagcaggcggcgagctcgcggccttccagcagcgagaggtcgtccagctccgggcaccacgtggacatggaggtcaaggaaggcaagctagctactacctctggcatggcaccccgtgctgtggaactatcctgtgcatcttctttttggcttataagcttgagtttatcaccaatcccagttctttcattgtttttttagaacttcgttgttccaagttccaacgcttccgataggttctcgtttgcttttgtcgtgcaactgaactgctgcaagacttgtcaagcaagtctactcgagttcgagtctcgagctctctctccaagatcttgactcgtttatttggtgaactgatccagccacacctgtggtgtgattgagttgcagggatggagagcgacgatgagataaggagagtgccggagctgggcctggagttgccgggagcctccacgtcgggcagggaggctggccctggcgctgcgggcgcagaccgcgcccttgcccagtcgtccacggcgcaggccagcgcgcgccgccgcgtccgcagccacgccgacaaggagcacaagcgcctcaaaaggctggggggcggggacatgcatgcaatcgcaaggcatgggccaggctgcaagtgggtgcggttactgaggaacagggtgtcagctcaacaggctagagagaggaagaaggcttatttaactgatctggaggtgaaggtgagagatctggagaagaagaactcggagatggaagagaggctctccaccctccagaacgagaaccagatgctccgacagatactgaagaacaccgctgtaaacagaagaggttcaggaagcactgctagtggagagggccacggccaatagcactgaatgacggaaaaatagtaatgaatcatgataaatatatgtttatatggagtggatttggtgagcttgctttgtggccaaaggagggaaccccaaaaactggggtcagacagccaagtgccgacggttcagggaaaaagaacttatggaattaatgcatttgattttaacatggtttacatatcatcatcttctactagttttctaaaaatgatgtttgtggatcaaggccagaccaggccgggccgagaaaatttaaggccttagccaaatctaaggtagtaaggtctatattttcattgaaaaataattaataacaatctaaacttgcaaaacattgtaatagaatatataaaaaaacatatctattcactacagtaaactgacgaatatccaacggtcacgt

SEQ ID NO: 49793 - DNA, 1217 bp, Zea Mays
caggtttttcagggaggacctttccgtttggaaaccatgaggtagacccccctacggtctgtgttgttcccacgcagatggacctggacgtaaaaagtggaagggttttatggaattctcggggctgttgaggagctgaatcgtaggaacctgccgtgcgtggcgtcaaaaaagcactcttggtccaaccaaatacaatacaagcaagcgaccaggagggacaggaaggatcgcagcggaggagatagctagggaagggcaaatctgcagggcctgagagggtgaggtagagcgcgccagccagaatgcaggagcaggcggcgagctcgcggccttccagcagcgagaggtcgtccagctccgggcaccacgtggacatggagggatggagagcgacgatgagataaggagagtgccggagctgggcctggagttgccgggagcctccacgtcgggcagggaggctggccctggcgctgcgggcgcagaccgcgcccttgcccagtcgtccacggcgcaggccagcgcgcgccgccgcgtccgcagccacgccgacaaggagcacaagcgcctcaaaaggttactgaggaacagggtgtcagctcaacaggctagagagaggaagaaggcttatttaactgatctggaggtgaaggtgagagatctggagaagaagaactcggagatggaagagaggctctccaccctccagaacgagaaccagatgctccgacagatactgaagaacaccgctgtaaacagaagaggttcaggaagcactgctagtggagagggccacggccaatagcactgaatgacggaaaaatagtaatgaatcatgataaatatatgtttatatggagtggatttggtgagcttgctttgtggccaaaggagggaaccccaaaaactggggtcagacagccaagtgccgacggttcagggaaaaagaacttatggaattaatgcatttgattttaacatggtttacatatcatcatcttctactagttttctaaaaatgatgtttgtggatcaaggccagaccaggccgggccgagaaaatttaaggccttagccaaatctaaggtagtaaggtctatattttcattgaaaaataattaataacaatctaaacttgcaaaacattgtaatagaatatataaaaaaacatatctattcactacagtaaactgacgaatatccaacggtcacgt

SEQ ID NO: 49794 - DNA, 1274 bp, Zea Mays
cgccgccatccgccggtcgcggccccgctcgccccgtcgcccacactgccggtgtaagtatggaggaggatcgtcgatggatgtatgaaggttggaagaaaagaggtgctctatcaagtgagtgggttgccaagactgacgcgtttctcgaccgtgcttttgctcggtcagagactggaaccgatgttaggtgcccttgtaccaagtgtcggaacatttatttccttgacaggaggactatgtcgatagatctttgcaagaacggttatatgccaggctatgaggtgtgggtgcaccacggtgaggacccacctccttgtattgtatcagaagttcagtcacatgaagaggaggactacgataggatggaagagatgcttgacgatgtacgccatgagcttctaaccgtcgattcggagaaccccggtcaacccaccgagtatgaggatccagctacacctgaggttcagaagttctttgagctccttaaagctgccgaagagccgttgcatgagcacacaaaagtgaccgtccttgtatttgtgactcgacttatggctattaagtctaagtttgcattctcaaggacgtcgtcccgttcacgatcatccgcccacgacatagagatggcagtgttgcgtcaacaggcagattaccatcaatcagtattgagggaacaattggagtaccagaggcaacaatctgagtaccagaggcaacaagccgagtaccagaagaagagggacgagtatgatgcaaacctccaggcccaaaatcaagctcttctctcgcaactagcccaacaagcggacgtcccgatgcccacctatgggatgccgcctccggactttgcacttccgatgccaatgcttgcgcctccacctccacctccgcctccgtcacaattccctacgggatttcagacaccccccgctatagttggagcaccaggagacgggtctggtcaagacgacgcatcgcattcgtgggtgaataaccttttcaacacgcatagtccagcaggaggaggtggctactcgaaccatccaggcgatggatatgattgatgtgtcgtgatgttaatttgtgaaacactttgcaacacttgtttgcaaccgtgatcacaacacttgtttatgagacacaatgtcagtttgcaacaaccgtcggacctatatgttgatgttaaatttgtgaatgttaatatttatgtgagaatatttgagattgtaatgtgaatacttatgtgaatgtgtatatttgtgattgtgaat

SEQ ID NO: 49795 - DNA, 1547 bp, Zea Mays
acttctttctcgtcttcctctcctgtctcctcgcagttgcgcagcagggtgctggaagaagtttctggttggaagaatccggttgagctgtagacagcttgtcgattcgttgcttgaggagcagccatggacagaagaaaccgaccagctccgttgatcatccgccgcggcggcggcgaggcgaatcccagtgtcgaaggcgtgcgtgcaaccgagcctcagggcgtccatccacccgctgaagccacggccgggcgcagagcggagccgcggaggggcgtgcccgctgctcccaggccttccggacgacctcgccattgcctgtctcatccgggtgcccagagccgaccactggaagctgaggctggtgtgccggaagtggtgccgcctgctcgccggcaactacttctacggcctacgccggcggctcgggctcgcggagcagtggctgtacgccgtgaagcgcgacggcagggacgggcgcgtgtcgtgggacgtgctcgacccgtcgcgcggcgagtggcgcgcgctgccgcccgtgccgggcgagtacgcggaggccgacgggttcggctgcgccgtgctcggcggctgccacctgtacctgctcggcggcagggacccgcgcaggggcagcgccatgcggcgggtggtgttctacagcgcccggagcaaccggtggcaccgcgcgccggacatgctgcgccgccggcagttcttcgacgtgtgcgtcatgggcaaccgcctgtacgtcgcgggcggtgagggtggcggcggcgggctcaggtccgctgaggtgttcgacccggccaagaaccgctggtccttcgtggccgagatggccgcgccgatggcgccgttcgtcagcgcggtgcatggcgggcggtggttcgtgaagggtattggcgcgcagcagcaggtgctaagccaggcatactccccggagtctgactcgtggtccatcgtcctcgacggcatggtcaccggctggcggagcgccagcgcgtgcctcaacggccggctctatgctgcagagtgcatggacggatgccggttgagggcctacgacgaggccgtggacgcgtggagcacctgcgccgacagcaagcagcaccgagggagctcccaggcggctgccattgtcgccctccacggaaggctcttcgtcgtccgcaacgacatgagcgtctcggccgtccaggtggcggccgaggcgggaaagcagaggtggcagaccctcgccggcaaagcgcataccaagagctttgtcacgggcctgttgtccaacctcgctggtcgcagccgcgccaagaacaacatcctccattgccaagttcttgaggtctagctgtcttgctccctgatgagttatgcttataagttactagaatcacgcaatgaaaaagtacgtgagaaatctccatgtctgctcaagagtgctaattaaataagcgagaattacaggcatctgaagaacgcgcgtgatcgttgtataaaactacaaatacagtttatatggtatacagtatacagatttattatgatca

SEQ ID NO: 49796 - DNA, 1576 bp, Zea Mays
acttctttctcgtcttcctctcctgtctcctcgcagttgcgcagcagggtgctggaagaagtttctggttggaagaatccggttgagacagcttgtcgattcgttgcttgaggagcagccatggacagaagaaaccgaccagctccgttggttgacagctctgcatgcttttgccgagtggacagatcatccgccgcggcggcggcgaggcgaatcccagtgtcgaaggcgtgcgtgcaaccgagcctcagggcgtccatccacccgctgaagccacggccgggcgcagagcggagccgcggaggggcgtgcccgctgctcccaggccttccggacgacctcgccattgcctgtctcatccgggtgcccagagccgaccactggaagctgaggctggtgtgccggaagtggtgccgcctgctcgccggcaactacttctacggcctacgccggcggctcgggctcgcggagcagtggctgtacgccgtgaagcgcgacggcagggacgggcgcgtgtcgtgggacgtgctcgacccgtcgcgcggcgagtggcgcgcgctgccgcccgtgccgggcgagtacgcggaggccgacgggttcggctgcgccgtgctcggcggctgccacctgtacctgctcggcggcagggacccgcgcaggggcagcgccatgcggcgggtggtgttctacagcgcccggagcaaccggtggcaccgcgcgccggacatgctgcgccgccggcagttcttcgacgtgtgcgtcatgggcaaccgcctgtacgtcgcgggcggtgagggtggcggcggcgggctcaggtccgctgaggtgttcgacccggccaagaaccgctggtccttcgtggccgagatggccgcgccgatggcgccgttcgtcagcgcggtgcatggcgggcggtggttcgtgaagggtattggcgcgcagcagcaggtgctaagccaggcatactccccggagtctgactcgtggtccatcgtcctcgacggcatggtcaccggctggcggagcgccagcgcgtgcctcaacggccggctctatgctgcagagtgcatggacggatgccggttgagggcctacgacgaggccgtggacgcgtggagcacctgcgccgacagcaagcagcaccgagggagctcccaggcggctgccattgtcgccctccacggaaggctcttcgtcgtccgcaacgacatgagcgtctcggccgtccaggtggcggccgaggcgggaaagcagaggtggcagaccctcgccggcaaagcgcataccaagagctttgtcacgggcctgttgtccaacctcgctggtcgcagccgcgccaagaacaacatcctccattgccaagttcttgaggtctagctgtcttgctccctgatgagttatgcttataagttactagaatcacgcaatgaaaaagtacgtgagaaatctccatgtctgctcaagagtgctaattaaataagcgagaattacaggcatctgaagaacgcgcgtgatcgttgtataaaactacaaatacagtttatatggtatacagtatacagatttattatgatca

SEQ ID NO: 49797 - DNA, 2227 bp, Zea Mays
attaaagatgctgtgaacatggaagaaaggacaaacatagttattataaattgtcataggtatattattaaagatgcttttggatattgattctttcttttttctagagcaaacatttgatgattcgtctatgcatatatcttaagtcttattgacggttgatagttttgtcaggggttatgttgctatgcttcagaagaaggatccaaaactttgctctcatattttccataaccagccacaatatgatgagcaccatgattcgtccccagttttggtgtcgaagtatcatcgatgggattgctcaagatgtcttgatagtgtggaagtttcaggccataggccaacatcggaaaatgtttctatgcagcagaatggaatgaatgatggctgctctatttcaattgtttggattttgcctaatagtgttgattccagaagactgttttcttgcacacatcaatcatctcaagggaatgatcgattgaccctttcaaagactgcccaagaatgcaattcaaaatgcagttctcctggcaacaaagcaattactgcgatgaatgttccagtagctgaagaaaatgttccagaggcactcgttgatacgagggttccatctatagaagttttacaggcctctcccaatagtattgatttgtcagcaaatatcttgaatgctgtctcgaagaatgtcagcgatctacctgatgatgttgaagaaaatggcacacagaatccacacagtctaaaaccttgtgtggcgccaaatgaagatgagaataacatagctaatgatgacctcaatgagcctaatgtatgtaaaccagtatctgggcacaaaagcaaacaagtctgcaacatgggtccacgccgagcatcgtcaaaaagaaatgttgaatctgatggtaagaggaaaaggaataaatctactaaactgcctggtatttcagatctcaaattttgtcagagaaagccaaaaaagacaaggctgttatcagaactcataggttctgaacaggtaggggtttctggagatgccgttcaagtggaccatactaacagtgttgatctctgtgagggtggtaaaagaaaaatgcaccttgaggttggaaaaggtaatgacactactaatcagcaagtggacaaaatccagtcaagagctgtcaagaacaaggcaaaatacacaggagtagacaagttagaagatggatcctctctaatgaactggctgaaaagcactaataaggaagttagaacaaagaaaaaagactcagaacacaagaatcttgattcctcttctatttcaaggtcttacccagatatagttgcttctaatgatatgcatcatgattttctaccctcagttggggatgtgggccaggcagatgtaccatctactaccagtgccaagcatgggaatggaaatgcacagaatgacaaactggagcaaaatatgcagaagatggatggcttgtgtgaaaatgaatctagaaacttgaaacagaggttcttctcaaatgaaaaatcaacgattttgctaaagagaaaggtactgtccacttccgttgtccatgatgagaacattgagaacagtaatataaagagagatatgctcaggtcagatgatttgcctcaaaaggaacctgaagtctctgtacaaagatatttggcaaaggtttctcttggtaaacaaaagatccagaatgtgtctggcctccacaagaagaatataccaaagaataagaaaggaaagcagaaggtgcacgagaaacaaaatgtgatagacgacttccccatggacattgttgaacttctcgccagaaatcagcacaagagacaattgatgactgacaccaattctttggaaaactgtcatactcaacccaaggtagctcaagttgattgtgctgcatttgcagccaagggttgtcccaccaatgcatcaaatgagttcaacactaatttccaaaaatctttggcatcagaaagtaagcagaagtccttacagtctgtcaaacaacgagagaatcactttttttagccaagtcagtgtgcttgtcagcatcaagattggcaatcacaacactgtcgtcctgcttgaaaactgaagccagcttctcataaatctaaattcaagtacatgttcagtccacaaaaaaaatgaagaccgctgcaataatttggaaattttcaagctaatactctactaaccggagcaagatgcttg

SEQ ID NO: 49798 - DNA, 2786 bp, Zea Mays
aaagatgctgtgaacatggaagaaaggacaaacatagttattataaattgtcataggtatattattaaagatgcttttggatattgattctttcttttttctagagcaaacatttgatgattcgtctatgcatatatcttaagtcttattgacggttgatagttttgtcaggggttatgttgctatgcttcagaagaaggatccaaaactttgctctcatattttccataaccagccacaatatgatgagcaccatgattcgtccccagttttggtgtcgaagtatcatcgatgggattgctcaagatgtcttgatagtgtggaagtttcaggccataggccaacatcggaaaatgtttctatgcagcagaatggaatgaatgatggctgctctatttcaattgtttggattttgcctaatagtgttgattccagaagactgttttcttgcacacatcaatcatctcaagggaatgatcgattgaccctttcaaagactgcccaagaatgcaattcaaaatgcagttctcctggcaacaaagcaattactgcgatgaatgttccagtagctgaagaaaatgttccagaggcactcgttgatacgagggttccatctatagaagttttacaggcctctcccaatagtattgatttgtcagcaaatatcttgaatgctgtctcgaagaatgtcagcgatctacctgatgatgttgaagaaaatggcacacagaatccacacagtctaaaaccttgtgtggcgccaaatgaagatgagaataacatagctaatgatgacctcaatgagcctaatgtatgtaaaccagtatctgggcacaaaagcaaacaagtctgcaacatgggtccacgccgagcatcgtcaaaaagaaatgttgaatctgatggtaagaggaaaaggaataaatctactaaactgcctggtatttcagatctcaaattttgtcagagaaagccaaaaaagacaaggctgttatcagaactcataggttctgaacaggtaggggtttctggagatgccgttcaagtggaccatactaacagtgttgatctctgtgagggtggtaaaagaaaaatgcaccttgaggttggaaaaggtaatgacactactaatcagcaagtggacaaaatccagtcaagagctgtcaagaacaaggcaaaatacacaggagtagacaagttagaagatggatcctctctaatgaactggctgaaaagcactaataaggaagttagaacaaagaaaaaagactcagaacacaagaatcttgattcctcttctatttcaaggtcttacccagatatagttgcttctaatgatatgcatcatgattttctaccctcagttggggatgtgggccaggcagatgtaccatctactaccagtgccaagcatgggaatggaaatgcacagaatgacaaactggagcaaaatatgcagaagatggatggcttgtgtgaaaatgaatctagaaacttgaaacagaggttcttctcaaatgaaaaatcaacgattttgctaaagagaaaggtactgtccacttccgttgtccatgatgagaacattgagaacagtaatataaagagagatatgctcaggtcagatgatttgcctcaaaaggaacctgaagtctctgtacaaagatatttggcaaaggtatgattaaacataaagaattctactgaaaatttataattagattattacattcatttacgtgttttacctacttttgctgacttgaattggggacctttgtccagcataggatttttaatccctttaatgttaatgcatttgtgtctatgccactttgctcccataccatccatgctttccgttgtgtacaccactaggattttttgacactttttatgacatttgagttcacaagtttgcacgcatgccaactgaactagttatttgtgtgtgactagtttgggatgtcatgagcaaattagcgaatcccaaatgacatttacttctttataaactatatatatatacacacacacaatggtgcaagcaataggaaatccgtactgaatttagtctgcttgtatacaaatattgtaccctcatctcgttaccacaggtttctcttggtaaacaaaagatccagaatgtgtctggcctccacaagaagaatataccaaagaataagaaaggaaagcagaaggtgcacgagaaacaaaatgtgatagacgacttccccatggacattgttgaacttctcgccagaaatcagcacaagagacaattgatgactgacaccaattctttggaaaactgtcatactcaacccaaggtagctcaagttgattgtgctgcatttgcagccaagggttgtcccaccaatgcatcaaatgagttcaacactaatttccaaaaatctttggcatcagaaagtaagcagaagtccttacagtctgtcaaacaacgagagaatcacttctgtgattccagaggaaattttttcatcacaatcgcaatataagaaaatccagtggtgttaaactaaaggctgaaagctaatgtgcataacaaccactgaaatagacaagtcagaatgcatactttttagccaagtcagtgtgcttgtcagcatcaagattggcaatcacaacactgtcgtcctgcttgaaaactgaagccagcttctcataaatctaaattcaagtacatgttcagtccacaaaaaaaatgaagaccgctgcaataatttggaaattttcaagctaatactctactaaccggagcaagatgcttg

SEQ ID NO: 49799 - DNA, 7075 bp, Zea Mays
gctaattttacgaataacccttaacacgagaggtaggaggtaggtgcaagctaagacagccccgcctaaaacccatcaggccgcctgcccgtgcgctcactactcactagggttttgaatcccttccgtaccctcccttccgccgactcctagggttccgaccgccgaccgggtttgttctccggcgatggcaccgcttccgccgcgcgagctcctctctgtcatcgaggcggcgctgctgggctccacggcgccatcgccggcgcagcgcgtggagctcctccacgccgtccgcgatgctgcccccgcgttccgcacgttactctcctatccggtgccgaaggcgtcggatcggactcaggtggagagcaaggaagtgcggctaccgggcatgcctcccatcactcttgatgacacagacgtgcggaccgcgcttaagctgagtgatgaactcaatcttaatgagattgagtgtgttcgtttgctagttgatgctaacagagagtgggttctctatgggcgagagccattggaaatatatagactcgcagctggcctttggtacatggagagaagggatcttataaccgctctgtacattctgttgcgatctgttgcacttgaccaaggtcttgatgccgatctgatgtctgaaatcgaggatcaaatccaacctttattcaatgatggtctccgacaacggataattactcttgtaaaggagctgaacagggaagaaccagctggaattggcagtccaagctctgagcgttatgtgcttgatttcagaggggctcttgtggaaagaagggcaattgtctcgagagagagattaagtttgagccactgccttgccctttctgcacttattaaactaacgagccccaaagaggttaaggatgtattttcaatattgaaagactgtgcagctgaagcaaatcaaaatagcagtgtggagctccagatcacctatggacttctgttctttcttgtagcaacttttatttctgatgccctaagtacttctcttgagaaagcatcattgtcatcgtctgattcctcatttagacgtgaatttcatgaacttgtgatgaggacaggtaacaatatgactattgaagggtttgttggtgttgtgcggcttgcatggtctgttcatttgatgctaactcaagatcgaagtaattcaagagaaacgtcagatatttggtcatgcctggaaattatctgtcgtcaaaattcttttgagtttttgcgggagcaagttttgaaaacagctgcataccagaatgatgatgaggacattgtctacatgtacactggctacactcacaagctaatgatgtgctttatttcccacccaacttccagagataagataaaggaaatcaaggagaaagcaatgactgccctcagtccatatgagccaccacgaggtcaacgagaagatcttggtagaaatggggaacaagctgatcagcctactaaggagccttttgtatccctgctggaactggttagagaaatctatcagaaagtgcctgagctagggaatggaaatgaggaattgtggacttttgttatatatgcaggagaagaccacacaaacacacaaactcttgtggcctttcttggacttcttagtactttggcttccactgaagttggtgctgccaaagtctatgagctgctccagggaaaaacttaccgttcagttggttggagcactttgtttgattgcttatctatctatgaggagaagttcaaaaaatcaattcaatcttctgcaaacatactgcctgattttcctgagggggatgcacaagcgcttgttgcatatttagctgttcttcagaaggtggtggaaaatgggaatcttacggaacgcaggaagtggttccctgacattgaacctttattcaagcttctcagctatgaaaatgtgcctccatacttgaagggggctttgcgaaattcaataactgcatttataaaagtgtcacccatactaaaggatgcaatttggaattatcttgagcaatatgatcttccggtggttacagctccattaggtcaccatacagcaacacaggtctatgatatgaggtttgagttgaatgaagtagaagcgagaagggagagttacccctcgaccatatctttcctcaaattgatcaatgcacttattgtggaagaaagaaacataagtgacaaaggccggaggttcatgggtatctttaagtttgtttatgaggatgtctttggtccttttcctcaaagagcttatgctgaccccctggaaaaatgggagcttgctcttgcttgcttggagcattttcgcatggttttgagcatgtatgatataaaggatgatgatatttatgcttctgtgaacacattagctccttcctctcttgagagacaactccctctgctagaactactcaaagatttcatgagtgggaaagttgctttccggaatattatgaacatcatattagtgggtgttgactctattatcaatgagcgaactacccaaacatacggtatcattttggagagaactgtccttctatctcttgaaatatttattcttgtcatggagagagatcttgctcttgctgatgtttttcggccgctctaccagccattggatgttatattggctcaaagtcatagacagattgtagcattgctagagtttgtacgatatgattatcttccccaaattcaacagtgttctatcaaaattatgggcatcctaagttctagaatagttggtttggtacagttgcttttgaaagctgatgttggaaaaatggtaatagaagattatgctgcttgcttggagttccggtttgatgattttcaggtcatagaagacacgaaagatgatgttggggttctaacactgcagttgcttgttgacaatatttgtcgtccagctccaaacattacacatttgctcttgggattcgatgtcaatgggtccattgagcaaacagttctaaaaccaaaatctcaatacagttgtttgaagataatcttggacaatcttgaaaaagcgacaaagccggatataaattccttactgcacgaattcagttttcagcttctctatgagttatgtcttgatcctttaacttgcggacctgttatggatctcttgagtacaaagaagtaccagttcttttctaagcatgttggaaccattggagtgacaccgcttccaaaaaggaacagtaaccaatctcttcgaatcagcatgctccatgagagggcatggttgctaaagatgttagcactggcattacatatatccgatatatcatcatctgtatacagggaagcctgcatggctattctttatcatacttttggtcagtgtgctgagaacttccagagcacaagcttgatccattcacatgatgctttgactagcattagcgatgtaccagcaaagaggaacaaggttttggacttgcttgaggttctacagtttagatgtccggatacttcaacgaagtatccacagctgctttccagcttgggaatcgaatcgaagattgaagagatcctaaggaactctgccactttcgaaaatggtggtgtatattattattcagagagaggtgaccgactgattgatcttgatgctttccgtgaaaaacttctccagatttcacaagaattgaactcacaattaaccgagcctgagaaagctggactaaaagaatcagttcatcatttgctcaaatgggcgtggcgatataacaaaaatcttgaagagcaggctgcccaacttcacatgttgactggctggtcacagattgttgaggttgctgtatcaagaaggatgtcattattcgaggactgttctcagctattgtttgaactgcttgatgcttcgttgaatgccacaacatctccagattgttcagtgaaaatggcatatgttttaactaatgtatcgttgacctgtatggcgaaactgcgggatgaaagattcatatgcccagctggtacagattctgatgcggttacttgccttgacattatttcgtcaaagcagctaccaaatgcagcttgtaactcattgttattcaagcttgtgatggcaacattaagaaatgaatcatctgaaatcttgagaagacggcaatatgcattattactgagttattttcagtattgtagcagcattctggactctgatgtccctccatctgttcttcggttcttgctactggaggagcaagatggtgatgatgaggacatcactcttcaaaaggttctcaaggagcacaatgaattagcacatgccaacttttccatcataaggaaggaagctcaagctatcgttgatttggttactaaggatgctttccatggtagtgaagctgggaaagcactttccttttatgttcttgatgcattaattagtattgaccatgaaaagtattttctaaatcaacttcaaagtcgagggatccttagatcatgcctgagtgatgttgcaaactatttgtcaaagggccagtgtttgaatccacaggcacagaggcgggagcagagcctgcgctctccatcattgacctacaaagttttggtactgggcttcactctggtttttggcccatctacagtagcccgccccttcaaaaaccctcccagccaccaggacccctcccagccgccagaaacccgccagaacccttcccagccgccagaaaccctactcctctcctctgtcctctctggtttctgccgacgtctctgctccagcctccaagtgctccagccagcaggtgaagaacaagattgtacgagagatagtggacttcgcaaagcagcatcagtcagtttttaatagcattttaagggagaacatgactggaactaatttgctcacgttggagcagcttagcatggcggtttctattctcagcaaggtttgggcgtatgaggaaaatgaggaatgcagctacattcaagatctattttccttgatgcattctctttttagcgttgactttgggattctaaattttatgcaatcaccaaacatgattgagaatcagaagtcagaattgatagcatttggtctttgcttcagccttgtctcttacctttatgttctcgctacaaggaaaaacatgcgatttcaagtttcatatggccgtaacagtgatcagcagcacccaacactacaaatggtttctgatcttctgaattcagcaacacttgccctagaaagagttggtgaagaaaaatatatgcttttaaacaagatccgtgacttaaatgagttgtccagaaaggaggttgatgagataataaaagtgtgcatgaagcaagattgcatatctcctaacgataacatccgtaaaaggaggtacattgcaatgatagatttgtgttgcatggctggcaaccgagaccaactcattacccttctactccaaataacggaatgtgccgttactattctcctcattcattttcaggacgatgcttctgcaaaaggtctttcttcattttctgatgaactccttcctgtgctggagagactagagcatttgaaagaggacaaagttggacgtagtctgaagttgttccacagatccattactacactaaaggagatgaccatcagaaccataaccatctgaaggccgcagcctgtacaatgtacatgtttattaggatagtacacctcgctagatttgcagatgtaaaacattgttgtgtaagctctcatatatatatatacacacttttgccctgaggcaatgagctgtatgtcatgttttaagagtaaaatgtgatttttgaggggtttccatctaggaacattaacatttaaactgtatttttttggcctataaactttcactggagatattactttttttgttttgcccttagatgtctataggacacaaagcagggagaaaaggatatctataggatggccaagattcgtgaaaggaagacaagggatgtcaaccaagtcaaatgcatcaaggacgaagcaaaccaactattagtgaagagtgaagagatcaagaacagatggaaggagtacttcaacaaattgttcaatggagggaatgagagtgctacaatagaattggacgaaccattcgatgacaacaacaggggttttgtacgaaggatacaagaatatgaagttaaggaggcgctaaaaaggatgaaggtaggaaaggcgatgggccctgatggtatccctatcgaggtatggagatgtcttggagacatagtgatagtatggctgactaagcttttcaacaccatctttcgggcaaacagaatgcccgacgagtggcggcggagtacattagtaccaatcttcaagaacaaaggagatgttcaaagttgtactaattaccgtggaattaagctcatgagccatacaatgaagctatgggagagagtcattgaacaccgcctgcgaaagatgacgagcgtgacccaaaatcagtttggtttcatgcccgggagatcaactatggaggccattttcttactaagacaacttatggagagattcagagaacaaaagaaagacctgcatatggtcttcatagacttggagaaggcttatgacaaagtacctaggagtgtaatgtggtgggccttagaaaaacacaaagtagcaacaaagtacattaatcttattaaagatatgtacactaatgttgtgacaagtgtccgaacaagtgatggagacaccgatgactttccaattaacataggactacatcaagggtcggctttgagcccttatcttttcgctttggtgatagatgaggtcacaagggacatacaaggagttttaccgtggtgtatgctttttgccgatgatgtggtacttattgaggagagtaggagtggtgtttctcaaaagttggaattgtggaggcagacgctggaagcaaaaggttttaggcttagtaggtctaaaacagagtatatgaagtgtgatttcagtgccatggggtatgaggatggcgatgttagtcttgatgggcaagtggtacccaagaaagac

SEQ ID NO: 49800 - DNA, 5126 bp, Zea Mays
gccgcctgcccgtgcgctcactactcactagggttttgaatcccttccgtaccctcccttccgccgactcctagggttccgaccgccgaccgggtttgttctccggcgatggcaccgcttccgccgcgcgagctcctctctgtcatcgaggcggcgctgctgggctccacggcgccatcgccggcgcagcgcgtggagctcctccacgccgtccgcgatgctgcccccgcgttccgcacgttactctcctatccggtgccgaaggcgtcggatcggactcaggtggagagcaaggaagtgcggctaccgggcatgcctcccatcactcttgatgacacagacgtgcggaccgcgcttaagctgagtgatgaactcaatcttaatgagattgagtgtgttcgtttgctagttgatgctaacagagagtgggttctctatgggcgagagccattggaaatatatagactcgcagctggcctttggtacatggagagaagggatcttataaccgctctgtacattctgttgcgatctgttgcacttgaccaaggtcttgatgccgatctgatgtctgaaatcgaggatcaaatccaacctttattcaatgatggtctccgacaacggataattactcttgtaaaggagctgaacagggaagaaccagctggaattggcagtccaagctctgagcgttatgtgcttgatttcagaggggctcttgtggaaagaagggcaattgtctcgagagagagattaagtttgagccactgccttgccctttctgcacttattaaactaacgagccccaaagaggttaaggatgtattttcaatattgaaagactgtgcagctgaagcaaatcaaaatagcagtgtggagctccagatcacctatggacttctgttctttcttgtagcaacttttatttctgatgccctaagtacttctcttgagaaagcatcattgtcatcgtctgattcctcatttagacgtgaatttcatgaacttgtgatgaggacaggtaacaatatgactattgaagggtttgttggtgttgtgcggcttgcatggtctgttcatttgatgctaactcaagatcgaagtaattcaagagaaacgtcagatatttggtcatgcctggaaattatctgtcgtcaaaattcttttgagtttttgcgggagcaagttttgaaaacagctgcataccagaatgatgatgaggacattgtctacatgtacactggctacactcacaagctaatgatgtgctttatttcccacccaacttccagagataagataaaggaaatcaaggagaaagcaatgactgccctcagtccatatgagccaccacgaggtcaacgagaagatcttggtagaaatggggaacaagctgatcagcctactaaggagccttttgtatccctgctggaactggttagagaaatctatcagaaagtgcctgagctagggaatggaaatgaggaattgtggacttttgttatatatgcaggagaagaccacacaaacacacaaactcttgtggcctttcttggacttcttagtactttggcttccactgaagttggtgctgccaaagtctatgagctgctccagggaaaaacttaccgttcagttggttggagcactttgtttgattgcttatctatctatgaggagaagttcaaaaaatcaattcaatcttctgcaaacatactgcctgattttcctgagggggatgcacaagcgcttgttgcatatttagctgttcttcagaaggtggtggaaaatgggaatcttacggaacgcaggaagtggttccctgacattgaacctttattcaagcttctcagctatgaaaatgtgcctccatacttgaagggggctttgcgaaattcaataactgcatttataaaagtgtcacccatactaaaggatgcaatttggaattatcttgagcaatatgatcttccggtggttacagctccattaggtcaccatacagcaacacaggtctatgatatgaggtttgagttgaatgaagtagaagcgagaagggagagttacccctcgaccatatctttcctcaaattgatcaatgcacttattgtggaagaaagaaacataagtgacaaaggccggaggttcatgggtatctttaagtttgtttatgaggatgtctttggtccttttcctcaaagagcttatgctgaccccctggaaaaatgggagcttgctcttgcttgcttggagcattttcgcatggttttgagcatgtatgatataaaggatgatgatatttatgcttctgtgaacacattagctccttcctctcttgagagacaactccctctgctagaactactcaaagatttcatgagtgggaaagttgctttccggaatattatgaacatcatattagtgggtgttgactctattatcaatgagcgaactacccaaacatacggtatcattttggagagaactgtccttctatctcttgaaatatttattcttgtcatggagagagatcttgctcttgctgatgtttttcggccgctctaccagccattggatgttatattggctcaaagtcatagacagattgtagcattgctagagtttgtacgatatgattatcttccccaaattcaacagtgttctatcaaaattatgggcatcctaagttctagaatagttggtttggtacagttgcttttgaaagctgatgttggaaaaatggtaatagaagattatgctgcttgcttggagttccggtttgatgattttcagttgcttgttgacaatatttgtcgtccagctccaaacattacacatttgctcttgggattcgatgtcaatgggtccattgagcaaacagttctaaaaccaaaatctcaatacagttgtttgaagataatcttggacaatcttgaaaaagcgacaaagccggatataaattccttactgcacgaattcagttttcagcttctctatgagttatgtcttgatcctttaacttgcggacctgttatggatctcttgagtacaaagaagtaccagttcttttctaagcatgttggaaccattggagtgacaccgcttccaaaaaggaacagtaaccaatctcttcgaatcagcatgctccatgagagggcatggttgctaaagatgttagcactggcattacatatatccgatatatcatcatctgtatacagggaagcctgcatggctattctttatcatacttttggtcagtgtgctgagaacttccagagcacaagcttgatccattcacatgatgctttgactagcattagcgatgtaccagcaaagaggaacaaggttttggacttgcttgaggttctacagtttagatgtccggatacttcaacgaagtatccacagctgctttccagcttgggaatcgaatcgaagattgaagagatcctaaggaactctgccactttcgaaaatggtggtgtatattattattcagagagaggtgaccgactgattgatcttgatgctttccgtgaaaaacttctccagatttcacaagaattgaactcacaattaaccgagcctgagaaagctggactaaaagaatcagttcatcatttgctcaaatgggcgtggcgatataacaaaaatcttgaagagcaggctgcccaacttcacatgttgactggctggtcacagattgttgaggttgctgtatcaagaaggatgtcattattcgaggactgttctcagctattgtttgaactgcttgatgcttcgttgaatgccacaacatctccagattgttcagtgaaaatggcatatgttttaactaatgtatcgttgacctgtatggcgaaactgcgggatgaaagattcatatgcccagctggtacagattctgatgcggttacttgccttgacattatttcgtcaaagcagctaccaaatgcagcttgtaactcattgttattcaagcttgtgatggcaacattaagaaatgaatcatctgaaatcttgagaagacggcaatatgcattattactgagttattttcagtattgtagcagcattctggactctgatgtccctccatctgttcttcggttcttgctactggaggagcaagatggtgatgatgaggacatcactcttcaaaaggttctcaaggagcacaatgaattagcacatgccaacttttccatcataaggaaggaagctcaagctatcgttgatttggttactaaggatgctttccatggtagtgaagctgggaaagcactttccttttatgttcttgatgcattaattagtattgaccatgaaaagtattttctaaatcaacttcaaagtcgagggatccttagatcatgcctgagtgatgttgcaaactatttgtcaaagggccagtgtttgaatccacaggcacagaggcgggagcagagcctgcgctctccatcattgacctacaaagttttggtactgggcttcactctggtttttggcccatctacagtagcccgccccttcaaaaaccctcccagccaccaggacccctcccagccgccagaaacccgccagaacccttcccagccgccagaaaccctactcctctcctctgtcctctctggtttctgccgacgtctctgctccagcctccaagtgctccagccagcagagaggcagagagcagatcagccgagggggagggggagctcgccgcggaagggggagggggtggagcctcaccagggagcaggggaaggggacttcaccagggagggagaggtcgcgggctcacggtatggggccgccgccgttggtgaactgagagctgccgtcacctggacctcacgtgaagccctaaccgcgtccttctctggtacgtggacagcgaacagaagggtttggggagtggaaaactttacaatccggtccaaggcgtctgcagggcgatgccttgtcttcctatgaggcgctagcgcgacgccctgaaccccaaagtgacacctcagccaagatagtatggtgagcaggaggccttgggcttgagcctcgccttagcgcttaggcgacaccttgataactatgatctgtggtccattactgggtcagttttg

SEQ ID NO: 49801 - DNA, 5049 bp, Zea Mays
cttgtacttattcatttgttttgcttgtcttggtcagctttgttcacagtaaactggatttccatctctgacgatgatggttttggaatcactatattttacctttagcattaccctccactttccatgactatctcatcattctgaaggtggtggaaaatgggaatcttacggaacgcaggaagtggttccctgacattgaacctttattcaagcttctcagctatgaaaatgtgcctccatacttgaagggggctttgcgaaattcaataactgcatttataaaagtgtcacccatactaaaggatgcaatttggaattatcttgagcaatatgatcttccggtggttacagctccattaggtcaccatacagcaacacaggtctatgatatgaggtttgagttgaatgaagtagaagcgagaagggagagttacccctcgaccatatctttcctcaaattgatcaatgcacttattgtggaagaaagaaacataagtgacaaaggccggaggttcatgggtatctttaagtttgtttatgaggatgtctttggtccttttcctcaaagagcttatgctgaccccctggaaaaatgggagcttgctcttgcttgcttggagcattttcgcatggttttgagcatgtatgatataaaggatgatgatatttatgcttctgtgaacacattagctccttcctctcttgagagacaactccctctgctagaactactcaaagatttcatgagtgggaaagttgctttccggaatattatgaacatcatattagtgggtgttgactctattatcaatgagcgaactacccaaacatacggtatcattttggagagaactgtccttctatctcttgaaatatttattcttgtcatggagagagatcttgctcttgctgatgtttttcggccgctctaccagccattggatgttatattggctcaaagtcatagacagattgtagcattgctagagtttgtacgatatgattatcttccccaaattcaacagtgttctatcaaaattatgggcatcctaagttctagaatagttggtttggtacagttgcttttgaaagctgatgttggaaaaatggtaatagaagattatgctgcttgcttggagttccggtttgatgattttcagttgcttgttgacaatatttgtcgtccagctccaaacattacacatttgctcttgggattcgatgtcaatgggtccattgagcaaacagttctaaaaccaaaatctcaatacagttgtttgaagataatcttggacaatcttgaaaaagcgacaaagccggatataaattccttactgcacgaattcagttttcagcttctctatgagttatgtcttgatcctttaacttgcggacctgttatggatctcttgagtacaaagaagtaccagttcttttctaagcatgttggaaccattggagtgacaccgcttccaaaaaggaacagtaaccaatctcttcgaatcagcatgctccatgagggaagcctgcatggctattctttatcatacttttggtcagtgtgctgagaacttccagagcacaagcttgatccattcacatgatgctttgactagcattagcgatgtaccagcaaagaggaacaaggttttggacttgcttgaggttctacagtttagatgtccggatacttcaacgaagtatccacagctgctttccagcttgggaatcgaatcgaagattgaagagatcctaaggaactctgccactttcgaaaatggtggtgtatattattattcagagagaggtgaccgactgattgatcttgatgctttccgtgaaaaacttctccagatttcacaagaattgaactcacaattaaccgagcctgagaaagctggactaaaagaatcagttcatcatttgctcaaatgggcgtggcgatataacaaaaatcttgaagagcaggctgcccaacttcacatgttgactggctggtcacagattgttgaggttgctgtatcaagaaggatgtcattattcgaggactgttctcagctattgtttgaactgcttgatgcttcgttgaatgccacaacatctccagattgttcagtgaaaatggcatatgttttaactaatgtatcgttgacctgtatggcgaaactgcgggatgaaagattcatatgcccagctggtacagattctgatgcggttacttgccttgacattatttcgtcaaagcagctaccaaatgcagcttgtaactcattgttattcaagcttgtgatggcaacattaagaaatgaatcatctgaaatcttgagaagacggcaatatgcattattactgagttattttcagtattgtagcagcattctggactctgatgtccctccatctgttcttcggttcttgctactggaggagcaagatggtgatgatgaggacatcactcttcaaaaggttctcaaggagcacaatgaattagcacatgccaacttttccatcataaggaaggaagctcaagctatcgttgatttggttactaaggatgctttccatggtagtgaagctgggaaagcactttccttttatgttcttgatgcattaattagtattgaccatgaaaagtattttctaaatcaacttcaaagtcgagggatccttagatcatgcctgagtgatgttgcaaactatttgtcaaaggtgaagaacaagattgtacgagagatagtggacttcgcaaagcagcatcagtcagtttttaatagcattttaagggagaacatgactggaactaatttgctcacgttggagcagcttagcatggcggtttctattctcagcaaggtttgctattcacttcatatttgattttggccacctgtaatctgttgtagaggtgctaacaactttttaggtttgggcgtatgaggaaaatgaggaatgcagctacattcaagatctattttccttgatgcattctctttttagcgttgactttgggattctaaattttatgcaatcaccaaacatgattgagaatcagaagtcagaattgatagcatttggtctttgcttcagccttgtctcttacctttatgttctcgctacaaggaaaaacatgcgatttcaagtttcatatggccgtaacagtgatcagcagcacccaacactacaaatggtttctgatcttctgaattcagcaacacttgccctagaaagagttggtgaagaaaaatatatgcttttaaacaagatccgtgacttaaatgagttgtccagaaaggaggttgatgagataataaaagtgtgcatgaagcaagattgcatatctcctaacgataacatccgtaaaaggaggtacattgcaatgatagatttgtgttgcatggctggcaaccgagaccaactcattacccttctactccaaataacggaatgtgccgttactattctcctcattcattttcaggacgatgcttctgcaaaaggtctttcttcattttctgatgaactccttcctgtgctggagagactagagcatttgaaagaggacaaagttggacgtagtctgaagttgttccacagatccattactacactaaaggagatgaccatcagaaccataaccatctgaaggccgcagcctgtacaatgtacatgtttattaggatagtacacctcgctagatttgcagatgtaaaacattgttgtgtaagctctcatatatatatatacacacttttgccctgaggcaatgagctgtatgtcatgttttaagagtaaaatgtgatttttgaggggtttccatctaggaacattaacatttaaactgtatttttttggcctataaactttcactggagatattactttttttgttttgcccttagatgtctataggacacaaagcagggagaaaaggatatctataggatggccaagattcgtgaaaggaagacaagggatgtcaaccaagtcaaatgcatcaaggacgaagcaaaccaactattagtgaagagtgaagagatcaagaacagatggaaggagtacttcaacaaattgttcaatggagggaatgagagtgctacaatagaattggacgaaccattcgatgacaacaacaggggttttgtacgaaggatacaagaatatgaagttaaggaggcgctaaaaaggatgaaggtaggaaaggcgatgggccctgatggtatccctatcgaggtatggagatgtcttggagacatagtgatagtatggctgactaagcttttcaacaccatctttcgggcaaacagaatgcccgacgagtggcggcggagtacattagtaccaatcttcaagaacaaaggagatgttcaaagttgtactaattaccgtggaattaagctcatgagccatacaatgaagctatgggagagagtcattgaacaccgcctgcgaaagatgacgagcgtgacccaaaatcagtttggtttcatgcccgggagatcaactatggaggccattttcttactaagacaacttatggagagattcagagaacaaaagaaagacctgcatatggtcttcatagacttggagaaggcttatgacaaagtacctaggagtgtaatgtggtgggccttagaaaaacacaaagtagcaacaaagtacattaatcttattaaagatatgtacactaatgttgtgacaagtgtccgaacaagtgatggagacaccgatgactttccaattaacataggactacatcaagggtcggctttgagcccttatcttttcgctttggtgatagatgaggtcacaagggacatacaaggagttttaccgtggtgtatgctttttgccgatgatgtggtacttattgaggagagtaggagtggtgtttctcaaaagttggaattgtggaggcagacgctggaagcaaaaggttttaggcttagtaggtctaaaacagagtatatgaagtgtgatttcagtgccatggggtatgaggatggcgatgttagtcttgatgggcaagtggtacccaagaaagac

SEQ ID NO: 49802 - DNA, 5545 bp, Zea Mays
attcatttgttttgcttgtcttggtcagctttgttcacagtaaactggatttccatctctgacgatgatggttttggaatcactatattttacctttagcattaccctccactttccatgactatctcatcattctgaaggtggtggaaaatgggaatcttacggaacgcaggaagtggttccctgacattgaacctttattcaagcttctcagctatgaaaatgtgcctccatacttgaagggggctttgcgaaattcaataactgcatttataaaagtgtcacccatactaaaggatgcaatttggaattatcttgagcaatatgatcttccggtggttacagctccattaggtcaccatacagcaacacaggtctatgatatgaggtttgagttgaatgaagtagaagcgagaagggagagttacccctcgaccatatctttcctcaaattgatcaatgcacttattgtggaagaaagaaacataagtgacaaaggccggaggttcatgggtatctttaagtttgtttatgaggatgtctttggtccttttcctcaaagagcttatgctgaccccctggaaaaatgggagcttgctcttgcttgcttggagcattttcgcatggttttgagcatgtatgatataaaggatgatgatatttatgcttctgtgaacacattagctccttcctctcttgagagacaactccctctgctagaactactcaaagatttcatgagtgggaaagttgctttccggaatattatgaacatcatattagtgggtgttgactctattatcaatgagcgaactacccaaacatacggtatcattttggagagaactgtccttctatctcttgaaatatttattcttgtcatggagagagatcttgctcttgctgatgtttttcggccgctctaccagccattggatgttatattggctcaaagtcatagacagattgtagcattgctagagtttgtacgatatgattatcttccccaaattcaacagtgttctatcaaaattatgggcatcctaagttctagaatagttggtttggtacagttgcttttgaaagctgatgttggaaaaatggtaatagaagattatgctgcttgcttggagttccggtttgatgattttcagttgcttgttgacaatatttgtcgtccagctccaaacattacacatttgctcttgggattcgatgtcaatgggtccattgagcaaacagttctaaaaccaaaatctcaatacagttgtttgaagataatcttggacaatcttgaaaaagcgacaaagccggatataaattccttactgcacgaattcagttttcagcttctctatgagttatgtcttgatcctttaacttgcggacctgttatggatctcttgagtacaaagaagtaccagttcttttctaagcatgttggaaccattggagtgacaccgcttccaaaaaggaacagtaaccaatctcttcgaatcagcatgctccatgagagggcatggttgctaaagatgttagcactggcattacatatatccgatatatcatcatctgtatacagggaagcctgcatggctattctttatcatacttttggtcagtgtgctgagaacttccagagcacaagcttgatccattcacatgatgctttgactagcattagcgatgtaccagcaaagaggaacaaggttttggacttgcttgaggttctacagtttagatgtccggatacttcaacgaagtatccacagctgctttccagcttgggaatcgaatcgaagattgaagagatcctaaggaactctgccactttcgaaaatggtggtgtatattattattcagagagaggtgaccgactgattgatcttgatgctttccgtgaaaaacttctccagatttcacaagaattgaactcacaattaaccgagcctgagaaagctggactaaaagaatcagttcatcatttgctcaaatgggcgtggcgatataacaaaaatcttgaagagcaggctgcccaacttcacatgttgactggctggtcacagattgttgaggttgctgtatcaagaaggatgtcattattcgaggactgttctcagctattgtttgaactgcttgatgcttcgttgaatgccacaacatctccagattgttcagtgaaaatggcatatgttttaactaatgtatcgttgacctgtatggcgaaactgcgggatgaaagattcatatgcccagctggtacagattctgatgcggttacttgccttgacattatttcgtcaaagcagctaccaaatgcagcttgtaactcattgttattcaagcttgtgatggcaacattaagaaatgaatcatctgaaatcttgagaagacggcaatatgcattattactgagttattttcagtattgtagcagcattctggactctgatgtccctccatctgttcttcggttcttgctactggaggagcaagatggtgatgatgaggacatcactcttcaaaaggttctcaaggagcacaatgaattagcacatgccaacttttccatcataaggaaggaagctcaagctatcgttgatttggttactaaggatgctttccatggtagtgaagctgggaaagcactttccttttatgttcttgatgcattaattagtattgaccatgaaaagtattttctaaatcaacttcaaagtcgagggatccttagatcatgcctgagtgatgttgcaaactatttgtcaaagggccagtgtttgaatccacaggcacagaggcgggagcagagcctgcgctctccatcattgacctacaaagttttggtactgggcttcactctggtttttggcccatctacagtagcccgccccttcaaaaaccctcccagccaccaggacccctcccagccgccagaaacccgccagaacccttcccagccgccagaaaccctactcctctcctctgtcctctctggtttctgccgacgtctctgctccagcctccaagtgctccagccagcagagaggcagagagcagatcagccgagggggagggggagctcgccgcggaagggggagggggtggagcctcaccagggagcaggggaaggggacttcaccagggagggagaggtcgcgggctcacggtatggggccgccgccgttggtgaactgagagctgccgtcacctggacctcacgtgaagccctaaccgcgtccttctctggaatcacatcaccgttgttaccttgtttggtgaagaacaagattgtacgagagatagtggacttcgcaaagcagcatcagtcagtttttaatagcattttaagggagaacatgactggaactaatttgctcacgttggagcagcttagcatggcggtttctattctcagcaaggtttgggcgtatgaggaaaatgaggaatgcagctacattcaagatctattttccttgatgcattctctttttagcgttgactttgggattctaaattttatgcaatcaccaaacatgattgagaatcagaagtcagaattgatagcatttggtctttgcttcagccttgtctcttacctttatgttctcgctacaaggaaaaacatgcgatttcaagtttcatatggccgtaacagtgatcagcagcacccaacactacaaatggtttctgatcttctgaattcagcaacacttgccctagaaagagttggtgaagaaaaatatatgcttttaaacaagatccgtgacttaaatgagttgtccagaaaggaggttgatgagataataaaagtgtgcatgaagcaagattgcatatctcctaacgataacatccgtaaaaggaggtacattgcaatgatagatttgtgttgcatggctggcaaccgagaccaactcattacccttctactccaaataacggaatgtgccgttactattctcctcattcattttcaggacgatgcttctgcaaaaggtctttcttcattttctgatgaactccttcctgtgctggagagactagagcatttgaaagaggacaaagttggacgtagtctgaagttgttccacagatccattactacactaaaggagatgaccatcagaaccataaccatctgaaggccgcagcctgtacaatgtacatgtttattaggatagtacacctcgctagatttgcagatgtaaaacattgttgtgtaagctctcatatatatatatacacacttttgccctgaggcaatgagctgtatgtcatgttttaagagtaaaatgtgatttttgaggggtttccatctaggaacattaacatttaaactgtatttttttggcctataaactttcactggagatattactttttttgttttgcccttagatgtctataggacacaaagcagggagaaaaggatatctataggatggccaagattcgtgaaaggaagacaagggatgtcaaccaagtcaaatgcatcaaggacgaagcaaaccaactattagtgaagagtgaagagatcaagaacagatggaaggagtacttcaacaaattgttcaatggagggaatgagagtgctacaatagaattggacgaaccattcgatgacaacaacaggggttttgtacgaaggatacaagaatatgaagttaaggaggcgctaaaaaggatgaaggtaggaaaggcgatgggccctgatggtatccctatcgaggtatggagatgtcttggagacatagtgatagtatggctgactaagcttttcaacaccatctttcgggcaaacagaatgcccgacgagtggcggcggagtacattagtaccaatcttcaagaacaaaggagatgttcaaagttgtactaattaccgtggaattaagctcatgagccatacaatgaagctatgggagagagtcattgaacaccgcctgcgaaagatgacgagcgtgacccaaaatcagtttggtttcatgcccgggagatcaactatggaggccattttcttactaagacaacttatggagagattcagagaacaaaagaaagacctgcatatggtcttcatagacttggagaaggcttatgacaaagtacctaggagtgtaatgtggtgggccttagaaaaacacaaagtagcaacaaagtacattaatcttattaaagatatgtacactaatgttgtgacaagtgtccgaacaagtgatggagacaccgatgactttccaattaacataggactacatcaagggtcggctttgagcccttatcttttcgctttggtgatagatgaggtcacaagggacatacaaggagttttaccgtggtgtatgctttttgccgatgatgtggtacttattgaggagagtaggagtggtgtttctcaaaagttggaattgtggaggcagacgctggaagcaaaaggttttaggcttagtaggtctaaaacagagtatatgaagtgtgatttcagtgccatggggtatgaggatggcgatgttagtcttgatgggcaagtggtacccaagaaagac

SEQ ID NO: 49803 - DNA, 4720 bp, Zea Mays
cttacttaccttagttagttcatcggttctttgtaggttcgcgcgctcacgagtcacgtctagggtttggcggccaagggtcgtgacactacctttctgcctgcttgaagtggagtcgttgattggccttcatctagctcccgccagcgccctacgcgggaaatcgcagccgacaggcaaacgcctcgggaatcagctgtgccccgcgcctcgtgggccaccaggagctgttgctgcccccggtgtctccgccctcaacttccaaaccctaggggcggtagaggctccaaactcgggcgctttggccgtgaccgtccgagttgactagtgccttttcttttcttcctggactgaatggagcaaggggagaaccaatcagctgatagttttgttgtttcatcatcggataataatgagctggaagatttacctgtgaaggaaagatgctttgagcagagagaagctcttcctggggagcctcgctgtgttgtgtgtggccgatatggtgaatatatatgtgatcagactgatgatgacatctgcagtgtggaatgtaagacaatccttctttctcggatagttgctaaaacaaagccagcagtaaaagcagcaaagcgtgtgaaccttcctttaggcgatgagagcttttgtattaaggacatcaattttccaaatatacttactttagctgacagccggatcagttcactgaggagtaaacttgacatttgtgtcaagggtgatgctgttcctgatccaatcatgtgtttctctgcctgtggtcttcctgagaagcttgtgcacaatctcgagactgcgggatattgcatgcctactccagtgcagatgcaagtcatccctgcatcaatgagtaatagaagtttacttgtttctgctgatactggttcagggaaaactgcatcttttctaattcccataattgctcattgttcacgattaagatcacaagaatgcacaggcaatcaaggaccgttggctatagttcttgctccaacaagagagctatgcctgcaggtagaagagcaagcaaaggtgcttggtaaaggtttgcctttcaaaactgctctaattgtcggcggagatccattgcctcaacaaatttacagaattgaaaatggtgttgagttaattgttggcacccctgggaggctaattgatcttctcatgaaacacaatgttgaccttacctatgtttctgtattcgttttggatgaggtggactgcctgctggagaggggattcagggatcaggccatgcagatttttcagtcactttcacacccacaggttatgatgttttcagcaacaatacattcagaagttgagaagatgtctaactcactggctaataatgtgataagtatctcttgtgggaacccaaacagaccaaacaaattagttaaacaagtagtcatttgggtggagtctaagaagaagaagcagaagatttttgagataatgaaaagcaagcaacattttaaacctcctgctgttgtgtttgtgagttccagggttggagctgatctgttgtctgaagcaattactgttgctactggattagaggttgtttctatccatggtgagaaaacgatgattgagagaagagagaatttgcgaaggtttttaacaggagaagtatctgtcgttgtttctactggcgtcctggggcgtggaatggatcttctgaaagtacgtcaagtgatattgtttgatttaccaaattccattgatgaatatattcaccaagttggaagggcatcccggatgggtgaggagggtatggctgttgtgtttgtgaatgaggaggatagaaggattttcaaagagcttgttcaggttctgaagactgcaggagcaccgataccccgtgaaattgcaaattcaagatacacagctggtgtttatgttggtagcgagaggaagagaaagttgagctctaggtttgggagaattaacgtgtttttggaaaggttactagcaatagttttgagtgcaaaaagaagattcagtggaataacaaattagcaggggtttgcactgtcatgtttgcatgccagctaagatacaagttgttacttgttaggggtagctcaatgccaagaattgctgatcatgagtttactactactgtggtggatgaatcaccactatgcaagttattttcactaatgtatctgattggatggctgccttttcggtcataatggcatgtgatgggcacatgaaggcctcaattttggtatgatgatgaagcgaccttggtcatctccgtttgagggtgaagctgggctgctgctgctcagcaactcttcgatcatttgcagtgcgatcctctcctcctcatccatcggcgtggctggtggagcagttgttgctgatgtggactgtgatgcagcatcagtggatgctgcatctttgttgagctccactgtcatgacccagttggagtcagcacgggctcctgcacgcttctgccaaacaccaatgtgggacttctcagggtcaaggcggagacaggtcagggacggtgatggcgccttgcagcatttgcggagcttcgcactgagaatctgggacaggttggtggtagaggagccgctgctgaagttgctgcgggcgtcccttcccgcagctggggtaggctcccctgtgctgcttctttggattgggaagttggtcttggcgttgcgtccgctcatcagcacagcagcctcatcatatgctctcgctgcctcctcagccgtctcaaagagctactggggccaatcatattgttgagtatcactggaagcgtggacactgcggcaaagcatataggtaagacttgtgctgaaacttagggtgttggaatatttactgcatatttttgagataacgtcaaaattcttttgcttcatttggaatctctagtcgtgttccgtcacccaattttttctctataaatatgtaatgggatgttgaaatttacagtgaattgttcttgaactgaatatagattgtgtgtttagagtgatttcagtgcgacctgtgtatgagaattgacaagggtgcctttgtcctggggtgttagttctggaattgcttggagatggttggcatttaagcttgtctgaggtagctgcaggtacagactggtgatgatgatggtgtgtgctcagttgatggatacttgttcaatgaagaaatataaaagttttttttttctgtcacttataatatgggagtagactgaactgttgttcagtggagaatttgatagtatgtttacattttggcttcgctatattctcacaatagaaatcaggttgcaaaatggttatgaagttaggctataataatctgtctacacgtaacttcatttcttctccattgaacatctcgtgtgcttcggtttgtagaaaatttcatttcatttcacttgaacttggctttctttcgttaacctctgaaactatccacaagacggtagctctaaaggtttatggtagtctgcttcagcaataagcttactcttgtcttaggatgacaaatgtttatagtaagatcagatccttcgctgtatccaaacattctaataattttgggttctttgaaagggagctggagtctttgctgaaaatgtttggttgcagattacgactttgcacacttaaatgttgtgttccctctcccacaactttcccgtttgggtgctttccagaaaaaaaaactgttgccattttgtttggaagtatcagtttgcacgcattgtttggatgtgaagtatcttaatggttttgactggggtttttcagcaagtcacaccttggaatatctttcacagccgtgcttttttagaaagggagaaaaagaaaaaaaaaatcagttacgggtgagctcgtggtcatgccgtgcgctcgtatttctaagccgagccatttgcatgaatgaggtgctaggctttcctgtgataccaaaatgaagcgtcggtctgcaataaatcggtaagctgtgggtcatatttttaccaggcgagcaactgcccccgttgctacagaagttaagctgtgtaaaataaaaaggtgaaataaattgattgagtctgttgcccttgtcgagttaattaatgagaaacaggtacctgcagtacatctacggtggggatgtcatgtgtcagtcgatcacctctgactggagcataagaaggttctgtgagatcttgtcctctgacactgtctggtacgtacacccttttctcacgcattgtgcacaggtgtatctttaaaaattgccggtggagtcaaaagaaaataggagcatgcagtgcactgtattttatttggatttgaagcccctgcatgtttggcagcagttatctgttcctcagctcctgtaacctgaggcgcatctcggagtccgaattattatttttaatcatcacctacgttagaaatgaatctgtttgatgttgcctaggcgcagtggacagagaggtaaggttctttttgggaccatatatatgactaagctggtctccccaaatcattcccggcaaaatcatggaccttagcgaggaaccggaagctgcttggttttctttctttctttcttttatgtatatgtttgtattctgtatagattattaatccgctcaaagcggcaaaccgacatgcatggtatagtaaaatatgaatatactagtactatagataagttccag

SEQ ID NO: 49804 - DNA, 4915 bp, Zea Mays
cttagttagttcatcggttctttgtaggttcgcgcgctcacgagtcacgtctagggtttggcggccaagggtcgtgacactacctttctgcctgcttgaagtggagtcgttgattggccttcatctagctcccgccagcgccctacgcgggaaatcgcagccgacaggcaaacgcctcgggaatcagctgtgccccgcgcctcgtgggccaccaggagctgttgctgcccccggtgtctccgccctcaacttccaaaccctaggggcggtagaggctccaaactcgggcgctttggccgtgaccgtccgagttgactagtgccttttcttttcttcctggactgaatggagcaaggggagaaccaatcagctgatagttttgttgtttcatcatcggataataatgagctggaagatttacctgtgaaggaaagatgctttgagcagagagaagctcttcctggggagcctcgctgtgttgtgtgtggccgatatggtgaatatatatgtgatcagactgatgatgacatctgcagtgtggaatgtaagacaatccttctttctcggatagttgctaaaacaaagccagcagtaaaagcagcaaagcgtgtgaaccttcctttaggcgatgagagcttttgtattaaggacatcaattttccaaatatacttactttagctgacagccggatcagttcactgaggagtaaacttgacatttgtgtcaagggtgatgctgttcctgatccaatcatgtgtttctctgcctgtggtcttcctgagaagcttgtgcacaatctcgagactgcgggatattgcatgcctactccagtgcagatgcaagtcatccctgcatcaatgagtaatagaagtttacttgtttctgctgatactggttcagggaaaactgcatcttttctaattcccataattgctcattgttcacgattaagatcacaagaatgcacaggcaatcaaggaccgttggctatagttcttgctccaacaagagagctatgcctgcaggtagaagagcaagcaaaggtgcttggtaaaggtttgcctttcaaaactgctctaattgtcggcggagatccattgcctcaacaaatttacagaattgaaaatggtgttgagttaattgttggcacccctgggaggctaattgatcttctcatgaaacacaatgttgaccttacctatgtttctgtattcgttttggatgaggtggactgcctgctggagaggggattcagggatcaggccatgcagatttttcagtcactttcacacccacaggttatgatgttttcagcaacaatacattcagaagttgagaagatgtctaactcactggctaataatgtgataagtatctcttgtgggaacccaaacagaccaaacaaattagttaaacaagtagtcatttgggtggagtctaagaagaagaagcagaagatttttgagataatgaaaagcaagcaacattttaaacctcctgctgttgtgtttgtgagttccagggttggagctgatctgttgtctgaagcaattactgttgctactggattagaggttgtttctatccatggtgagaaaacgatgattgagagaagagagaatttgcgaaggtttttaacaggagaagtatctgtcgttgtttctactggcgtcctggggcgtggaatggatcttctgaaagtacgtcaagtgatattgtttgatttaccaaattccattgatgaatatattcaccaagttggaagggcatcccggatgggtgaggagggtatggctgttgtgtttgtgaatgaggaggatagaaggattttcaaagagcttgttcaggttctgaagactgcaggagcaccgataccccgtgaaattgcaaattcaagatacacagctggtgtttatgttggtagcgagaggaagagaaagttgagctctaggtctcgttcttgaccaacatgtgtgaaagagttgctctatctttcttgaaatgaaatatgatgtttttgcatgtttttctgagactgtcttgtcaattcgtttgaagatctgtctatttagtatctacctaaaggataatttggttatctctagagttcatactattcctgaatttcaatcatgcacagacccaacaggggcaaacagtccatgattatttctcaatgtgtgatgtctgagatcaatacattggaaaaacataaacaagattcattgcttgtaaattttaacaaaatgggtttgcactgtcatgtttgcatgccagctaagatacaagttgttacttgttaggggtagctcaatgccaagaattgctgatcatgagtttactactactgtggtggatgaatcaccactatgcaagttattttcactaatgtatctgattggatggctgccttttcggtcataatggcatgtgatgggcacatgaaggcctcaattttgatgatgaagcgaccttggtcatctccgtttgagggtgaagctgggctgctgctgctcagcaactcttcgatcatttgcagtgcgatcctctcctcctcatccatcggcgtggctggtggagcagttgttgctgatgtggactgtgatgcagcatcagtggatgctgcatctttgttgagctccactgtcatgacccagttggagtcagcacgggctcctgcacgcttctgccaaacaccaatgtgggacttctcagggtcaaggcggagacaggtcagggacggtgatggcgccttgcagcatttgcggagcttcgcactgagaatctgggacaggttggtggtagaggagccgctgctgaagttgctgcgggcgtcccttcccgcagctggggtaggctcccctgtgctgcttctttggattgggaagttggtcttggcgttgcgtccgctcatcagcacagcagcctcatcatatgctctcgctgcctcctcagccgtctcaaagagctactggggccaatcatattgttgagtatcactggaagcgtggacactgcggcaaagcatataggtaagacttgtgctgaaacttagggtgttggaatatttactgcatatttttgagataacgtcaaaattcttttgcttcatttggaatctctagtcgtgttccgtcacccaattttttctctataaatatgtaatgggatgttgaaatttacagtgaattgttcttgaactgaatatagattgtgtgtttagagtgatttcagtgcgacctgtgtatgagaattgacaagggtgcctttgtcctggggtgttagttctggaattgcttggagatggttggcatttaagcttgtctgaggtagctgcaggtacagactggtgatgatgatggtgtgtgctcagttgatggatacttgttcaatgaagaaatataaaagttttttttttctgtcacttataatatgggagtagactgaactgttgttcagtggagaatttgatagtatgtttacattttggcttcgctatattctcacaatagaaatcaggttgcaaaatggttatgaagttaggctataataatctgtctacacgtaacttcatttcttctccattgaacatctcgtgtgcttcggtttgtagaaaatttcatttcatttcacttgaacttggctttctttcgttaacctctgaaactatccacaagacggtagctctaaaggtttatggtagtctgcttcagcaataagcttactcttgtcttaggatgacaaatgtttatagtaagatcagatccttcgctgtatccaaacattctaataattttgggttctttgaaagggagctggagtctttgctgaaaatgtttggttgcagattacgactttgcacacttaaatgttgtgttccctctcccacaactttcccgtttgggtgctttccagaaaaaaaaactgttgccattttgtttggaagtatcagtttgcacgcattgtttggatgtgaagtatcttaatggttttgactggggtttttcagcaagtcacaccttggaatatctttcacagccgtgcttttttagaaagggagaaaaagaaaaaaaaaatcagttacgggtgagctcgtggtcatgccgtgcgctcgtatttctaagccgagccatttgcatgaatgaggtgctaggctttcctgtgataccaaaatgaagcgtcggtctgcaataaatcggtaagctgtgggtcatatttttaccaggcgagcaactgcccccgttgctacagaagttaagctgtgtaaaataaaaaggtgaaataaattgattgagtctgttgcccttgtcgagttaattaatgagaaacaggtacctgcagtacatctacggtggggatgtcatgtgtcagtcgatcacctctgactggagcataagaaggttctgtgagatcttgtcctctgacactgtctggtacgtacacccttttctcacgcattgtgcacaggtgtatctttaaaaattgccggtggagtcaaaagaaaataggagcatgcagtgcactgtattttatttggatttgaagcccctgcatgtttggcagcagttatctgttcctcagctcctgtaacctgaggcgcatctcggagtccgaattattatttttaatcatcacctacgttagaaatgaatctgtttgatgttgcctaggcgcagtggacagagaggtaaggttctttttgggaccatatatatgactaagctggtctccccaaatcattcccggcaaaatcatggaccttagcgaggaaccggaagctgcttggttttctttctttctttcttttatgtatatgtttgtattctgtatagattattaatccgctcaaagcggcaaaccgacatgcatggtatagtaaaatatgaatatactagtactatagataagttccag

SEQ ID NO: 49805 - DNA, 2369 bp, Zea Mays
agttagttcatcggttctttgtaggttcgcgcgctcacgagtcacgtctagggtttggcggccaagggtcgtgacactacctttctgcctgcttgaagtggagtcgttgattggccttcatctagctcccgccagcgccctacgcgggaaatcgcagccgacaggcaaacgcctcgggaatcagctgtgccccgcgcctcgtgggccaccaggagctgttgctgcccccggtgtctccgccctcaacttccaaaccctaggggcggtagaggctccaaactcgggcgctttggccgtgaccgtccgaggtgggcgtcattgcgagttggtgacccacgggttgcggttgactagtgccttttcttttcttcctggactgaatggagcaaggggagaaccaatcagctgatagttttgttgtttcatcatcggataataatgagctggaagatttacctgtgaaggaaagatgctttgagcagagagaagctcttcctggggagcctcgctgtgttgtgtgtggccgatatggtgaatatatatgtgatcagactgatgatgacatctgcagtgtggaatgtaagacaatccttctttctcggatagttgctaaaacaaagccagcagtaaaagcagcaaagcgtgtgaaccttcctttaggcgatgagagcttttgtattaaggacatcaattttccaaatatacttactttagctgacagccggatcagttcactgaggagtaaacttgacatttgtgtcaagggtgatgctgttcctgatccaatcatgtgtttctctgcctgtggtcttcctgagaagcttgtgcacaatctcgagactgcgggatattgcatgcctactccagtgcagatgcaagtcatccctgcatcaatgagtaatagaagtttacttgtttctgctgatactggttcagggaaaactgcatcttttctaattcccataattgctcattgttcacgattaagatcacaagaatgcacaggcaatcaaggaccgttggctatagttcttgctccaacaagagagctatgcctgcaggtagaagagcaagcaaaggtgcttggtaaaggtttgcctttcaaaactgctctaattgtcggcggagatccattgcctcaacaaatttacagaattgaaaatggtgttgagttaattgttggcacccctgggaggctaattgatcttctcatgaaacacaatgttgaccttacctatgtttctgtattcgttttggatgaggtggactgcctgctggagaggggattcagggatcaggccatgcagatttttcagtcactttcacacccacaggttatgatgttttcagcaacaatacattcagaagttgagaagatgtctaactcactggctaataatgtgataagtatctcttgtgggaacccaaacagaccaaacaaattagttaaacaagtagtcatttgggtggagtctaagaagaagaagcagaagatttttgagataatgaaaagcaagcaacattttaaacctcctgctgttgtgtttgtgagttccagggttggagctgatctgttgtctgaagcaattactgttgctactggattagaggttgtttctatccatggtgagaaaacgatgattgagagaagagagaatttgcgaaggtttttaacaggagaagtatctgtcgttgtttctactggcgtcctggggcgtggaatggatcttctgaaagtacgtcaagtgatattgtttgatttaccaaattccattgatgaatatattcaccaagttggaagggcatcccggatgggtgaggagggtatggctgttgtgtttgtgaatgaggaggatagaaggattttcaaagagcttgttcaggttctgaagactgcaggagcaccgataccccgtgaaattgcaaattcaagatacacagctggtgtttatgttggtagcgagaggaagagaaagttgagctctaggtctcgttcttgaccaacatgtgtgaaagagttgctctatctttcttgaaatgaaatatgatgtttttgcatgtttttctgagactgtcttgtcaattcgtttgaagatctgtctatttagtatctacctaaaggataatttggttatctctagagttcatactattcctgaatttcaatcatgcacagacccaacaggggcaaacagtccatgattatttctcaatgtgtgatgtctgagatcaatacattggaaaaacataaacaagattcattgcttgtaaattttaacaaaatgtttgggagaattaacgtgtttttggaaaggttactagcaatagttttgagtgcaaaaagaagattcagtggaataacaaattag

SEQ ID NO: 49806 - DNA, 2036 bp, Zea Mays
agttagttcatcggttctttgtaggttcgcgcgctcacgagtcacgtctagggtttggcggccaagggtcgtgacactacctttctgcctgcttgaagtggagtcgttgattggccttcatctagctcccgccagcgccctacgcgggaaatcgcagccgacaggcaaacgcctcgggaatcagctgtgccccgcgcctcgtgggccaccaggagctgttgctgcccccggtgtctccgccctcaacttccaaaccctaggggcggtagaggctccaaactcgggcgctttggccgtgaccgtccgagttgactagtgccttttcttttcttcctggactgaatggagcaaggggagaaccaatcagctgatagttttgttgtttcatcatcggataataatgagctggaagatttacctgtgaaggaaagatgctttgagcagagagaagctcttcctggggagcctcgctgtgttgtgtgtggccgatatggtgaatatatatgtgatcagactgatgatgacatctgcagtgtggaatgtaagacaatccttctttctcggatagttgctaaaacaaagccagcagtaaaagcagcaaagcgtgtgaaccttcctttaggcgatgagagcttttgtattaaggacatcaattttccaaatatacttactttagctgacagccggatcagttcactgaggagtaaacttgacatttgtgtcaagggtgatgctgttcctgatccaatcatgtgtttctctgcctgtggtcttcctgagaagcttgtgcacaatctcgagactgcgggatattgcatgcctactccagtgcagatgcaagtcatccctgcatcaatgagtaatagaagtttacttgtttctgctgatactggttcagggaaaactgcatcttttctaattcccataattgctcattgttcacgattaagatcacaagaatgcacaggcaatcaaggaccgttggctatagttcttgctccaacaagagagctatgcctgcaggtagaagagcaagcaaaggtgcttggtaaaggtttgcctttcaaaactgctctaattgtcggcggagatccattgcctcaacaaatttacagaattgaaaatggtgttgagttaattgttggcacccctgggaggctaattgatcttctcatgaaacacaatgttgaccttacctatgtttctgtattcgttttggatgaggtggactgcctgctggagaggggattcagggatcaggccatgcagatttttcagtcactttcacacccacaggttatgatgttttcagcaacaatacattcagaagttgagaagatgtctaactcactggctaataatgtgataagtatctcttgtgggaacccaaacagaccaaacaaattagttaaacaagtagtcatttgggtggagtctaagaagaagaagcagaagatttttgagataatgaaaagcaagcaacattttaaacctcctgctgttgtgtttgtgagttccagggttggagctgatctgttgtctgaagcaattactgttgctactggattagaggttgtttctatccatggtgagaaaacgatgattgagagaagagagaatttgcgaaggtttttaacaggagaagtatctgtcgttgtttctactggcgtcctggggcgtggaatggatcttctgaaagtacgtcaagtgatattgtttgatttaccaaattccattgatgaatatattcaccaagttggaagggcatcccggatgggtgaggagggtatggctgttgtgtttgtgaatgaggaggatagaaggattttcaaagagcttgttcaggttctgaagactgcaggagcaccgataccccgtgaaattgcaaattcaagatacacagctggtgtttatgttggtagcgagaggaagagaaagttgagctctaggtgtttgggagaattaacgtgtttttggaaaggttactagcaatagttttgagtgcaaaaagaagattcagtggaataacaaattag

SEQ ID NO: 49807 - DNA, 2076 bp, Zea Mays
agttagttcatcggttctttgtaggttcgcgcgctcacgagtcacgtctagggtttggcggccaagggtcgtgacactacctttctgcctgcttgaagtggagtcgttgattggccttcatctagctcccgccagcgccctacgcgggaaatcgcagccgacaggcaaacgcctcgggaatcagctgtgccccgcgcctcgtgggccaccaggagctgttgctgcccccggtgtctccgccctcaacttccaaaccctaggggcggtagaggctccaaactcgggcgctttggccgtgaccgtccgaggtgggcgtcattgcgagttggtgacccacgggttgcggttgactagtgccttttcttttcttcctggactgaatggagcaaggggagaaccaatcagctgatagttttgttgtttcatcatcggataataatgagctggaagatttacctgtgaaggaaagatgctttgagcagagagaagctcttcctggggagcctcgctgtgttgtgtgtggccgatatggtgaatatatatgtgatcagactgatgatgacatctgcagtgtggaatgtaagacaatccttctttctcggatagttgctaaaacaaagccagcagtaaaagcagcaaagcgtgtgaaccttcctttaggcgatgagagcttttgtattaaggacatcaattttccaaatatacttactttagctgacagccggatcagttcactgaggagtaaacttgacatttgtgtcaagggtgatgctgttcctgatccaatcatgtgtttctctgcctgtggtcttcctgagaagcttgtgcacaatctcgagactgcgggatattgcatgcctactccagtgcagatgcaagtcatccctgcatcaatgagtaatagaagtttacttgtttctgctgatactggttcagggaaaactgcatcttttctaattcccataattgctcattgttcacgattaagatcacaagaatgcacaggcaatcaaggaccgttggctatagttcttgctccaacaagagagctatgcctgcaggtagaagagcaagcaaaggtgcttggtaaaggtttgcctttcaaaactgctctaattgtcggcggagatccattgcctcaacaaatttacagaattgaaaatggtgttgagttaattgttggcacccctgggaggctaattgatcttctcatgaaacacaatgttgaccttacctatgtttctgtattcgttttggatgaggtggactgcctgctggagaggggattcagggatcaggccatgcagatttttcagtcactttcacacccacaggttatgatgttttcagcaacaatacattcagaagttgagaagatgtctaactcactggctaataatgtgataagtatctcttgtgggaacccaaacagaccaaacaaattagttaaacaagtagtcatttgggtggagtctaagaagaagaagcagaagatttttgagataatgaaaagcaagcaacattttaaacctcctgctgttgtgtttgtgagttccagggttggagctgatctgttgtctgaagcaattactgttgctactggattagaggttgtttctatccatggtgagaaaacgatgattgagagaagagagaatttgcgaaggtttttaacaggagaagtatctgtcgttgtttctactggcgtcctggggcgtggaatggatcttctgaaagtacgtcaagtgatattgtttgatttaccaaattccattgatgaatatattcaccaagttggaagggcatcccggatgggtgaggagggtatggctgttgtgtttgtgaatgaggaggatagaaggattttcaaagagcttgttcaggttctgaagactgcaggagcaccgataccccgtgaaattgcaaattcaagatacacagctggtgtttatgttggtagcgagaggaagagaaagttgagctctaggtctgtttgggagaattaacgtgtttttggaaaggttactagcaatagttttgagtgcaaaaagaagattcagtggaataacaaattag

SEQ ID NO: 49808 - DNA, 2372 bp, Zea Mays
agttagttcatcggttctttgtaggttcgcgcgctcacgagtcacgtctagggtttggcggccaagggtcgtgacactacctttctgcctgcttgaagtggagtcgttgattggccttcatctagctcccgccagcgccctacgcgggaaatcgcagccgacaggcaaacgcctcgggaatcagctgtgccccgcgcctcgtgggccaccaggagctgttgctgcccccggtgtctccgccctcaacttccaaaccctaggggcggtagaggctccaaactcgggcgctttggccgtgaccgtccgaggtgggcgtcattgcgagttggtgacccacgggttgcggttgactagtgccttttcttttcttcctggactgaatggagcaaggggagaaccaatcagctgatagttttgttgtttcatcatcggataataatgagctggaagatttacctgtgaaggaaagatgctttgagcagagagaagctcttcctggggagcctcgctgtgttgtgtgtggccgatatggtgaatatatatgtgatcagactgatgatgacatctgcagtgtggaatgtaagacaatccttctttctcggatagttgctaaaacaaagccagcagtaaaagcagcaaagcgtgtgaaccttcctttaggcgatgagagcttttgtattaaggacatcaattttccaaatatacttactttagctgacagccggatcagttcactgaggagtaaacttgacatttgtgtcaagggtgatgctgttcctgatccaatcatgtgtttctctgcctgtggtcttcctgagaagcttgtgcacaatctcgagactgcgggatattgcatgcctactccagtgcagatgcaagtcatccctgcatcaatgagtaatagaagtttacttgtttctgctgatactggttcagggaaaactgcatcttttctaattcccataattgctcattgttcacgattaagatcacaagaatgcacaggcaatcaaggaccgttggctatagttcttgctccaacaagagagctatgcctgcaggtagaagagcaagcaaaggtgcttggtaaaggtttgcctttcaaaactgctctaattgtcggcggagatccattgcctcaacaaatttacagaattgaaaatggtgttgagttaattgttggcacccctgggaggctaattgatcttctcatgaaacacaatgttgaccttacctatgtttctgtattcgttttggatgaggtggactgcctgctggagaggggattcagggatcaggccatgcagatttttcagtcactttcacacccacaggttatgatgttttcagcaacaatacattcagaagttgagaagatgtctaactcactggctaataatgtgataagtatctcttgtgggaacccaaacagaccaaacaaattagttaaacaagtagtcatttgggtggagtctaagaagaagaagcagaagatttttgagataatgaaaagcaagcaacattttaaacctcctgctgttgtgtttgtgagttccagggttggagctgatctgttgtctgaagcaattactgttgctactggattagaggttgtttctatccatggtgagaaaacgatgattgagagaagagagaatttgcgaaggtttttaacaggagaagtatctgtcgttgtttctactggcgtcctggggcgtggaatggatcttctgaaagtacgtcaagtgatattgtttgatttaccaaattccattgatgaatatattcaccaagttggaagggcatcccggatgggtgaggagggtatggctgttgtgtttgtgaatgaggaggatagaaggattttcaaagagcttgttcaggttctgaagactgcaggagcaccgataccccgtgaaattgcaaattcaagatacacagctggtgtttatgttggtagcgagaggaagagaaagttgagctctaggtctcgttcttgaccaacatgtgtgaaagagttgctctatctttcttgaaatgaaatatgatgtttttgcatgtttttctgagactgtcttgtcaattcgtttgaagatctgtctatttagtatctacctaaaggataatttggttatctctagagttcatactattcctgaatttcaatcatgcacagacccaacaggggcaaacagtccatgattatttctcaatgtgtgatgtctgagatcaatacattggaaaaacataaacaagattcattgcttgtaaattttaacaaaatgtagtttgggagaattaacgtgtttttggaaaggttactagcaatagttttgagtgcaaaaagaagattcagtggaataacaaattag

SEQ ID NO: 49809 - DNA, 2054 bp, Zea Mays
agttagttcatcggttctttgtaggttcgcgcgctcacgagtcacgtctagggtttggcggccaagggtcgtgacactacctttctgcctgcttgaagtggagtcgttgattggccttcatctagctcccgccagcgccctacgcgggaaatcgcagccgacaggcaaacgcctcgggaatcagctgtgccccgcgcctcgtgggccaccaggagctgttgctgcccccggtgtctccgccctcaacttccaaaccctaggggcggtagaggctccaaactcgggcgctttggccgtgaccgtccgagttgactagtgccttttcttttcttcctggactgaatggagcaaggggagaaccaatcagctgatagttttgttgtttcatcatcggataataatgagctggaagatttacctgtgaaggaaagatgctttgagcagagagaagctcttcctggggagcctcgctgtgttgtgtgtggccgatatggtgaatatatatgtgatcagactgatgatgacatctgcagtgtggaatgtaagacaatccttctttctcggatagttgctaaaacaaagccagcagtaaaagcagcaaagcgtgtgaaccttcctttaggcgatgagagcttttgtattaaggacatcaattttccaaatatacttactttagctgacagccggatcagttcactgaggagtaaacttgacatttgtgtcaagggtgatgctgttcctgatccaatcatgtgtttctctgcctgtggtcttcctgagaagcttgtgcacaatctcgagactgcgggatattgcatgcctactccagtgcagatgcaagtcatccctgcatcaatgagtaatagaagtttacttgtttctgctgatactggttcagggaaaactgcatcttttctaattcccataattgctcattgttcacgattaagatcacaagaatgcacaggcaatcaaggaccgttggctatagttcttgctccaacaagagagctatgcctgcaggtagaagagcaagcaaaggtgcttggtaaaggtttgcctttcaaaactgctctaattgtcggcggagatccattgcctcaacaaatttacagaattgaaaatggtgttgagttaattgttggcacccctgggaggctaattgatcttctcatgaaacacaatgttgaccttacctatgtttctgtattcgttttggatgaggtggactgcctgctggagaggggattcagggatcaggccatgcagatttttcagtcactttcacacccacaggttatgatgttttcagcaacaatacattcagaagttgagaagatgtctaactcactggctaataatgtgataagtatctcttgtgggaacccaaacagaccaaacaaattagttaaacaagtagtcatttgggtggagtctaagaagaagaagcagaagatttttgagataatgaaaagcaagcaacattttaaacctcctgctgttgtgtttgtgagttccagggttggagctgatctgttgtctgaagcaattactgttgctactggattagaggttgtttctatccatggtgagaaaacgatgattgagagaagagagaatttgcgaaggtttttaacaggagaagtatctgtcgttgtttctactggcgtcctggggcgtggaatggatcttctgaaagtacgtcaagtgatattgtttgatttaccaaattccattgatgaatatattcaccaagttggaagggcatcccggatgggtgaggagggtatggctgttgtgtttgtgaatgaggaggatagaaggattttcaaagagcttgttcaggttctgaagactgcaggagcaccgataccccgtgaaattgcaaattcaagatacacagctggtgtttatgttggtagcgagaggaagagaaagttgagctctaggtctcgttcttgaccaacatgtttgggagaattaacgtgtttttggaaaggttactagcaatagttttgagtgcaaaaagaagattcagtggaataacaaattag

SEQ ID NO: 49810 - DNA, 2306 bp, Zea Mays
agttagttcatcggttctttgtaggttcgcgcgctcacgagtcacgtctagggtttggcggccaagggtcgtgacactacctttctgcctgcttgaagtggagtcgttgattggccttcatctagctcccgccagcgccctacgcgggaaatcgcagccgacaggcaaacgcctcgggaatcagctgtgccccgcgcctcgtgggccaccaggagctgttgctgcccccggtgtctccgccctcaacttccaaaccctaggggcggtagaggctccaaactcgggcgctttggccgtgaccgtccgaggtgggcgtcattgcgagttggtgacccacgggttgcggttgactagtgccttttcttttcttcctggactgaatggagcaaggggagaaccaatcagctgatagttttgttgtttcatcatcggataataatgagctggaagatttacctgtgaaggaaagatgctttgagcagagagaagctcttcctggggagcctcgctgtgttgtgtgtggccgatatggtgaatatatatgtgatcagactgatgatgacatctgcagtgtggaatgtaagacaatccttctttctcggatagttgctaaaacaaagccagcagtaaaagcagcaaagcgtgtgaaccttcctttaggcgatgagagcttttgtattaaggacatcaattttccaaatatacttactttagctgacagccggatcagttcactgaggagtaaacttgacatttgtgtcaagggtgatgctgttcctgatccaatcatgtgtttctctgcctgtggtcttcctgagaagcttgtgcacaatctcgagactgcgggatattgcatgcctactccagtgcagatgcaagtcatccctgcatcaatgagtaatagaagtttacttgtttctgctgatactggttcagggaaaactgcatcttttctaattcccataattgctcattgttcacgattaagatcacaagaatgcacaggcaatcaaggaccgttggctatagttcttgctccaacaagagagctatgcctgcaggtagaagagcaagcaaaggtgcttggtaaaggtttgcctttcaaaactgctctaattgtcggcggagatccattgcctcaacaaatttacagaattgaaaatggtgttgagttaattgttggcacccctgggaggctaattgatcttctcatgaaacacaatgttgaccttacctatgtttctgtattcgttttggatgaggtggactgcctgctggagaggggattcagggatcaggccatgcagatttttcagtcactttcacacccacaggttatgatgttttcagcaacaatacattcagaagttgagaagatgtctaactcactggctaataatgtgataagtatctcttgtgggaacccaaacagaccaaacaaattagttaaacaagtagtcatttgggtggagtctaagaagaagaagcagaagatttttgagataatgaaaagcaagcaacattttaaacctcctgctgttgtgtttgtgagttccagggttggagctgatctgttgtctgaagcaattactgttgctactggattagaggttgtttctatccatggtgagaaaacgatgattgagagaagagagaatttgcgaaggtttttaacaggagaagtatctgtcgttgtttctactggcgtcctggggcgtggaatggatcttctgaaagtacgtcaagtgatattgtttgatttaccaaattccattgatgaatatattcaccaagttggaagggcatcccggatgggtgaggagggtatggctgttgtgtttgtgaatgaggaggatagaaggattttcaaagagcttgttcaggttctgaagactgcaggagcaccgataccccgtgaaattgcaaattcaagatacacagctggtgtttatgttggtagcgagaggaagagaaagttgagctctaggtctcgttcttgaccaacatgtgtgaaagagttgctctatctttcttgaaatgaaatatgatgtttttgcatgtttttctgagactgtcttgtcaattcgtttgaagatctgtctatttagtatctacctaaaggataatttggttatctctagagttcatactattcctgaatttcaatcatgcacagacccaacaggggcaaacagtccatgattatttctcaatgtgtgatgtctgagatcaatacattggaaaaacataaacaagattcattgcttgtaaattttaacaaaatgggtttgcactgtcatgtttgc

SEQ ID NO: 49811 - DNA, 4404 bp, Zea Mays
agttagttcatcggttctttgtaggttcgcgcgctcacgagtcacgtctagggtttggcggccaagggtcgtgacactacctttctgcctgcttgaagtggagtcgttgattggccttcatctagctcccgccagcgccctacgcgggaaatcgcagccgacaggcaaacgcctcgggaatcagctgtgccccgcgcctcgtgggccaccaggagctgttgctgcccccggtgtctccgccctcaacttccaaaccctaggggcggtagaggctccaaactcgggcgctttggccgtgaccgtccgagttgactagtgccttttcttttcttcctggactgaatggagcaaggggagaaccaatcagctgatagttttgttgtttcatcatcggataataatgagctggaagatttacctgtgaaggaaagatgctttgagcagagagaagctcttcctggggagcctcgctgtgttgtgtgtggccgatatggtgaatatatatgtgatcagactgatgatgacatctgcagtgtggaatgtaagacaatccttctttctcggatagttgctaaaacaaagccagcagtaaaagcagcaaagcgtgtgaaccttcctttaggcgatgagagcttttgtattaaggacatcaattttccaaatatacttactttagctgacagccggatcagttcactgaggagtaaacttgacatttgtgtcaagggtgatgctgttcctgatccaatcatgtgtttctctgcctgtggtcttcctgagaagcttgtgcacaatctcgagactgcgggatattgcatgcctactccagtgcagatgcaagtcatccctgcatcaatgagtaatagaagtttacttgtttctgctgatactggttcagggaaaactgcatcttttctaattcccataattgctcattgttcacgattaagatcacaagaatgcacaggcaatcaaggaccgttggctatagttcttgctccaacaagagagctatgcctgcaggtagaagagcaagcaaaggtgcttggtaaaggtttgcctttcaaaactgctctaattgtcggcggagatccattgcctcaacaaatttacagaattgaaaatggtgttgagttaattgttggcacccctgggaggctaattgatcttctcatgaaacacaatgttgaccttacctatgtttctgtattcgttttggatgaggtggactgcctgctggagaggggattcagggatcaggccatgcagatttttcagtcactttcacacccacaggttatgatgttttcagcaacaatacattcagaagttgagaagatgtctaactcactggctaataatgtgataagtatctcttgtgggaacccaaacagaccaaacaaattagttaaacaagtagtcatttgggtggagtctaagaagaagaagcagaagatttttgagataatgaaaagcaagcaacattttaaacctcctgctgttgtgtttgtgagttccagggttggagctgatctgttgtctgaagcaattactgttgctactggattagaggttgtttctatccatggtgagaaaacgatgattgagagaagagagaatttgcgaaggtttttaacaggagaagtatctgtcgttgtttctactggcgtcctggggcgtggaatggatcttctgaaagtacgtcaagtgatattgtttgatttaccaaattccattgatgaatatattcaccaagttggaagggcatcccggatgggtgaggagggtatggctgttgtgtttgtgaatgaggaggatagaaggattttcaaagagcttgttcaggttctgaagactgcaggagcaccgataccccgtgaaattgcaaattcaagatacacagctggtgtttatgttggtagcgagaggaagagaaagttgagctctagatgatgaagcgaccttggtcatctccgtttgagggtgaagctgggctgctgctgctcagcaactcttcgatcatttgcagtgcgatcctctcctcctcatccatcggcgtggctggtggagcagttgttgctgatgtggactgtgatgcagcatcagtggatgctgcatctttgttgagctccactgtcatgacccagttggagtcagcacgggctcctgcacgcttctgccaaacaccaatgtgggacttctcagggtcaaggcggagacaggtcagggacggtgatggcgccttgcagcatttgcggagcttcgcactgagaatctgggacaggttggtggtagaggagccgctgctgaagttgctgcgggcgtcccttcccgcagctggggtaggctcccctgtgctgcttctttggattgggaagttggtcttggcgttgcgtccgctcatcagcacagcagcctcatcatatgctctcgctgcctcctcagccgtctcaaagagctactggggccaatcatattgttgagtatcactggaagcgtggacactgcggcaaagcatataggtaagacttgtgctgaaacttagggtgttggaatatttactgcatatttttgagataacgtcaaaattcttttgcttcatttggaatctctagtcgtgttccgtcacccaattttttctctataaatatgtaatgggatgttgaaatttacagtgaattgttcttgaactgaatatagattgtgtgtttagagtgatttcagtgcgacctgtgtatgagaattgacaagggtgcctttgtcctggggtgttagttctggaattgcttggagatggttggcatttaagcttgtctgaggtagctgcaggtacagactggtgatgatgatggtgtgtgctcagttgatggatacttgttcaatgaagaaatataaaagttttttttttctgtcacttataatatgggagtagactgaactgttgttcagtggagaatttgatagtatgtttacattttggcttcgctatattctcacaatagaaatcaggttgcaaaatggttatgaagttaggctataataatctgtctacacgtaacttcatttcttctccattgaacatctcgtgtgcttcggtttgtagaaaatttcatttcatttcacttgaacttggctttctttcgttaacctctgaaactatccacaagacggtagctctaaaggtttatggtagtctgcttcagcaataagcttactcttgtcttaggatgacaaatgtttatagtaagatcagatccttcgctgtatccaaacattctaataattttgggttctttgaaagggagctggagtctttgctgaaaatgtttggttgcagattacgactttgcacacttaaatgttgtgttccctctcccacaactttcccgtttgggtgctttccagaaaaaaaaactgttgccattttgtttggaagtatcagtttgcacgcattgtttggatgtgaagtatcttaatggttttgactggggtttttcagcaagtcacaccttggaatatctttcacagccgtgcttttttagaaagggagaaaaagaaaaaaaaaatcagttacgggtgagctcgtggtcatgccgtgcgctcgtatttctaagccgagccatttgcatgaatgaggtgctaggctttcctgtgataccaaaatgaagcgtcggtctgcaataaatcggtaagctgtgggtcatatttttaccaggcgagcaactgcccccgttgctacagaagttaagctgtgtaaaataaaaaggtgaaataaattgattgagtctgttgcccttgtcgagttaattaatgagaaacaggtacctgcagtacatctacggtggggatgtcatgtgtcagtcgatcacctctgactggagcataagaaggttctgtgagatcttgtcctctgacactgtctggtacgtacacccttttctcacgcattgtgcacaggtgtatctttaaaaattgccggtggagtcaaaagaaaataggagcatgcagtgcactgtattttatttggatttgaagcccctgcatgtttggcagcagttatctgttcctcagctcctgtaacctgaggcgcatctcggagtccgaattattatttttaatcatcacctacgttagaaatgaatctgtttgatgttgcctaggcgcagtggacagagaggtaaggttctttttgggaccatatatatgactaagctggtctccccaaatcattcccggcaaaatcatggaccttagcgaggaaccggaagctgcttggttttctttctttctttcttttatgtatatgtttgtattctgtatagattattaatccgctcaaagcggcaaaccgacatgcatggtatagtaaaatatgaatatactagtactatagataagttccag

SEQ ID NO: 49812 - DNA, 4530 bp, Zea Mays
agttagttcatcggttctttgtaggttcgcgcgctcacgagtcacgtctagggtttggcggccaagggtcgtgacactacctttctgcctgcttgaagtggagtcgttgattggccttcatctagctcccgccagcgccctacgcgggaaatcgcagccgacaggcaaacgcctcgggaatcagctgtgccccgcgcctcgtgggccaccaggagctgttgctgcccccggtgtctccgccctcaacttccaaaccctaggggcggtagaggctccaaactcgggcgctttggccgtgaccgtccgaggtgggcgtcattgcgagttggtgacccacgggttgcggttgactagtgccttttcttttcttcctggactgaatggagcaaggggagaaccaatcagctgatagttttgttgtttcatcatcggataataatgagctggaagatttacctgtgaaggaaagatgctttgagcagagagaagctcttcctggggagcctcgctgtgttgtgtgtggccgatatggtgaatatatatgtgatcagactgatgatgacatctgcagtgtggaatgtaagacaatccttctttctcggatagttgctaaaacaaagccagcagtaaaagcagcaaagcgtgtgaaccttcctttaggcgatgagagcttttgtattaaggacatcaattttccaaatatacttactttagctgacagccggatcagttcactgaggagtaaacttgacatttgtgtcaagggtgatgctgttcctgatccaatcatgtgtttctctgcctgtggtcttcctgagaagcttgtgcacaatctcgagactgcgggatattgcatgcctactccagtgcagatgcaagtcatccctgcatcaatgagtaatagaagtttacttgtttctgctgatactggttcagggaaaactgcatcttttctaattcccataattgctcattgttcacgattaagatcacaagaatgcacaggcaatcaaggaccgttggctatagttcttgctccaacaagagagctatgcctgcaggtagaagagcaagcaaaggtgcttggtaaaggtttgcctttcaaaactgctctaattgtcggcggagatccattgcctcaacaaatttacagaattgaaaatggtgttgagttaattgttggcacccctgggaggctaattgatcttctcatgaaacacaatgttgaccttacctatgtttctgtattcgttttggatgaggtggactgcctgctggagaggggattcagggatcaggccatgcagatttttcagtcactttcacacccacaggttatgatgttttcagcaacaatacattcagaagttgagaagatgtctaactcactggctaataatgtgataagtatctcttgtgggaacccaaacagaccaaacaaattagttaaacaagtagtcatttgggtggagtctaagaagaagaagcagaagatttttgagataatgaaaagcaagcaacattttaaacctcctgctgttgtgtttgtgagttccagggttggagctgatctgttgtctgaagcaattactgttgctactggattagaggttgtttctatccatggtgagaaaacgatgattgagagaagagagaatttgcgaaggtttttaacaggagaagtatctgtcgttgtttctactggcgtcctggggcgtggaatggatcttctgaaagtacgtcaagtgatattgtttgatttaccaaattccattgatgaatatattcaccaagttggaagggcatcccggatgggtgaggagggtatggctgttgtgtttgtgaatgaggaggatagaaggattttcaaagagcttgttcaggttctgaagactgcaggagcaccgataccccgtgaaattgcaaattcaagatacacagctggtgtttatgttggtagcgagaggaagagaaagttgagctctaggtttgggagaattaacgtgtttttggaaaggttactagcaatagttttgagtgcaaaaagaagattcagtggaataacaaattagcagatgatgaagcgaccttggtcatctccgtttgagggtgaagctgggctgctgctgctcagcaactcttcgatcatttgcagtgcgatcctctcctcctcatccatcggcgtggctggtggagcagttgttgctgatgtggactgtgatgcagcatcagtggatgctgcatctttgttgagctccactgtcatgacccagttggagtcagcacgggctcctgcacgcttctgccaaacaccaatgtgggacttctcagggtcaaggcggagacaggtcagggacggtgatggcgccttgcagcatttgcggagcttcgcactgagaatctgggacaggttggtggtagaggagccgctgctgaagttgctgcgggcgtcccttcccgcagctggggtaggctcccctgtgctgcttctttggattgggaagttggtcttggcgttgcgtccgctcatcagcacagcagcctcatcatatgctctcgctgcctcctcagccgtctcaaagagctactggggccaatcatattgttgagtatcactggaagcgtggacactgcggcaaagcatataggtaagacttgtgctgaaacttagggtgttggaatatttactgcatatttttgagataacgtcaaaattcttttgcttcatttggaatctctagtcgtgttccgtcacccaattttttctctataaatatgtaatgggatgttgaaatttacagtgaattgttcttgaactgaatatagattgtgtgtttagagtgatttcagtgcgacctgtgtatgagaattgacaagggtgcctttgtcctggggtgttagttctggaattgcttggagatggttggcatttaagcttgtctgaggtagctgcaggtacagactggtgatgatgatggtgtgtgctcagttgatggatacttgttcaatgaagaaatataaaagttttttttttctgtcacttataatatgggagtagactgaactgttgttcagtggagaatttgatagtatgtttacattttggcttcgctatattctcacaatagaaatcaggttgcaaaatggttatgaagttaggctataataatctgtctacacgtaacttcatttcttctccattgaacatctcgtgtgcttcggtttgtagaaaatttcatttcatttcacttgaacttggctttctttcgttaacctctgaaactatccacaagacggtagctctaaaggtttatggtagtctgcttcagcaataagcttactcttgtcttaggatgacaaatgtttatagtaagatcagatccttcgctgtatccaaacattctaataattttgggttctttgaaagggagctggagtctttgctgaaaatgtttggttgcagattacgactttgcacacttaaatgttgtgttccctctcccacaactttcccgtttgggtgctttccagaaaaaaaaactgttgccattttgtttggaagtatcagtttgcacgcattgtttggatgtgaagtatcttaatggttttgactggggtttttcagcaagtcacaccttggaatatctttcacagccgtgcttttttagaaagggagaaaaagaaaaaaaaaatcagttacgggtgagctcgtggtcatgccgtgcgctcgtatttctaagccgagccatttgcatgaatgaggtgctaggctttcctgtgataccaaaatgaagcgtcggtctgcaataaatcggtaagctgtgggtcatatttttaccaggcgagcaactgcccccgttgctacagaagttaagctgtgtaaaataaaaaggtgaaataaattgattgagtctgttgcccttgtcgagttaattaatgagaaacaggtacctgcagtacatctacggtggggatgtcatgtgtcagtcgatcacctctgactggagcataagaaggttctgtgagatcttgtcctctgacactgtctggtacgtacacccttttctcacgcattgtgcacaggtgtatctttaaaaattgccggtggagtcaaaagaaaataggagcatgcagtgcactgtattttatttggatttgaagcccctgcatgtttggcagcagttatctgttcctcagctcctgtaacctgaggcgcatctcggagtccgaattattatttttaatcatcacctacgttagaaatgaatctgtttgatgttgcctaggcgcagtggacagagaggtaaggttctttttgggaccatatatatgactaagctggtctccccaaatcattcccggcaaaatcatggaccttagcgaggaaccggaagctgcttggttttctttctttctttcttttatgtatatgtttgtattctgtatagattattaatccgctcaaagcggcaaaccgacatgcatggtatagtaaaatatgaatatactagtactatagataagttccag

SEQ ID NO: 49813 - DNA, 2544 bp, Zea Mays
tgagcagtaacacaatcataatctatttatttcttttataagcaattatatcactgacattgatgtgtaacaaagtatcttgataggaacatgtgtatgtagagcttttcacgtacatagaactgcacacaattgcaaactttatagttcttgtaagttggatttagtaatagacatatatctatattactgaagcaacctgaactgcttgtgtaccaaccgacctagcgaaactctgatctgggatggtgacttgtgctgtttgatccatgcttttcagatgatgaagcgaccttggtcatctccgtttgagggtgaagctgggctgctgctgctcagcaactcttcgatcatttgcagtgcgatcctctcctcctcatccatcggcgtggctggtggagcagttgttgctgatgtggactgtgatgcagcatcagtggatgctgcatctttgttgagctccactgtcatgacccagttggagtcagcacgggctcctgcacgcttctgccaaacaccaatgtgggacttctcagggtcaaggcggagacaggtcagggacggtgatggcgccttgcagcatttgcggagcttcgcactgagaatctgggacaggttggtggtagaggagccgctgctgaagttgctgcgggcgtcccttcccgcagctggggtaggctcccctgtgctgcttctttggattgggaagttggtcttggcgttgcgtccgctcatcagcacagcagcctcatcatatgctctcgctgcctcctcagccgtctcaaagagctactggggccaatcatattgttgagtatcactggaagcgtggacactgcggcaaagcatatagagtgatttcagtgcgacctgtgtatgagaattgacaagggtgcctttgtcctggggtgttagttctggaattgcttggagatggttggcatttaagcttgtctgaggtagctgcaggtacagactggtgatgatgatggtgtgtgctcagttgatggatacttgttcaatgaagaaatataaaagttttttttttctgtcacttataatatgggagtagactgaactgttgttcagtggagaatttgatagtatgtttacattttggcttcgctatattctcacaatagaaatcaggttgcaaaatggttatgaagttaggctataataatctgtctacacgtaacttcatttcttctccattgaacatctcgtgtgcttcggtttgtagaaaatttcatttcatttcacttgaacttggctttctttcgttaacctctgaaactatccacaagacggtagctctaaaggtttatggtagtctgcttcagcaataagcttactcttgtcttaggatgacaaatgtttatagtaagatcagatccttcgctgtatccaaacattctaataattttgggttctttgaaagggagctggagtctttgctgaaaatgtttggttgcagattacgactttgcacacttaaatgttgtgttccctctcccacaactttcccgtttgggtgctttccagaaaaaaaaactgttgccattttgtttggaagtatcagtttgcacgcattgtttggatgtgaagtatcttaatggttttgactggggtttttcagcaagtcacaccttggaatatctttcacagccgtgcttttttagaaagggagaaaaagaaaaaaaaaatcagttacgggtgagctcgtggtcatgccgtgcgctcgtatttctaagccgagccatttgcatgaatgaggtgctaggctttcctgtgataccaaaatgaagcgtcggtctgcaataaatcggtaagctgtgggtcatatttttaccaggcgagcaactgcccccgttgctacagaagttaagctgtgtaaaataaaaaggtgaaataaattgattgagtctgttgcccttgtcgagttaattaatgagaaacaggtacctgcagtacatctacggtggggatgtcatgtgtcagtcgatcacctctgactggagcataagaaggttctgtgagatcttgtcctctgacactgtctggtacgtacacccttttctcacgcattgtgcacaggtgtatctttaaaaattgccggtggagtcaaaagaaaataggagcatgcagtgcactgtattttatttggatttgaagcccctgcatgtttggcagcagttatctgttcctcagctcctgtaacctgaggcgcatctcggagtccgaattattatttttaatcatcacctacgttagaaatgaatctgtttgatgttgcctaggcgcagtggacagagaggtaaggttctttttgggaccatatatatgactaagctggtctccccaaatcattcccggcaaaatcatggaccttagcgaggaaccggaagctgcttggttttctttctttctttcttttatgtatatgtttgtattctgtatagattattaatccgctcaaagcggcaaaccgacatgcatggtatagtaaaatatgaatatactagtactatagataagttccag

SEQ ID NO: 49814 - DNA, 147 bp, Zea Mays
ctatttgatcgacattggagtaggccagattcagaatggaggaatctggttgatgattttgctgctacctttgggactactaatagaacattgcttgagtgcctggtattttatcttctagatgattatccttcagaagccttggag

SEQ ID NO: 49815 - DNA, 7749 bp, Zea Mays
gtcatttcgagcactaaaatgaccacatacttttaacaaacgcattcaccacgtaaatagcaccatcacacatgacctcgacttaaccgcagaggaagcgatgactacttcggcatgtcaccacctctctacagtccaatcaatattaactacatcgatcgaacctcatatcgcgtaactcttataatttattatctcaaatacaaccataccacggcatggacttgagactctttgatcaagttaacgcaatcacgactaccatacacatgcgtaccactttttccaccatgtacctttaatctacgtcaaaaaaaatactcgtgcacacacctacttacaaacctatgcacaacgacaaaaccaatgaccatctcactacaacacctaacaagagctgtgaataaaatcaaaaggagcatcgcaccacttcatcacacccattcatctcctataggcgcactaattcatttcttgcggcatactcactcacaatcaatccttactacagaaaatatacctatttcttatttatgcgcataacataacaattcgtgagataaaatgtcattataaacacattacacataattgcatagcaaacctacttgtccactcgaaaacatctatccgaagcaatgaacacaaccgtacactacgtgcaatgcgaaattcaatgaacgcataaggtgtattgactcgacttataaatatagaggaaatgaggactaccctggcatgtcaccacctctctacttaagccaagacaatttctaccatcgactaaaagttctaagtattaaacacactattactttccatgcacaaataaacctcaacttaacaccagtgacaccgatggatttttactaaacccatcatgtgcataaccccgtctcgcatacaaccatattgtggcgtgtactcgagacactaccgattaacttaacgcaattaccactacaatgcacttcgatatacacgtccgacatcacagtgcttcgacaaaccccacacttccaatctacttgtcacatccaaccacaccacgtttgataacacacctttctaactaaacatatctcgtcttccaaacacccatcatatgtcacataatttacatttcccacttaatctaacctacaccaacgatgaatacataaatataattaccgtagactgactcatcagtcgactgcggaaatcactaagcatgctttgcactttattaattttttgccgtaactaacacactagtttacgacggagcattttagtaacagttaatacatccacgaccaatccctacgacgtacaaaagaactatcgcagccacatttatatatatccgatccaacaacaaaataacacatcggctcaccatatcaaacctcagtcgtggttgctgcacatgtggtgtgaagacgaacgcgttgtcgcgcacgggagaccgaaacgaagtgaagggcgtggctcgctactgcgatccgtcgagcacgcaagcgcgaggtgaagcattgacggtggcggagtttgacaacatgcgtcgggactgcgcagatcgggtcgatgcaagcgacacggagggaatccggggctactgtgggcttgctgtttcgggggagggcagagtgggtgagggctgctggtcatggggaggagagtggcgaagctcgacgacgacaaaaggcaaggggcggggctactgcaggaaatcgacgacgtgtggcttgctgcgcatttcgtcgagcacatagcaagcaccaacagtgcaccgcgcggcagcacgcaagccgggaggaacaaagggaggaagggggcctacgctatggaggaaatggagtccttgctgttggtcgttggggacagcgagcaggcagggaaagacaccatgagcaacatgagctcgctggcgagcaggggcccggcgaggccacgatggcaccttgcaggggatcctcgacgagcagcgccatggcaaggttggtgaggccgctcgctagtgctggtcgtggagcagggggcgctggagggaagggacgccatgggaaagagctcggcggccctggaaataatggaggtcgcaccatggctggagagcgcctgctccaagggagcttggccagcgtccaagcaaggaggtggaggcccgcgcccatggaagaagaagagggcctgctcgccatgggaggggcatgcagagctgctgctcggccatgggagaaggggtgtccacgccttggacaggaaaggaaaggaagggcgccgtgcagaggaaagggatgaggtgcgccatggagagaggagccaagctccatgcttgctgccgtggagcagggaggaagaaaggggcgccttgctgctgcgcgtgggagaagaagacagggaggaaaggttgtggcggctgaaaaaatggaggggtgggaatggaaaatagccaagtgcaagggagagggattcatatttatagaggggcactagggttagggttttctagtgggccaaatgggctgggctgggctgggcttggcccaaaacacgtaattgggctgcgctaaatattttctggaataaaaatgttcctgcggaattcgtctctacagagaacaaagcgaaatagatttcagaagatcgggcgataaactcggccaagagtatgatttgatttcgctcgaaaataattccctacgcatggttcgaaaataaatcgtcttgagatatgaccggctttcggatttatgattgaaagagacaaatcgcgacatctaaaaatcatcgccgatgttgatttttgaaatcggatcggacacagaggtattaagtcgagccggataagaatttatttgaggacaacgcattggagattccacttgaggatacagactcagattaattttcggatatagatcgaatcatcaagaaattggattcggacacagctcaactagcaactgtcgagcgcttgattaaatgagctttagacgacatttataaatcgagatggattatcaagttcgcattcatgccgagaaataaaagttttaacaggctccaaattcggccttctgtgagactgaataactacgaattcggtaaaatgtgaatgaataatctggataatcagagacatacgcgagcgagaaatagaaattttcactgagcatccgagattaggataaatctcccgacataacgcgaaatatacaccggggtgtcacaattattgggtaataaaagtggtcaagggcacaacttgccttcaatgagctcctgcttagcaacttctaccagttgaacaccgggatcctcagccactggctcttctactcgccacaatacaaacaagcatggtataaaggagaaattaacatcacaccaaacatgtatacaaaatacatattaataatctacatattaaaataagatcataggaacaggaaacattaattttagagttatggattttaagttatgaatttaaaaagattctatgtgctaggtacaagattaattaggagattaattttaatatagttttcatgtcaaaacagagactctttgtgatagacaacattattaaaaattatagaaactcgaatggatcaatttggaattagtatgaattttctagggattaaacaagttttaatgattatttttacattaaaaatcactttccatatttattcatctaatttaactgttctctggactgcgcacataaaatacagaagctcgggtgggtctctgcgcaaatagttccaagactcagaacactatacgcagtactgcgggttgattttcattttccccgatggctctttagcgaaattcctcgccgaaagggtacgtgggcaatctgtccgttggatctccaccggacaatcgagattagaaccgatacttacgcgaaccggtatgaaatcttggttgttggatcaaaaatccatggcaggggactcccccacaccatgatctaataccagtcattcgatctagatgggcggccaagatcttatgtgcccaagcgttatctacattctaatctaagccatcagatgcgaatccaatgacccgcgtaggttttacccttctccagccggagcagggcgacggacatgagcacacggcggagccctcccaccggcgaactaagaatcgacgattctatggcccaaatctcaattaatttaacctacgtgacgcggagtccaaagcgaaatcagaggcgaggttctcacccaaaatgctgatgaaggtgaagcagtccgcgatgacgtgcggcgcggtgctttccttgccgtctgacgagaaatttctcgcgccgtgaagacgcagggcccgcctcgaggactcggtcggcttccccggacactggcgcacgtcgtcggccacaaaccgaggccgggacgtcggcacatatgaagataaccggcggcggccctcttctctctctatgtcttcttctcaccctctgtcgatcttggctagctgtaggtagtggatctgacgaagggatcgtgggtgcggcaactgttggtttatgtagggcgagggaaggatggagccgagctccaggatccgcccgccatgcgcgcgggttggttagcacctgttgtggcgtgatgacaagtgggtcccatgcacagtgttgtgaggatatgagactgacctctgggtcccactgccggatgaacgagcgcgcgcggtgggagaaatcgggccacgcagacgagtgagcgaagtgggccaaatcggtttcctccggcccaagtagccaattccttccttttctttttattttagaatttctgatttcttttcccttttcattttcttgatttcaaatttgagtttacattttgtcatgagtctctcagttgagctaaatattcaaattcaaatcctagtgtaagaaggatatatttgtctattttttgtataatattttctttctcctaccttccttgttatttcccattcctaaatattcaaaataggtattagatccacaatttgggacattaatttatttccattaatgtgattactatttttactagatgcacatacaaacaaaagccaacatgatgcataaattagtaatgtgccttttgttgatttgtttacttttagacatgagtgttaacatgtgataataaatagaagtcatacaattagggagatcaactctatttcattgtttacacttttgggtattacaaatcctaccccccttaacaagaatctcgtcctcgatatttaggaaggactagggaaaagatggggaaattctattcgaagctcttcttctctctcccaagtagcttcatcttctccatggtgactccattgtactttgcacatctttatcactttatttcttctaactcgagtcaaagtatcaattatcttaatatgatattctgtataagtcaaatcaccctgaacattgagttcttccattggtagctattcctcagggacacggaggcacttcttaagttgagacacatggaatacatcatgcacatctgatagatgatcaggtagctcgagttggtatgccatctccccaactcgcctaaaaattttgaagggtccaataaagagaggggataattttcctttaactttgaatctcctcattccacgaagtggtgacaccttgaggtacacattatcaccttcctcaaactccagtggtcttcttcgattatcagcatagctcttttgcctggtctgagctaccctcaagttctcctggattatacggacttgttcttctacctcttgaataaatttaggcctagcacttcctgccatataaagctttaaatggtgacatcttcagactggcttggtaactattattatatgagaactcagcatatggtagactcttgtcacaactgcctccatgttgaagggcacaagctgtcaacatatcttctagtacttgattagtcctttcagtctggccatcaggttgagggtgataggccgaactaaagttcaacttcgtatccttattctcatgaaagcttttccaaaatctagaggtaaactgtgaacctctatccgaaacgatcttcttcggtactccgtgtagacacacaattcgagccatatataattctgccaactgagaacctttataagtagtcttgaccggaatgaaatgagccactttggttagtctatccacaatcacccatatggaatcatatcctttcagggtgcgaggcaacccgacaatgaaatccataccaatctcttcccacttccattcgggtatctttaacgggtgcaatagtccagctggtctttgatgttaagctttgactctttgacacacatcacacatagccacatgtgcagtcacatctcacttcaatccataccaccagtacttttgcttcaaatcctgatacatcttagtgctaccaggatgaatagaataatcagattcatgggcttccttcaatatagcctcacaaaggctgtctatctcaggaacacatatccggtccttgaaccatactgtgccttgctcatcctccgtgaattctggacctctaccttttagtaatcagatctttgatctcttggattttagcatcaccgatctgtcctttgcggatttctgctccaaggtaggttccacttcaatagtaactccttcagtgtgtgcaacaattcccaggttgtgtctcctgaaatcctcaacaatctcatcgggtagctgtgcaacaatagctgaatggacatgttcctttcgactcaaggcatccgcaaccagattcaccttgcccggttgatagtgaatctccaatcataattgttgggggtatgcttcatagccgaagatcctaaagaaagagaacaccttcggcagacactctcaggagcaagcgccgaagctattacttagagagcttcggcacaatgatagatcttaagacgaagggctgaaccgacttaaagatggattgacttaaagacccatgatgtttgtgtcattattgtagtcaattgtaaaggacttaaatgtaattttacgcaggttgcaccctgtgcctataaataggtgaacattaccccggcactgttcacgctatcctgtaattgctaacgcattacactggaatcattttctgtcagagacgaagcatttgagaacaagtccccaacattggtgcccacctccggtgaactcacttccacttttttgagctgatggcttcgttcaacaaccaagccagagttgtttcggctccgaagctgatactcccgataacaggcgattcatgctcagagccagccaacaagaagcagaagaaggaggcacagagaagggtacatcatatcggggtgcaaggacccttcatcaagtcaagatggtcccacatcccaattaccttctcccaagaggaccttcagctcaaggattaccctcacaacgatgctatggttatttcttgtgttatcaaaggatttctggtccacaacgttttggttgacacaggcagtgcagcggatattatatttgctaaggccttcagacagatgcaagagcccgaagataagatccatgatgctacacatcccctttgtggcttcggaggaaggcagattgtagcactcggcaagatcacgatgccaataactttcggatttatcaacaatacaaggactgaacaagttgtgtttgatattgttgacgatggaatacccttacaatgcaat

SEQ ID NO: 49816 - DNA, 620 bp, Zea Mays
acatatagataaacacccaactcctgtgagggcggtgtcatgaacctctccctcgcccttgatctcgcccttgtgacggcgatctctcccgcccccgctccctccatgccctccaccaccgtcaccgccgccaggtcgtctctcatccctgaaaaattgtgggaggaagatgcagagaatggagctaggtcgttcgatgctcaatcaatttctcggcaggcgacttcaattcctgggaatctgtggaagcaaaatcgaagcatgccaaaaacacttgaaaagtaccaaaaatgcagttttgcagggcctgaaacagcactccagaatagagagaatgagcaactgaaaagtagccgcaatgagtacctcaaactgaaggcacgtgttgataatttacagtggactcaaaggaacttgcttggtgaagatctcgagtgattaggcataaaagagctggagcacctggagaagcagctcgattcgtccttgaagcacataagatctacaaggacacaacacatggttgatcaactgacagaacttcagaaaaaagaacaaatgttttgtgaagcaaataagtgtcttcgaagaagatgtacaatggcacggaccatgatgac

SEQ ID NO: 49817 - DNA, 2606 bp, Zea Mays
cgatttgtatggcctctgttggagagtgaggatgaggcagtacaggttcaacccggccgctcgcctggtgggcagtcaggtgatgcacgacaagaggcgacattcatcacggctgcattttttttccatccagccgtgcggccgcaatgattcctccccgtctccccctcgccctccgaaagcgaagtgagcttctgcagataaggaaggaggccgacattatcgcaacacgccacctcatctaatcgaggcgagagacaggggaggaggaggaaaacggaagaaatcttcatcaagcaacaggaagcgagagcgtgcgatttcttttttcttcctttccggtgacgccaggtgaatcaccagccggccggtgcgccaaaggctagggttccgcggggcgcgggtgcgggctcgactttcgtagcctcgccgccggcgcgcgggaaccggatgctgctaagctgcgggtcgctctcctcctgggtgcgccgcttcgtcgcctgcgttggtggttgttttggttgtgcccagcctactccgataatagctgttgatgagcccacaaaaggtttaagaattcaagggcgctcagtaaaaagacacaatttatctgacgacttttggagttcaagcccgcacgaaatggagaacagtgccttgcaatcccgacacagtatgtcctcaatcagcactgctgcacaacctaatgatcagcatgcttctggaagtagcagctccccaaatgaatttgtaaatcaaggtcttctactatggcaccagactagacagcagtggattggaaaacgaagacataattctcagggtcaacaaagtcaaggaccaaaaataagttgtaatgctacatacgagagcctgctcgggagctcgaaaccatttccacaaccgatccctcttggtgaaatggtgggtttcctcgtgatcagctgggagcaggaaggcctatacgattagagttggttattggaagtgtgctgtttcaagtcatgaatcgctgaaatgtacgcaacttctaggctgcgaaagcttgtgacctcatggatgtggactgtctcggagacaggatgacatccctcttatgcaaatgtaaaatattctttgttattttattactagtaattgtgtttacagcgttcagtgtaggagttcattgttttatactgagtacagttctctcacgttagctcgcgtaaaagaaatcagaacgtctgcagggatgccagggaactagatactgggagctgccttgagcctgatggccaaaatcgggtccagtccagccgatgtttttagctgtcatatgacttgagcaagcattttaccttacttttgtttgccaaacgtaaacattggcatgtcagattcttttttaagcttctcgtctgagtacaaaaccaagagatgacagattattattaatgagaataaaacccagatgagggatgctagttagattctggaaatcgaactctcgcgcaacagcgagcacacctggctctggctgcagcctgcactagcaaccggagcctagctcggttatctgcatgtcaaattctgggagcaaaagcaagcagacatcaattgtgtacattctcaaatctgctttccatagatcctcagcgcacccagaaggtgatggaagaggccgtctcctttccagacgcgtctccggccttctcagcttgcgtgtgtacgtggccgcctctgccgctttatatggacaccaatcgtcatctccatctctaaacagactaacagagtgaggacacaaggacggtgaccaagcagagtgacgacgacgcgacaatcaagtccgtagctccggcggtagactttgatatggctttagctcgtctgtgcctcaacagggccatcgctggccgcgcgcaggcgctggcgaggccggcgctcgccgcagccccggcgacagatccgaaacttcactcgcttctctcaacctcggcagccgactctgccgcctcaggcgaggcaaaccgccgagatgtcgccgtgtcggagcgctccgcccccaatcgccgctgggcatggcgagacctccgcgacttcaccccgttcagcctcgtggacggtctcgggagcgcgctgtcgcaggtggcggagaccctgggccgcccgctggagcgcctggcgccgtcgcggctgctgtccgggaaggtgcgcgaggacgaggcgcggtaccggctgcgtttcgaggtgccgggcctcggcaagggcgacgtgcgcgtggccgtggaggacggggtgctggtcatcgagggcgagaagcgtgagcacggggaggagggcgacggcggcgagtggtggtcgaccagcgggtaccacgccagcctgctgctcccggacgacgcgcgcgccgaggggatcaccgccgaggtgaaggacggcgtgctgtacgtcaccgtgccgcgcaccggggagcgcaagcggaacgtcaccgaggtgaaggtgcagtgatgcgtgtcgtgtcactcaactcttgtgagtgcttcttgtttgtgagcccgtgactgttgtgtattttctccggaaataaaatttgtatcgtgtacagaaagcgaaagcacggc

SEQ ID NO: 49818 - DNA, 2745 bp, Zea Mays
ccggccgctcgcctggtgggcagtcaggtgatgcacgacaagaggcgacattcatcacggctgcattttttttccatccagccgtgcggccgcaatgattcctccccgtctccccctcgccctccgaaagcgaagtgagcttctgcagataaggaaggaggccgacattatcgcaacacgccacctcatctaatcgaggcgagagacaggggaggaggaggaaaacggaagaaatcttcatcaagcaacaggaagcgagagcgtgcgatttcttttttcttcctttccggtgacgccaggtgaatcaccagccggccggtgcgccaaaggctagggttccgcggggcgcgggtgcgggctcgactttcgtagcctcgccgccggcgcgcgggaaccggatgctgctaagctgcgggtcgctctcctcctgggtgcgccgcttcgtcgcctgcgttggagtgatgagtaaaagctgggcctagtagctggttctgaacttctagtattccaccgtttagaattatctaaattggttgttttggttgtgcccagcctactccgataatagctgttgatgagcccacaaaaggtttaagaattcaagggcgctcagtaaaaagacacaatttatctgacgacttttggagttcaagcccgcacgaaatggagaacagtgccttgcaatcccgacacagtatgtcctcaatcagcactgctgcacaacctaatgatcagcatgcttctggaagtagcagctccccaaatgaatttgtaaatcaaggaaataatatattatgacagagagtctctcacgtataggccaactcctgaaattggtcacacacatggccagatgtaaactatttgttcttatggctcccgaattccaaccctatagggtcttctactatggcaccagactagacagcagtggattggaaaacgaagacataattctcagggtcaacaaagtcaaggaccaaaaataagttgtaatgctacatacgagagcctgctcgggagctcgaaaccatttccacaaccgatccctcttggtgaaatggtgggtttcctcgtgatcagctgggagcaggaaggcctatacgattagagttggttattggaagtgtgctgtttcaagtcatgaatcgctgaaatgtacgcaacttctaggctgcgaaagcttgtgacctcatggatgtggactgtctcggagacaggatgacatccctcttatgcaaatgtaaaatattctttgttattttattactagtaattgtgtttacagcgttcagtgtaggagttcattgttttatactgagtacagttctctcacgttagctcgcgtaaaagaaatcagaacgtctgcagggatgccagggaactagatactgggagctgccttgagcctgatggccaaaatcgggtccagtccagccgatgtttttagctgtcatatgacttgagcaagcattttaccttacttttgtttgccaaacgtaaacattggcatgtcagattcttttttaagcttctcgtctgagtacaaaaccaagagatgacagattattattaatgagaataaaacccagatgagggatgctagttagattctggaaatcgaactctcgcgcaacagcgagcacacctggctctggctgcagcctgcactagcaaccggagcctagctcggttatctgcatgtcaaattctgggagcaaaagcaagcagacatcaattgtgtacattctcaaatctgctttccatagatcctcagcgcacccagaaggtgatggaagaggccgtctcctttccagacgcgtctccggccttctcagcttgcgtgtgtacgtggccgcctctgccgctttatatggacaccaatcgtcatctccatctctaaacagactaacagagtgaggacacaaggacggtgaccaagcagagtgacgacgacgcgacaatcaagtccgtagctccggcggtagactttgatatggctttagctcgtctgtgcctcaacagggccatcgctggccgcgcgcaggcgctggcgaggccggcgctcgccgcagccccggcgacagatccgaaacttcactcgcttctctcaacctcggcagccgactctgccgcctcaggcgaggcaaaccgccgagatgtcgccgtgtcggagcgctccgcccccaatcgccgctgggcatggcgagacctccgcgacttcaccccgttcagcctcgtggacggtctcgggagcgcgctgtcgcaggtggcggagaccctgggccgcccgctggagcgcctggcgccgtcgcggctgctgtccgggaaggtgcgcgaggacgaggcgcggtaccggctgcgtttcgaggtgccgggcctcggcaagggcgacgtgcgcgtggccgtggaggacggggtgctggtcatcgagggcgagaagcgtgagcacggggaggagggcgacggcggcgagtggtggtcgaccagcgggtaccacgccagcctgctgctcccggacgacgcgcgcgccgaggggatcaccgccgaggtgaaggacggcgtgctgtacgtcaccgtgccgcgcaccggggagcgcaagcggaacgtcaccgaggtgaaggtgcagtgatgcgtgtcgtgtcactcaactcttgtgagtgcttcttgtttgtgagcccgtgactgttgtgtattttctccggaaataaaatttgtatcgtgtacagaaagcgaaagcacggc

SEQ ID NO: 49819 - DNA, 2668 bp, Zea Mays
ctggtgggcagtcaggtgatgcacgacaagaggcgacattcatcacggctgcattttttttccatccagccgtgcggccgcaatgattcctccccgtctccccctcgccctccgaaagcgaagtgagcttctgcagataaggaaggaggccgacattatcgcaacacgccacctcatctaatcgaggcgagagacaggggaggaggaggaaaacggaagaaatcttcatcaagcaacaggaagcgagagcgtgcgatttcttttttcttcctttccggtgacgccaggtgaatcaccagccggccggtgcgccaaaggctagggttccgcggggcgcgggtgcgggctcgactttcgtagcctcgccgccggcgcgcgggaaccggatgctgctaagctgcgggtcgctctcctcctgggtgcgccgcttcgtcgcctgcgttggagcagtggttgttttggttgtgcccagcctactccgataatagctgttgatgagcccacaaaaggtttaagaattcaagggcgctcagtaaaaagacacaatttatctgacgacttttggagttcaagcccgcacgaaatggagaacagtgccttgcaatcccgacacagtatgtcctcaatcagcactgctgcacaacctaatgatcagcatgcttctggaagtagcagctccccaaatgaatttgtaaatcaagcaggaaataatatattatgacagagagtctctcacgtataggccaactcctgaaattggtcacacacatggccagatgtaaactatttgttcttatggctcccgaattccaaccctatagggtcttctactatggcaccagactagacagcagtggattggaaaacgaagacataattctcagggtcaacaaagtcaaggaccaaaaataagttgtaatgctacatacgagagcctgctcgggagctcgaaaccatttccacaaccgatccctcttggtgaaatggtgggtttcctcgtgatcagctgggagcaggaaggcctatacgattagagttggttattggaagtgtgctgtttcaagtcatgaatcgctgaaatgtacgcaacttctaggctgcgaaagcttgtgacctcatggatgtggactgtctcggagacaggatgacatccctcttatgcaaatgtaaaatattctttgttattttattactagtaattgtgtttacagcgttcagtgtaggagttcattgttttatactgagtacagttctctcacgttagctcgcgtaaaagaaatcagaacgtctgcagggatgccagggaactagatactgggagctgccttgagcctgatggccaaaatcgggtccagtccagccgatgtttttagctgtcatatgacttgagcaagcattttaccttacttttgtttgccaaacgtaaacattggcatgtcagattcttttttaagcttctcgtctgagtacaaaaccaagagatgacagattattattaatgagaataaaacccagatgagggatgctagttagattctggaaatcgaactctcgcgcaacagcgagcacacctggctctggctgcagcctgcactagcaaccggagcctagctcggttatctgcatgtcaaattctgggagcaaaagcaagcagacatcaattgtgtacattctcaaatctgctttccatagatcctcagcgcacccagaaggtgatggaagaggccgtctcctttccagacgcgtctccggccttctcagcttgcgtgtgtacgtggccgcctctgccgctttatatggacaccaatcgtcatctccatctctaaacagactaacagagtgaggacacaaggacggtgaccaagcagagtgacgacgacgcgacaatcaagtccgtagctccggcggtagactttgatatggctttagctcgtctgtgcctcaacagggccatcgctggccgcgcgcaggcgctggcgaggccggcgctcgccgcagccccggcgacagatccgaaacttcactcgcttctctcaacctcggcagccgactctgccgcctcaggcgaggcaaaccgccgagatgtcgccgtgtcggagcgctccgcccccaatcgccgctgggcatggcgagacctccgcgacttcaccccgttcagcctcgtggacggtctcgggagcgcgctgtcgcaggtggcggagaccctgggccgcccgctggagcgcctggcgccgtcgcggctgctgtccgggaaggtgcgcgaggacgaggcgcggtaccggctgcgtttcgaggtgccgggcctcggcaagggcgacgtgcgcgtggccgtggaggacggggtgctggtcatcgagggcgagaagcgtgagcacggggaggagggcgacggcggcgagtggtggtcgaccagcgggtaccacgccagcctgctgctcccggacgacgcgcgcgccgaggggatcaccgccgaggtgaaggacggcgtgctgtacgtcaccgtgccgcgcaccggggagcgcaagcggaacgtcaccgaggtgaaggtgcagtgatgcgtgtcgtgtcactcaactcttgtgagtgcttcttgtttgtgagcccgtgactgttgtgtattttctccggaaataaaatttgtatcgtgtacagaaagcgaaagcacggc

SEQ ID NO: 49820 - DNA, 681 bp, Zea Mays
gctgcattttttttccatccagccgtgcggccgcaatgattcctccccgtctccccctcgccctccgaaagcgaagtgagcttctgcagataaggaaggaggccgacattatcgcaacacgccacctcatctaatcgaggcgagagacaggggaggaggaggaaaacggaagaaatcttcatcaagcaacaggaagcgagagcgtgcgatttcttttttcttcctttccggtgacgccaggtgaatcaccagccggccggtgcgccaaaggctagggttccgcggggcgcgggtgcgggctcgactttcgtagcctcgccgccggcgcgcgggaaccggatgctgctaagctgcgggtcgctctcctcctgggtgcgccgcttcgtcgcctgcgttggagcagtggttgttttggttgtgcccagcctactccgataatagctgttgatgagcccacaaaaggtttaagaattcaagggcgctcagtaaaaagacacaatttatctgacgacttttggagttcaagcccgcacgaaatggagaacagtgccttgcaatcccgacacagtatgtcctcaatcagcactgctgcacaacctaatgatcagcatgcttctggaagtagcagctccccaaatgaatttgtaaatcaagaaaattcagcaaactggcaattttaca

SEQ ID NO: 49821 - DNA, 2135 bp, Zea Mays
attggctctgcgctccatcccttggtgaaatctgttcctggttgttttggttgtgcccagcctactccgataatagctgttgatgagcccacaaaaggtttaagaattcaagggcgctcagtaaaaagacacaatttatctgacgacttttggagttcaagcccgcacgaaatggagaacagtgccttgcaatcccgacacagtatgtcctcaatcagcactgctgcacaacctaatgatcagcatgcttctggaagtagcagctccccaaatgaatttgtaaatcaaggtcttctactatggcaccagactagacagcagtggattggaaaacgaagacataattctcagggtcaacaaagtcaaggaccaaaaataagttgtaatgctacatacgagagcctgctcgggagctcgaaaccatttccacaaccgatccctcttggtgaaatggtgggtttcctcgtgatcagctgggagcaggaaggcctatacgattagagttggttattggaagtgtgctgtttcaagtcatgaatcgctgaaatgtacgcaacttctaggctgcgaaagcttgtgacctcatggatgtggactgtctcggagacaggatgacatccctcttatgcaaatgtaaaatattctttgttattttattactagtaattgtgtttacagcgttcagtgtaggagttcattgttttatactgagtacagttctctcacgttagctcgcgtaaaagaaatcagaacgtctgcagggatgccagggaactagatactgggagctgccttgagcctgatggccaaaatcgggtccagtccagccgatgtttttagctgtcatatgacttgagcaagcattttaccttacttttgtttgccaaacgtaaacattggcatgtcagattcttttttaagcttctcgtctgagtacaaaaccaagagatgacagattattattaatgagaataaaacccagatgagggatgctagttagattctggaaatcgaactctcgcgcaacagcgagcacacctggctctggctgcagcctgcactagcaaccggagcctagctcggttatctgcatgtcaaattctgggagcaaaagcaagcagacatcaattgtgtacattctcaaatctgctttccatagatcctcagcgcacccagaaggtgatggaagaggccgtctcctttccagacgcgtctccggccttctcagcttgcgtgtgtacgtggccgcctctgccgctttatatggacaccaatcgtcatctccatctctaaacagactaacagagtgaggacacaaggacggtgaccaagcagagtgacgacgacgcgacaatcaagtccgtagctccggcggtagactttgatatggctttagctcgtctgtgcctcaacagggccatcgctggccgcgcgcaggcgctggcgaggccggcgctcgccgcagccccggcgacagatccgaaacttcactcgcttctctcaacctcggcagccgactctgccgcctcaggcgaggcaaaccgccgagatgtcgccgtgtcggagcgctccgcccccaatcgccgctgggcatggcgagacctccgcgacttcaccccgttcagcctcgtggacggtctcgggagcgcgctgtcgcaggtggcggagaccctgggccgcccgctggagcgcctggcgccgtcgcggctgctgtccgggaaggtgcgcgaggacgaggcgcggtaccggctgcgtttcgaggtgccgggcctcggcaagggcgacgtgcgcgtggccgtggaggacggggtgctggtcatcgagggcgagaagcgtgagcacggggaggagggcgacggcggcgagtggtggtcgaccagcgggtaccacgccagcctgctgctcccggacgacgcgcgcgccgaggggatcaccgccgaggtgaaggacggcgtgctgtacgtcaccgtgccgcgcaccggggagcgcaagcggaacgtcaccgaggtgaaggtgcagtgatgcgtgtcgtgtcactcaactcttgtgagtgcttcttgtttgtgagcccgtgactgttgtgtattttctccggaaataaaatttgtatcgtgtacagaaagcgaaagcacggc

SEQ ID NO: 49822 - DNA, 3069 bp, Zea Mays
aggtcggtctcctcccctctccccaccgagatccggtggtgctcgttcttctggtcttgattcgagtgggaggggaaggggtcgcttcggtgttgggtgactcggagacatgcctgcgctctacgcttacggagatgacgggtgcctcgtctcggcgccggctgagctggccggactcttctgccgcggcgccgtgcagcagcggaagcgcacgctagtggccgcgtccgctgtggccgccgcggccgcggagtgcgtgagggcggccaagaagcagaggcagcttccgtcgctcgacgcgctcccggacgagtgcctcttcgagatcctgcgccgcgtgcccggccgtcgcggcgccgctgcctgcgtctcccgccgctggctcgcgctcctcggcagcatccgggtctccgagttcggccaggccgccgcggcggcggacaccccgtcgctgccggacctgaacgaggagttcgtcatggaggaggataaggaggaggtccccgcggatcggtgcgttgacagggtcctcgagggcaaggaggccaccgacgtccgcctggccgccatggccgtcgtcgccggatcctgtggcgggctggagaagctctccgtccgtggaagccacccggcccgtggcgtcacagaccaaggactctcggcggttgcacgcggcagccccaacctcagctcgctcgcgctctgggacgtgcctcttatcaccgacgctggacttgtggagatcgccgccgggtgccccttgctggagcgtctggatatttctcgatgccccctcatcacagacaagggcctcgccgcttttgcgcaggggtgccccgacttggtgtctctgaccatcgaggcatgctctagtgttggcgatgagggcttgagggcaattggccgcagctgcatgaaactgcaagctgtgaacatcaagaactgtcctcttgttggtgaccaaggcatctccagcctggtgtgctctgccactgcttcgcttgctaagatccggctccagggactgaacataactgatgcttcacttgctgtgattggatactacgggaaggccatcactgacctttcacttactcgtcttgctactgttggtgagaggggtttctgggtgatggctaatgctgctggcctgcagaatctcaggtgcatgagtgttacctcttgccctggagtcactgatcttgcgctcgcttctattgccaagttctgcccaagcttgaagaagctttacctgaggaagtgcggacatgtgtcggatgctggccttaaggccttcacagaatcagcaaaggtgtttgagaacttacagcttgaggaatgcaaccgtgttactcttgttggtattcttgctttcctcaactgcagccagaagttcagggctctctctttggtgaaatgcatggggatcaaggatatctgctctgtgccacaacttcctttttgccgttcacttcgtttccttacaatcaaggactgcccaggtttcaccaatgcaagcttggccgtggtagggatgatttgccctcagttggagcaggttgacttgagtggtcttggtgaggtcactgataatgggcttcttccattgatccagtcttctgaatctggtctgatcaaggttgacttgagtggttgcaagaacatcacagatgtggctgtctcctctctggtgaagcgacatggaaaatctctgaagaaagtcagccttgagggttgcagcaagataacagatgctagcctcttcaccatgtctgagagctgcaccgagcttgccgagcttgatctttcaaactgcatggttagtgactatggtgttgccatgctggcatctgcaaggcacctcaagcttcgtgttctctcactgtctggttgctctaaggttactcagaagagtgtgccgttcttgggcaaccttggccagtctctagagggcctcaatcttcagttctgcaacatgattggcaaccacaacatcgcatccctggagaaaaagctctggtggtgcgacatccttgcataggcagcagacaagatgagccattgctggaaggggctcatgtctactgggagccacttccagatgcagatatacgaccttagcagtagcacaaccagacggtcttcaggtttttggctcgcatgccggtcattatggtgggcttccacattgttcaaggaccagttgttttagggggcgctttctagcggagtgctcgtttttcacagatcacctctcagggggtttatctgttttttgagcctcggctgccatcactggcatcctgcccctagatccagacactggtccttgcccttacagtcataagttctttttaggttgccatagtgtccaggtcctctttcgttttactgttgcaggcgttggtgatccattgacagctctggactatcacagttctaactcaactgccagatgctgctggtgctggagcgtctgtggacttgtgcggtgtgtttggttgtcatgtttagagtcttgatgtgttgtgtgtgtgtgctgttctccatggtgtgtactggtcatgtagggttgcatcttttttacggtctctttgggatgcctggtgttcatggtgatcgtggccattgcgaggcgcttactagaagccttgccttgacagccttgtatggttgtttttttttgccagatccctgtttttacaggcagattgttgagtgctgtaagcttggcgaccctctatgaataaatgaaatatgtgtttatgtttgaaactttgtgcttgcctttgatttataacattgttgtgcatgcaagtagatcctcaaaatacacattgtctcgctgatgcattattatggacttatggtttagtttcagtgtaaaagccaaggcttatcttcaagtattgggcggcagctggctcatgcgccgtttgactcctttctaaaagagaattttgattgggcatttcctagttggtcgagttttgtactggctatacatatcatgtagtattatacagttttgtttgtcatgactatgatgcttgagttatggctttcatt

SEQ ID NO: 49823 - DNA, 1685 bp, Zea Mays
cgcgtcgtcgtgtgccacgacgccgggccatagtggaagaaagctgattgccgctgtaacgttctcatcccaaattcatgaagcatacaagtgaatactataaattgagtgccctccctgctccgctatctcgttacgaacccaatgcaccactcctcgctcccgatcgtccaccatagctcgcaaattcccgttttcccccaaatcagccaacaacaccgccgtgaggcatctcactgtggccagccgatctcagaacacgaggaagaaaccatggtagaaaaagaagttgtctcccaagctgaaaatcctccagccgagaacaacttttacttcgacatctacagagtggaccctgaacctcctgcaacacaaggcaagccccggtgcattatccctttccttgctgctttaaaacgttatcaccttatttgatgcattaggtgataggagttgtgtgtcaaacaattgatgtattttctttccatagaaaattgattaccattccttgattcccttttatgaaaatgatttttatgatgcttagtcttgctttagaaaaacaaatgttttgttttaaggcaaaaggtgatgcttcaccctggatgggaatttttacaaagaaaatacttgtgatgaggaatccatcatggccgtgatggtttcaacaacagaaaagaagtacctctgtcaggtaccaaactttgggatcttaaatgataaaaacgagaccgggctgtgacttgcacaagaaggaagtctcggtgtagtgtctccgtctaagtcgtttaaggatcgagccaatgtaggcttgatgatcgaggaccttttaactggccatatgcctcatcattagtaagctttgcctcggtcggaccaataccagaaaggctaccacacaatgggagtggagagatggcgagagtagcgtgtacccttcgtggcaagaggctggacggtggagtatatgtgctctcagttggcgtgaacccattctggtcttgagaaacctggtggcgagttgacatatgcaagggttaagtaagtgctacatatgtcgtgtggttggagatcgtcgttacttctcggacatgaagacttggtcactgacctacatgtagcaaacaagtgaactgaaggggtgataaaagaaggctagtataggccaagtgtttgatctaggatagaaaggactctagatgcaggtaactacttaacttgataattaaaaatggatttttaaggatccacggatagtaagcttttctgcaaaaagagtctttgaatcttgaaaggctttaccttgattcccaaaagccagcatatccttgagagtcttttcctttgacgggtaagacttgcaaaagtacactccgtactcagggtttttgaacccatgttgttgtaggtgatgaaacgacggagttctgctgtttctgttccaaggtggttcccaagcaggaggatgaacactaagccttatttggggagagtgttttgcctcctagtgatgtaataataagtacgcactcaagtactcggatatgtaataactactctttctatattttatatgaatgtaaattatgttattgtaatcatgtccgcttattctctactccgatggtgtgtaatgtctgtgtgatgggttaagcgctcttgggcaatatgatggagatacagat

SEQ ID NO: 49824 - DNA, 1401 bp, Zea Mays
cctaaactgggtggtgagggagtacgatgggagactgttaattcagcctcgagcatatttctatgcccattgcaaagattacaaggtcgagaattaagttggtatgccttcgataggtatggggaaatcaaaggcatcaaattcaagaaaatgatcggacatacttttcctaggttaggttgataattcaacatcgatcattaagaacaggcgaactggttaaggtacatcagcttgcaccaataaacaagggaatggttgtagaaggaaacatgactcgagattcttgtttcaagtccgggtacactttaggtcaacaaagatattatctaagcctttatttttatgtgtttggtcatggagtgatgaaggaaaatttaatttttgggtcatggttcactaaataagaacatggcctagtttaaggtttaggcaaataaatcaccaaccttctatcggtaaatcaagtacaagagcaaacacatataacacctaaatagattacctaaagaatggaagacaactatttccttagggttcataacacaacattacaccacaatatctacaatcactggttactggaataaaggcgagagaagcattttggatgtataggcgacaaacatgatgcaacaatcaggatgcatgctcgtcctatgcgtcctcactgattttgccaacataatatggcaataacgttctatctcggtggcatacttacgatcctcacggtattttgctaatcgtcaactacacatacgttttcgaggttagtgtacctgcagaaaattcatcacagtccaattttcccatgatgcaattcacacatgacagtttatcacagtttatactccatatattgctatatggaggccagctcatcattaagcgccaagccatgcataggcgccgttgccacactttaaccatagggcaactcattatggtaactcaccttcttacctgagcgtaggtgcatcgttacaagtacaatacacttctcagcattcccatgtttgtatacccatacacatccatggggtactgaattcccagaaaagtaaatactccacatcgcagctttcgtatatacatatgtagaacacgtatatagtcaaagcgccacaattaagcacttccctagaccgacgtttgttcggtcatgctctcacatctcaccttaccttgagcgtcgatccattcaaaactgaatggcctcaaaaataacaatacacatgtatgcaatatccacccgattgtgggttactggttttgaactaagccacctgatagtccttaatttagggcttaatagaggatgtcgctagcattatagtttttcaaaactgtttttcaaagccaaacaatgtgtttagttgaaaataggttttccaaaac

SEQ ID NO: 49825 - DNA, 5007 bp, Zea Mays
atttttccaccgacgtattcagatctttgcagccaccgttctatcttccttatcttcttctccagaacggcaatccttctgcccggtccttcctccagttcggctagcggggcagcgctccctgctgcttctccctccctggtactcctccagtcgcggcctcccactccccagccgatttctctgcgcgcgatactccctccagtcctccctgctcgcgtcgtgaattccctgccatggacgcgcgccgagctcctcgcgcgggtctctggtgcccagccgactagctcatctcccttttctctgatggcgcgcccaagcactgctcctgcaccgtgccgcgttccagctcagactaccctgctcctacgcccggttccagctcgctggagctcctgcgcacgtcggatcccagctcgcggagcttcctcctgctctgctcatcggtcgcgccctgctctcccagccatcttcctcttccccaccactggctcgaccgcacgccctcccagctcggccatggccaccgcgccgtggagccctgcgcaccgtggtgcttctttcctgcccctcccatggcggctcccctggatccctcctctgctcggtcgcctccctggagtccaagtccggacgccgctccagccttctcctttctctcttctctagccctgttcggcctcaagcttcagccatggtggcgtgtccatctccctggtatttccccaagccgcgcccctctgcttgactatggtcaccgtcacgcccaggatttggccgcgcctgtagtttccaaattcgtcttcagctcgcggcgctcatcttctgccccagtcctatgtcaacctcgctaaccacccatggttgatcctgtggttcgtgagggtgaatcacagtttgagattgaaaaaggagcttagaaggtgtagataatgaagctccagattgacgtttgccagatgttcggtggaacgcctgaatcaaagttcgtcgtcgttcttgtggattttggatcgatttggcttggttatagttttgtgctgctgttgatggtgttaagtgccggtgggatcggccttcttataagtctaagtaacttttctatactttttattgagcatggtcacttgagctagcatatattttaaacttataaataatttataatatttcaaagtttatttctttgaatcactattgtaatcactccgataaacataatgtaaatttgatgtaacttgtaaaatttggtaataagagttccgctgcaaaattgttggtgtgtgatttgtgtttactttatcatgcggtcctggttgtaagtggtttatccggggtcctaggggcacttggacagatcctattaagttatttggtgcacatgcatagccgtctgaggtctttgagacaaggacaggtgcatttgggcccaataacatgcgaggttctgccacagccactatatactttaccttgacttggagaaagtgggcgatctttgtaagtcgatcaataataacccagatggaatcaaacccttttgctgtcctgggtaatcccacaataaagtccatgctaatgtcctcccattttcaggtcgggataggtaaaaattgcaatgggccagcagttttcaaatgtatggctttgacatgtctacaagtgtcgcatcttgccacatagcgtgcaatttcaatcttcatcttcgtccaccaataatgttgctttagatcatgatacatcttagtgcttccgggatgaatagaatagcgactaagatgtgcttcatctaaaatttgctggcgaacctcatcactcttgggcacaactatgcggttgttaaaccatacaacgtgtcacacccatttccaaggggcagagccgggtgcatagcttatgtgtgacaggatctatttccacacatatattgacgtcacaagtgtaatatatcaaaagaacaatgcatacaagcgtaaataatgataatattaacatattacacttcgaatagacataatgtcttaacctttattcatcaaagtacagcgaaacaaggacatccatccacaggaagatgaccgggtgtatcactagactagcatccatggagttcagcatcatatcttcatctgcaacttctgatcaaaattaatcaagggtgagctcacttatggttagggctcagcaagtgggggaaaaactaatgcaggtttaacaaggtgaggctaaggttgagcagtaagccttttagttggttaacattttattaacaacacctgtcttactaataagtgtgaatcccaagtattcccattaaacaaaggtataatagtatatcaaaaacacttaagtgaaaccacttaagcaaaccattggcagatcatcggatctcgatttatttccatcttcaagttcaattatcatgtgaggagtccagtctgctcataaccgtgagcacggctgatatatcagttttacactctgcagaggtggcgcatctttacccatgagtcgcgattcccttttagcccgggttagctagacccgtattcacttccgaggtgaatgaccagggtctcactacgaggcttctccctagagtcctcattacgcaaatgttggaaatggtcaactgcataaggtacacctaccgtaaccaacttatagtccagtccacagggtaaagctttgggaactatgcctgtatccaatctgcctgagccggtactataagcgcttgccaggtgcccccgttcctagtcgaccatgaccaacacccaacataagacttccctagttatttagccaataccagagccatgatagttctcatggtagcactgttttcccgggtggtcactccatgttccaattaatatgcaataatcttttttaacataatcttgtttgggatcaaacagaatatgcagagggagaagtccacttgccttgcttattgaaaacttgaggttcttccacgaataggaatagatcttgattcttaactactagatcaaccacagaatatcacacaaacaaacaagaagaacaaacaccactcaataacatacaacattcaccatacgtgaagctaaaaaagagcttaacgaacagagcattcacttttcaaaaacgtcgcaagtaatggttctaataagaaggtattcttttcaaaaatgtgtgacctatactttataaaacaagacatgagcttaaaaatatcttaattaaaatatgcaaatattaggttcaccaatttaatcttttataatatgtcatatgtgatatgtctaagattaagggtttataagatgattaaacacgttataacgatattaaacctttttaaccttttagagaagatatgtgttatatatctaaggttaatgcgttatgaaataccttattaattttagaagcattatgaaacacattataattcattgttaaaccttcacttatgataaactaagatataagtttaattaggttttatatgaaaagatcattattattaaacacctatttatggaaagttatgatatatgctttaatgaacttttatgtaaaagacaatgaacaaacaattatattttatttttattagaaagtacatgtcctatattttattaagaaagctatatacaaaacaatatacaaactaacattattattaaagaacatgaacactaatttccttagtttattctttaggaaaaactaagttatataaataatatgaactaattttgattaaataattaattaagcctatataaccagttgtaaacaaatataaatctaattaactaggttatgagaggacataattactctattatttatctttacatttagtttagaaacaaatgacctagatatttaaaatgaatattatattcgttggtatgttattaactattgttttagttatgacgatgtgagcacttaattaagccattatataattattagaaaagttatatgacatattacttttaagtttctatttaatacggctatacttaaacatctataacgaaatatgatatctattaaaaagtcattttaaactagtaacaaattatctatttctttagtaagaaacctatgtttaccaacataactatcattttcttcattaggaaagtatgagtgtttagttaagtcattttaacatcattataaattctatgctttcggtttttttctcgtttcttttctaaataaattttgtaagtataactaaaaattgtttatttataactcttctgacattaatatactaagaattaattgtatattactaaatgggacttttaataacatattcatggttattataacataaatgaacattttactattctatgtacttgagtgctatacatatgaattcatttatcatgaatagtaacattttcatttgaccagaaaaatatgtgactcagtatttcttctatttttcatgcaaataagtttacacttaaaatactactaacaattatcgttccacacacaaaagcgaaattaattgtaaactgttgggggccttcggcttccgaaggtcctcaaaaacatgatttaacaatgcctctggagtataatgtgtggacagggatcttcgaacaagagcccacggtatgaagaagcacggaaataatacgaaggatgaaatgaaacaacgccgaagctacgcgcaagggagcttcggcatgatagcggaaaagagaaccgacttaaaagggaaaaggccatttagacctcgatggatcactatagaatcattagcaaatgtaaagggcatgggtgtaattttacatgggctgcgtcccgtgcctataaatagatgaacagtgcacccgtactgttcacgctgactgggcattcgcttttgcatcacgtttgtagccttactttcgtttgagccaaaggtacattcataaattgttatggttgatacaataatgaaaatgaaaataagttaatagtaatgtttaaagtgtt

SEQ ID NO: 49826 - DNA, 1641 bp, Zea Mays
ggacatcaggacaactagctctcctgatcaggtcgctggacctgatcgtgacctgcccgactaatcgcgattatgagagaaagccttaaaaatgcaaagagggattttaccaagactgaagacgacttgaaatctctgcagagcgtggggcaaataattggagaggttctccgacctcttgataatgaacgctttattgtgaaggccagcagtggtccccgatatgtggtcggttgccgaagtaaagtagacaaggagaagttgacatctggaactcgtgttgtacttgacatgacgaccttgacaataatgcgcactcttccacgggaggtggatccagtggtatataacatgcttcatgaagatccaggaaatgtcagttactctgctgtaggcggtttgtctgatcagattagggagctcagggagtccattgagttaccacttatgaaccctgaactctttcttcgggtgggaattaagcctcctaagggtgttctactctacggtcctccgggaactgggaagaccctattggcaagggctatcgccagtaacatcgatgccaactttttgaagattgtttcaagcgctattattgacaaatacattggagaaagtgctcgtttgattagagaaatgtttggctatgcacgtgatcaccaaccatgcatcatcttcatggatgaaattgatgccattggtgggcgaagattcagtgagggaactagtgctgatcgtgagatccagcggacgttgatggaactccttaatcaattagacggttttgatgagctcggaaaggtaaagatgatcatggccacgaatcgacctgatgttctggaccctgcgctcctgcgtcctggacgtttagacaggaagattgaaattccgctacccaacgagcaatcaagaatggaagttctaaaaatccatgcagctggtattgccaagcatggggaaattgattatgaagcagtcgtgaaactagctgaaggtttcaatggtgctgatcttcggaacgtgtgcactgaagctggtatggctgcaattcgtgcagagagagattatgtagtccacgaagacttcatgaaggctgtgcggaagctaaatgatgcgaaaaagctggaatcaagtgcgcattacagcgcagattttggcaaagagtaatgtatgatgctggacagatgcataaggcgtgtatcatcagggagctctgtcagatgcgatgcaaaagcgaaagaaaccagctatttatgttcaggctccaggcagctccactttttcctgatattcacaattttagtgaggaggattgtcaagctgaccagtgggggaaatcagtcgagaatttagtagttctgcgccagatggcctttgcttctgtaaatcgtacgtaatctgcttccgtgcgtcttagtctggtaataactctggttggacctgttctgtttccatgtacttttggacagtgtgcctgactccgcggtaacagaggaaaaaagaacattttgtattcatcctgaactacaattccccctcatttgtactattcacactcccattactgcgtcagggagtcgatcagacatgtgattaatttcggttatacgtttcgtcaaccaaaggcacgggtccata

SEQ ID NO: 49827 - DNA, 1657 bp, Zea Mays
atttgcagttaaacaattaaaggggcatcaatagactctggcaattcttcattttctttttggagtgcggaacttgaattttcttagagtgagagaaagccttaaaaatgcaaagagggattttaccaagactgaagacgacttgaaatctctgcagagcgtggggcaaataattggagaggttctccgacctcttgataatgaacgctttattgtgaaggccagcagtggtccccgatatgtggtcggttgccgaagtaaagtagacaaggagaagttgacatctggaactcgtgttgtacttgacatgacgaccttgacaataatgcgcactcttccacgggaggtggatccagtggtatataacatgcttcatgaagatccaggaaatgtcagttactctgctgtaggcggtttgtctgatcagattagggagctcagggagtccattgagttaccacttatgaaccctgaactctttcttcgggtgggaattaagcctcctaagggtgttctactctacggtcctccgggaactgggaagaccctattggcaagggctatcgccagtaacatcgatgccaactttttgaagattgtttcaagcgctattattgacaaatacattggagaaagtgctcgtttgattagagaaatgtttggctatgcacgtgatcaccaaccatgcatcatcttcatggatgaaattgatgccattggtgggcgaagattcagtgagggaactagtgctgatcgtgagatccagcggacgttgatggaactccttaatcaattagacggttttgatgagctcggaaaggtaaagatgatcatggccacgaatcgacctgatgttctggaccctgcgctcctgcgtcctggacgtttagacaggaagattgaaattccgctacccaacgagcaatcaagaatggaagttctaaaaatccatgcagctggtattgccaagcatggggaaattgattatgaagcagtcgtgaaactagctgaaggtttcaatggtgctgatcttcggaacgtgtgcactgaagctggtatggctgcaattcgtgcagagagagattatgtagtccacgaagacttcatgaaggctgtgcggaagctaaatgatgcgaaaaagctggaatcaagtgcgcattacagcgcagattttggcaaagagtaatgtatgatgctggacagatgcataaggcgtgtatcatcagggagctctgtcagatgcgatgcaaaagcgaaagaaaccagctatttatgttcaggctccaggcagctccactttttcctgatattcacaattttagtgaggaggattgtcaagctgaccagtgggggaaatcagtcgagaatttagtagttctgcgccagatggcctttgcttctgtaaatcgtacgtaatctgcttccgtgcgtcttagtctggtaataactctggttggacctgttctgtttccatgtacttttggacagtgtgcctgactccgcggtaacagaggaaaaaagaacattttgtattcatcctgaactacaattccccctcatttgtactattcacactcccattactgcgtcagggagtcgatcagacatgtgattaatttcggttatacgtttcgtcaaccaaaggcacgggtccata

SEQ ID NO: 49828 - DNA, 1612 bp, Zea Mays
attcttcattttctttttggagtgcggaacttgaattttcttagagtgagagaaagccttaaaaatgcaaagagggattttaccaagactgaagacgacttgaaatctctgcagagcgtggggcaaataattggagaggttctccgacctcttgataatgaacgctttattgtgaaggccagcagtggtccccgatatgtggtcggttgccgaagtaaagtagacaaggagaagttgacatctggaactcgtgttgtacttgacatgacgaccttgacaataatgcgcactcttccacgggagggatccagtggtatataacatgcttcatgaagatccaggaaatgtcagttactctgctgtaggcggtttgtctgatcagattagggagctcagggagtccattgagttaccacttatgaaccctgaactctttcttcgggtgggaattaagcctcctaagggtgttctactctacggtcctccgggaactgggaagaccctattggcaagggctatcgccagtaacatcgatgccaactttttgaagattgtttcaagcgctattattgacaaatacattggagaaagtgctcgtttgattagagaaatgtttggctatgcacgtgatcaccaaccatgcatcatcttcatggatgaaattgatgccattggtgggcgaagattcagtgagggaactagtgctgatcgtgagatccagcggacgttgatggaactccttaatcaattagacggttttgatgagctcggaaaggtaaagatgatcatggccacgaatcgacctgatgttctggaccctgcgctcctgcgtcctggacgtttagacaggaagattgaaattccgctacccaacgagcaatcaagaatggaagttctaaaaatccatgcagctggtattgccaagcatggggaaattgattatgaagcagtcgtgaaactagctgaaggtttcaatggtgctgatcttcggaacgtgtgcactgaagctggtatggctgcaattcgtgcagagagagattatgtagtccacgaagacttcatgaaggctgtgcggaagctaaatgatgcgaaaaagctggaatcaagtgcgcattacagcgcagattttggcaaagagtaatgtatgatgctggacagatgcataaggcgtgtatcatcagggagctctgtcagatgcgatgcaaaagcgaaagaaaccagctatttatgttcaggctccaggcagctccactttttcctgatattcacaattttagtgaggaggattgtcaagctgaccagtgggggaaatcagtcgagaatttagtagttctgcgccagatggcctttgcttctgtaaatcgtacgtaatctgcttccgtgcgtcttagtctggtaataactctggttggacctgttctgtttccatgtacttttggacagtgtgcctgactccgcggtaacagaggaaaaaagaacattttgtattcatcctgaactacaattccccctcatttgtactattcacactcccattactgcgtcagggagtcgatcagacatgtgattaatttcggttatacgtttcgtcaaccaaaggcacgggtccata

SEQ ID NO: 49829 - DNA, 2101 bp, Zea Mays
gatcgagccggtctaactacctctcccgttcacctcccactgccgtttacctcacgctctctcgtggtcgttgcttcctggcggcggcgccgccctcttcgtcgggccattcaccggcgacgagcattcatctgcaccgaggctgcaaaggacacgggtgctaagaagtacaagtaccctgatgtatacgacccatacgggcctatgtcgctaccgtcagagaaagttgtggatctagctgaccgcatcgctgctctccctcctgaggagatcaaacagattgctccagcccttctattcagactgaaccaagagccgccacaggctatctccggccagggtttcagttttggtgctcagggtggtgcgggggtcggtgccggaaaggctgaggaaaagaaagctgagaagacagtcttcgatgtcaagttggagaaattcgatgctgctgcaaagatcaagattatcaaggagatcaggacctttacggatttggggctgaaggaggcaaaggagctagtggagaaggccccagtcattctgaagcaatcgctcacaaaggacgaagcagaagcaatcatagggaagataaaggcagctggcggtgttgctgtcatggagtgaacgaagggatgaccatctcgacacaacacacttttatttcctatttttgttgccatgatcaagcatttgaattgcacattgcagtgcctttatgctgatggagaaaatagtttacatctacgttggtaaccaaggcgagagggaaactagagatttagttgctatgatgatattcatgacttgttctagaataagcagttctttgggctctacacaacttatttggtggagtgaatggatgttgccatcagggccaataccatgaatctgatgttcttgttgtatcctctatgagttatgaacacttcgcagttgcttaggtaccctgatatattctctatgtcagttacattgcagtgtaaaaaaagttctgttgttgtagatctggtatggttggatttagtttccagtaacaaaaactttgattcagttgaagtgttcctcattacaaatttgtaaagctggataagcattcgatgtcattcatatcaacataccagtggcgcaaggacaacatcattgccttgcccttcaaatttgaaccctatcctgcatgtgactccctcattccatcctccgtgcttggaggaagaagcaaaagtcagtcccgtcatcctcgatgctattccctccactgtcctcttttatctccggcggcgcaccaggcttgaagacaaagactgcctgcgcacctggtccggcgaagagccagtcgtgaacgtcccagatcacctgcaccggcgcctggtcgacgagcagcgtctcgttgccccggaacttccactgcaggctcttgacgtgcagcagcacgaagccgtccaccgtgatccacatttcgggatacctgctggagcccgcggcggcgagcgtgcagtcgatgacgatctcgtgctccttgctcctcttggcgacgagccgcgcgcgcgccgcgaagctgcggccgccgaacacgctctcccggcggcacaccagcacggcgtcctccagcgacgcgcgcgacttggtccgtttgcacgcgtccttcatgccgtcgccgagcaggaggacgacttcgtcgttgctcaccagagcgatgtagtagccaccggcgggctccgcgccgctgcccgccgcgaacttggccgagcgcaggtcccagaacatgtcgacgtggtcgccgccgcccacgtcgagcgccttgccgcccttcttgctccagaacggccaaggcttcagctccaccttgtgggtgaccggcacgtcgccgtcgatggagatggtgaaggattggttgatgaggctcctgctccaggtggcagtgacgaggcgctgttgatcttggcgaggaacacggaaacagtggagcactgcgccgcggccgccgccgaggacggcgccccggccctgccggtggcggagtcgtcgcaggacgtcgcggcgttgctgcacccgacgcgctcctccatggctcgcaggatttggatctcttgtgcatgat

SEQ ID NO: 49830 - DNA, 2146 bp, Zea Mays
gatcgagccggtctaactacctctcccgttcacctcccactgccgtttacctcacgctctctcgtggtcgttgcttcctggcggcggcgccgccctcttcgtcgggccattcaccggcgacgagcattcatctggaggagagcatcacactcatctaactgatattaggatgagtctatcaccgaggctgcaaaggacacgggtgctaagaagtacaagtaccctgatgtatacgacccatacgggcctatgtcgctaccgtcagagaaagttgtggatctagctgaccgcatcgctgctctccctcctgaggagatcaaacagattgctccagcccttctattcagactgaaccaagagccgccacaggctatctccggccagggtttcagttttggtgctcagggtggtgcgggggtcggtgccggaaaggctgaggaaaagaaagctgagaagacagtcttcgatgtcaagttggagaaattcgatgctgctgcaaagatcaagattatcaaggagatcaggacctttacggatttggggctgaaggaggcaaaggagctagtggagaaggccccagtcattctgaagcaatcgctcacaaaggacgaagcagaagcaatcatagggaagataaaggcagctggcggtgttgctgtcatggagtgaacgaagggatgaccatctcgacacaacacacttttatttcctatttttgttgccatgatcaagcatttgaattgcacattgcagtgcctttatgctgatggagaaaatagtttacatctacgttggtaaccaaggcgagagggaaactagagatttagttgctatgatgatattcatgacttgttctagaataagcagttctttgggctctacacaacttatttggtggagtgaatggatgttgccatcagggccaataccatgaatctgatgttcttgttgtatcctctatgagttatgaacacttcgcagttgcttaggtaccctgatatattctctatgtcagttacattgcagtgtaaaaaaagttctgttgttgtagatctggtatggttggatttagtttccagtaacaaaaactttgattcagttgaagtgttcctcattacaaatttgtaaagctggataagcattcgatgtcattcatatcaacataccagtggcgcaaggacaacatcattgccttgcccttcaaatttgaaccctatcctgcatgtgactccctcattccatcctccgtgcttggaggaagaagcaaaagtcagtcccgtcatcctcgatgctattccctccactgtcctcttttatctccggcggcgcaccaggcttgaagacaaagactgcctgcgcacctggtccggcgaagagccagtcgtgaacgtcccagatcacctgcaccggcgcctggtcgacgagcagcgtctcgttgccccggaacttccactgcaggctcttgacgtgcagcagcacgaagccgtccaccgtgatccacatttcgggatacctgctggagcccgcggcggcgagcgtgcagtcgatgacgatctcgtgctccttgctcctcttggcgacgagccgcgcgcgcgccgcgaagctgcggccgccgaacacgctctcccggcggcacaccagcacggcgtcctccagcgacgcgcgcgacttggtccgtttgcacgcgtccttcatgccgtcgccgagcaggaggacgacttcgtcgttgctcaccagagcgatgtagtagccaccggcgggctccgcgccgctgcccgccgcgaacttggccgagcgcaggtcccagaacatgtcgacgtggtcgccgccgcccacgtcgagcgccttgccgcccttcttgctccagaacggccaaggcttcagctccaccttgtgggtgaccggcacgtcgccgtcgatggagatggtgaaggattggttgatgaggctcctgctccaggtggcagtgacgaggcgctgttgatcttggcgaggaacacggaaacagtggagcactgcgccgcggccgccgccgaggacggcgccccggccctgccggtggcggagtcgtcgcaggacgtcgcggcgttgctgcacccgacgcgctcctccatggctcgcaggatttggatctcttgtgcatgat

SEQ ID NO: 49831 - DNA, 3990 bp, Zea Mays
cgcccactacctcccaatcccaagtcccaactcgctccccattcgcctccctcccacccggctcctgtcctcttcccctccccaaccagcctccctcaaattcgccgatccccaaatcccgctcccctacaccacggtagctgagaagacggccggcgaagatgatgttcacggagggcctcgacgagtcggcgatcagctggatcaagcagggcatggactccccagcctcagccccagcccccgcacccccacggtccccgctgtcggagcgcccgccgctgggacaggtggcggcggcgccgaggagccccgcgctgcacgccaggccgtgcggggccggcgcaggcgtcggtttcttctcccccaagggcctcccgcaagtgcgggtgaacgggacgcaccactcgggcctgctcggccgccactccgtgctcctctcggtcgcggactccgatgagtgggaggacgagagcgtcgcatcgtggggcatgcccgaggactgctacggcggcggcaacttctccgagaccggcgacgaggcgtgctccagcgactccagactcatgcggagggccatggaccgctgcggcggagggtgggatgaggaggtcacgtcgcagctgagcaggaagggcggcggcggcgggatcgtgcgggggcagtccaaggagttcctgcgggtggaagtgcgaggtgcgggagcgttcgatgccgggaagtgctccggttccggggcacaacatccagtggactccatctcgcagggacgctactttgaggagcaggtattggggactcctagtgcccctccaattgcaggggtcgaggaggatgttatgtttcatgcagttgaaagggctgaaatggatggagggcttgagaggaatggagtatcatcagtagcagatatactggcccaagatgttcatgagcttcatacgagctcaattgttcatgaagatggcgttgagaataacttattagctcagataccgagcttcactattaagttatgtctgaatgcatgggcaagaaactgcatggaagctccagacttccttcgggatgagtgcatggtactgcgaagtgcctttggaatacagaacttcttgcttcatccaaaacacaatagtcaagttgatggtaaacaaatgtatgataaggatggaaattgtactataaagggaaggaaacttgttaaacagattgagattgaagtaaaaaagatacgggttgtacctcaaagaccaaagcttcgagcaacatcatcctttagaaatctctacatgcaagctggcagtgagtatgtcagacagatttctaagattctgaagagccaggttacgatgttgacatccacatcatctacatctttgccggaagaaatgttcacatgcactctagaactgcaaagttcttgcaaaggtcataagagagattcaatttctccacaatatttgaagccagggactggtgaatctcaactcttttatctagagagccagggggatgttattcttgttgaagtacaagacaacaatagggttgtcataggccgtgcaaaaattcaagtttcatcattgactgatactcaacaggatgaaatcatcaggtggtggcctctatatcttgatgatcaagattgtgtcggaaaagttcagcttggtatgaatttatccatgtcttccaataactatgggtccgaaaagatgctgcaaggtggccctgcagtggataccatcatatatgacatggttctggaagcggcaatgagggctcaaaatttcaacagcaaaatgcttcatatcaatggtccatggatttggctgttggacgagttttctgattactatggaatatctgatgcatatagaaaattgaggtacttgtcttacatcatgaacgtggcaataccaaccaaggattgtttggaacttatatatgaacttatcgttccagtcacaaaagcacgagaagatagaactttaacaagacaagagcgaagtattttgatagactgtgaagatcggattaagagtctccttgcagctctgtttgaaaattacaaatcactggatgaatattctccaactggcttgtcagatttatttggccccataacagattctgctgcaccagctttggcacctgctgttcagatattcagtgtactgcatgacattctctccaaagaagcacaagacatacttaggaactatttgcagattgctgctgcgaaaaggtgcaggaggcatatgatcgagacagatgaattcttatcaagcaataacgacagtcttcttacggaccctatgactatatctgctgcatatcttaaaatgaagacattgtgcattaacatgagtcgtgaaattcaagctgacattaagattcacaaccagaatatacttccaagttccatagatctgccaaacatagcagcatccctatatagtaccgaactctgcaagcggctgaaaggttttctttcttcaagtcccccatcaagaccagtacaacatgttgctgaactgataaccgcaacttctgagtttgagagagatcttgaatcttggcaagtgagacctgttcatggcggcgtaatttcgagacagctctttcatgactacatcatggtgtggattgaagacactcgattgcagttacttgataattgcaaagctgagaagatatcatgccctgccgtgtcaacagtctcgccatttgttgagcaaatgtatgagcaaataaaagagagcataaatgagtatggagtggttatcaatagatggcctcaatatctgatgagtttagagagtgctgttgctgatgttgagagagaaattatgaaggcactggagaagcaatacatggatattctaatgcccctaagagatggcataccagaaaaaattgagaagcaggtccagagattaacaagaagacaatctatagctccctatgttgtgccaaatcagttaggagcattcatgaacacagtaaaaaggatgctagatgtgttacactgccgagtcgaagacattctcaagtcatgggcagcgtaccttactatatcatgtgggaacactgtttttggagagcaaatgaactccatcacagtcatgctgaagaagaagtacaagaaatacctgcaagcgatagtggacaagcttgtcagcaacacacaagctaatcggaatacgagactcaagcgaattcttgaagaaacaagagaggctgatggtgaaagtgatatacgagataggatgcaggctgtccgcctccagctctcggattcaattcacaatctgcatgaggtcttctccagcagaatatttgttgctatttgccgaggtttctgggatcggttaggccagattgtgttgagatttcttgagagcagaaaggagaacaggatttggtaccgaggatctgactatgctctagggatccttgacgatgtctttgcatcggagatgcaaaagctgctgggcagcgctctgcaggacaaggacctggatccaccgcagtcagtgattgacgcccgctccatcctctgctagggcgtgtggcaacagttttctctacagattgcttcagcaaaaggccggcgttggtttagtttttgttttatatatattccttggtgtgcagaatatgtacagatggagacaaccgattattcctgttcatagtgttttgctgaattgttcaaataaatagtggttaaaaaaactgtagcccgtaaacaggttagagaacacaatctgtacttgattgtgtactttctacctcagttcttgccttccccatctaattccatccaaatattgtaccctgaattgagtgaaccttgatacaactgattcttgttggctcatatgtgttcaagcctgcaatttggagaacatcttttccccaatttacctcacctgtgccatggccacaacgactgagctctccacatcgctggagtatgtgtcagtt

SEQ ID NO: 49832 - DNA, 4038 bp, Zea Mays
cgcccactacctcccaatcccaagtcccaactcgctccccattcgcctccctcccacccggctcctgtcctcttcccctccccaaccagcctccctcaaattcgccgatccccaaatcccgctcccctacaccacggtagctgagaagacggccggcgaagatgatgttcacggagggcctcgacgagtcggcgatcagctggatcaagcagggcatggactccccagcctcagccccagcccccgcacccccacggtccccgctgtcggagcgcccgccgctgggacaggtggcggcggcgccgaggagccccgcgctgcacgccaggccgtgcggggccggcgcaggcgtcggtttcttctcccccaagggcctcccgcaagtgcgggtgaacgggacgcaccactcgggcctgctcggccgccactccgtgctcctctcggtcgcggactccgatgagtgggaggacgagagcgtcgcatcgtggggcatgcccgaggactgctacggcggcggcaacttctccgagaccggcgacgaggcgtgctccagcgactccagactcatgcggagggccatggaccgctgcggcggagggtgggatgaggaggtcacgtcgcagctgagcaggaagggcggcggcggcgggatcgtgcgggggcagtccaaggagttcctgcgggtggaagtgcgaggtgcgggagcgttcgatgccgggaagtgctccggttccggggcacaacatccagtggactccatctcgcagggacgctactttgaggagcaggtattggggactcctagtgcccctccaattgcaggggtcgaggaggatgttatgtttcatgcagttgaaagggctgaaatggatggagggcttgagaggaatggagtatcatcagtagcagatatactggcccaagatgttcatgagcttcatacgagctcaattgttcatgaagatggcgttgagaataacttattagctcagataccgagcttcactattaatgtccaaaatgcatggcaatcctttgttgcatatgatgcatgcttcaggttatgtctgaatgcatgggcaagaaactgcatggaagctccagacttccttcgggatgagtgcatggtactgcgaagtgcctttggaatacagaacttcttgcttcatccaaaacacaatagtcaagttgatggtaaacaaatgtatgataaggatggaaattgtactataaagggaaggaaacttgttaaacagattgagattgaagtaaaaaagatacgggttgtacctcaaagaccaaagcttcgagcaacatcatcctttagaaatctctacatgcaagctggcagtgagtatgtcagacagatttctaagattctgaagagccaggttacgatgttgacatccacatcatctacatctttgccggaagaaatgttcacatgcactctagaactgcaaagttcttgcaaaggtcataagagagattcaatttctccacaatatttgaagccagggactggtgaatctcaactcttttatctagagagccagggggatgttattcttgttgaagtacaagacaacaatagggttgtcataggccgtgcaaaaattcaagtttcatcattgactgatactcaacaggatgaaatcatcaggtggtggcctctatatcttgatgatcaagattgtgtcggaaaagttcagcttggtatgaatttatccatgtcttccaataactatgggtccgaaaagatgctgcaaggtggccctgcagtggataccatcatatatgacatggttctggaagcggcaatgagggctcaaaatttcaacagcaaaatgcttcatatcaatggtccatggatttggctgttggacgagttttctgattactatggaatatctgatgcatatagaaaattgaggtacttgtcttacatcatgaacgtggcaataccaaccaaggattgtttggaacttatatatgaacttatcgttccagtcacaaaagcacgagaagatagaactttaacaagacaagagcgaagtattttgatagactgtgaagatcggattaagagtctccttgcagctctgtttgaaaattacaaatcactggatgaatattctccaactggcttgtcagatttatttggccccataacagattctgctgcaccagctttggcacctgctgttcagatattcagtgtactgcatgacattctctccaaagaagcacaagacatacttaggaactatttgcagattgctgctgcgaaaaggtgcaggaggcatatgatcgagacagatgaattcttatcaagcaataacgacagtcttcttacggaccctatgactatatctgctgcatatcttaaaatgaagacattgtgcattaacatgagtcgtgaaattcaagctgacattaagattcacaaccagaatatacttccaagttccatagatctgccaaacatagcagcatccctatatagtaccgaactctgcaagcggctgaaaggttttctttcttcaagtcccccatcaagaccagtacaacatgttgctgaactgataaccgcaacttctgagtttgagagagatcttgaatcttggcaagtgagacctgttcatggcggcgtaatttcgagacagctctttcatgactacatcatggtgtggattgaagacactcgattgcagttacttgataattgcaaagctgagaagatatcatgccctgccgtgtcaacagtctcgccatttgttgagcaaatgtatgagcaaataaaagagagcataaatgagtatggagtggttatcaatagatggcctcaatatctgatgagtttagagagtgctgttgctgatgttgagagagaaattatgaaggcactggagaagcaatacatggatattctaatgcccctaagagatggcataccagaaaaaattgagaagcaggtccagagattaacaagaagacaatctatagctccctatgttgtgccaaatcagttaggagcattcatgaacacagtaaaaaggatgctagatgtgttacactgccgagtcgaagacattctcaagtcatgggcagcgtaccttactatatcatgtgggaacactgtttttggagagcaaatgaactccatcacagtcatgctgaagaagaagtacaagaaatacctgcaagcgatagtggacaagcttgtcagcaacacacaagctaatcggaatacgagactcaagcgaattcttgaagaaacaagagaggctgatggtgaaagtgatatacgagataggatgcaggctgtccgcctccagctctcggattcaattcacaatctgcatgaggtcttctccagcagaatatttgttgctatttgccgaggtttctgggatcggttaggccagattgtgttgagatttcttgagagcagaaaggagaacaggatttggtaccgaggatctgactatgctctagggatccttgacgatgtctttgcatcggagatgcaaaagctgctgggcagcgctctgcaggacaaggacctggatccaccgcagtcagtgattgacgcccgctccatcctctgctagggcgtgtggcaacagttttctctacagattgcttcagcaaaaggccggcgttggtttagtttttgttttatatatattccttggtgtgcagaatatgtacagatggagacaaccgattattcctgttcatagtgttttgctgaattgttcaaataaatagtggttaaaaaaactgtagcccgtaaacaggttagagaacacaatctgtacttgattgtgtactttctacctcagttcttgccttccccatctaattccatccaaatattgtaccctgaattgagtgaaccttgatacaactgattcttgttggctcatatgtgttcaagcctgcaatttggagaacatcttttccccaatttacctcacctgtgccatggccacaacgactgagctctccacatcgctggagtatgtgtcagtt

SEQ ID NO: 49833 - DNA, 3570 bp, Zea Mays
cgcccactacctcccaatcccaagtcccaactcgctccccattcgcctccctcccacccggctcctgtcctcttcccctccccaaccagcctccctcaaattcgccgatccccaaatcccgctcccctacaccacggtagctgagaagacggccggcgaagatgatgttcacggagggcctcgacgagtcggcgatcagctggatcaagcagggcatggactccccagcctcagccccagcccccgcacccccacggtccccgctgtcggagcgcccgccgctgggacaggtggcggcggcgccgaggagccccgcgctgcacgccaggccgtgcggggccggcgcaggcgtcggtttcttctcccccaagggcctcccgcaagtgcgggtgaacgggacgcaccactcgggcctgctcggccgccactccgtgctcctctcggtcgcggactccgatgagtgggaggacgagagcgtcgcatcgtggggcatgcccgaggactgctacggcggcggcaacttctccgagaccggcgacgaggcgtgctccagcgactccagactcatgcggagggccatggaccgctgcggcggagggtgggatgaggaggtcacgtcgcagctgagcaggaagggcggcggcggcgggatcgtgcgggggcagtccaaggagttcctgcgggtggaagtgcgaggtgcgggagcgttcgatgccgggaagtgctccggttccggggcacaacatccagtggactccatctcgcagggacgctactttgaggagcaggtattggggactcctagtgcccctccaattgcaggggtcgaggaggatgttatgtttcatgcagttgaaagggctgaaatggatggagggcttgagaggaatggagtatcatcagtagcagatatactggcccaagatgttcatgagcttcatacgagctcaattgttcatgaagatggcgttgagaataacttattagctcagataccgagcttcactattaaaatacagaacttcttgcttcatccaaaacacaatagtcaagttgatggtaaacaaatgtatgataaggatggaaattgtactataaagggaaggaaacttgttaaacagattgagattgaagaaatgttcacatgcactctagaactgcaaagttcttgcaaaggtcataagagagattcaatttctccacaatatttgaagccagggactggtgaatctcaactcttttatctagagagccagggggatgttattcttgttgaagtacaagacaacaatagggttgtcataggccgtgcaaaaattcaagtttcatcattgactgatactcaacaggatgaaatcatcaggtggtggcctctatatcttgatgatcaagattgtgtcggaaaagttcagcttggtatgaatttatccatgtcttccaataactatgggtccgaaaagatgctgcaaggtggccctgcagtggataccatcatatatgacatggttctggaagcggcaatgagggctcaaaatttcaacagcaaaatgcttcatatcaatggtccatggatttggctgttggacgagttttctgattactatggaatatctgatgcatatagaaaattgaggtacttgtcttacatcatgaacgtggcaataccaaccaaggattgtttggaacttatatatgaacttatcgttccagtcacaaaagcacgagaagatagaactttaacaagacaagagcgaagtattttgatagactgtgaagatcggattaagagtctccttgcagctctgtttgaaaattacaaatcactggatgaatattctccaactggcttgtcagatttatttggccccataacagattctgctgcaccagctttggcacctgctgttcagatattcagtgtactgcatgacattctctccaaagaagcacaagacatacttaggaactatttgcagattgctgctgcgaaaaggtgcaggaggcatatgatcgagacagatgaattcttatcaagcaataacgacagtcttcttacggaccctatgactatatctgctgcatatcttaaaatgaagacattgtgcattaacatgagtcgtgaaattcaagctgacattaagattcacaaccagaatatacttccaagacctgttcatggcggcgtaatttcgagacagctctttcatgactacatcatggtgtggattgaagacactcgattgcagttacttgataattgcaaagctgagaagatatcatgccctgccgtgtcaacagtctcgccatttgttgagcaaatgtatgagcaaataaaagagagcataaatgagtatggagtggttatcaatagatggcctcaatatctgatgagtttagagagtgctgttgctgatgttgagagagaaattatgaaggcactggagaagcaatacatggatattctaatgcccctaagagatggcataccagaaaaaattgagaagcaggtccagagattaacaagaagacaatctatagctccctatgttgtgccaaatcagttaggagcattcatgaacacagtaaaaaggatgctagatgtgttacactgccgagtcgaagacattctcaagtcatgggcagcgtaccttactatatcatgtgggaacactgtttttggagagcaaatgaactccatcacagtcatgctgaagaagaagtacaagaaatacctgcaagcgatagtggacaagcttgtcagcaacacacaagctaatcggaatacgagactcaagcgaattcttgaagaaacaagagaggctgatggtgaaagtgatatacgagataggatgcaggctgtccgcctccagctctcggattcaattcacaatctgcatgaggtcttctccagcagaatatttgttgctatttgccgaggtttctgggatcggttaggccagattgtgttgagatttcttgagagcagaaaggagaacaggatttggtaccgaggatctgactatgctctagggatccttgacgatgtctttgcatcggagatgcaaaagctgctgggcagcgctctgcaggacaaggacctggatccaccgcagtcagtgattgacgcccgctccatcctctgctagggcgtgtggcaacagttttctctacagattgcttcagcaaaaggccggcgttggtttagtttttgttttatatatattccttggtgtgcagaatatgtacagatggagacaaccgattattcctgttcatagtgttttgctgaattgttcaaataaatagtggttaaaaaaactgtagcccgtaaacaggttagagaacacaatctgtacttgattgtgtactttctacctcagttcttgccttccccatctaattccatccaaatattgtaccctgaattgagtgaaccttgatacaactgattcttgttggctcatatgtgttcaagcctgcaatttggagaacatcttttccccaatttacctcacctgtgccatggccacaacgactgagctctccacatcgctggagtatgtgtcagtt

SEQ ID NO: 49834 - DNA, 3946 bp, Zea Mays
cgcccactacctcccaatcccaagtcccaactcgctccccattcgcctccctcccacccggctcctgtcctcttcccctccccaaccagcctccctcaaattcgccgatccccaaatcccgctcccctacaccacggtagctgagaagacggccggcgaagatgatgttcacggagggcctcgacgagtcggcgatcagctggatcaagcagggcatggactccccagcctcagccccagcccccgcacccccacggtccccgctgtcggagcgcccgccgctgggacaggtggcggcggcgccgaggagccccgcgctgcacgccaggccgtgcggggccggcgcaggcgtcggtttcttctcccccaagggcctcccgcaagtgcgggtgaacgggacgcaccactcgggcctgctcggccgccactccgtgctcctctcggtcgcggactccgatgagtgggaggacgagagcgtcgcatcgtggggcatgcccgaggactgctacggcggcggcaacttctccgagaccggcgacgaggcgtgctccagcgactccagactcatgcggagggccatggaccgctgcggcggagggtgggatgaggaggtcacgtcgcagctgagcaggaagggcggcggcggcgggatcgtgcgggggcagtccaaggagttcctgcgggtggaagtgcgaggtgcgggagcgttcgatgccgggaagtgctccggttccggggcacaacatccagtggactccatctcgcagggacgctactttgaggagcaggtattggggactcctagtgcccctccaattgcaggggtcgaggaggatgttatgtttcatgcagttgaaagggctgaaatggatggagggcttgagaggaatggagtatcatcagtagcagatatactggcccaagatgttcatgagcttcatacgagctcaattgttcatgaagatggcgttgagaataacttattagctcagataccgagcttcactattaagttatgtctgaatgcatgggcaagaaactgcatggaagctccagacttccttcgggatgagtgcatggtactgcgaagtgcctttggaatacagaacttcttgcttcatccaaaacacaatagtcaagttgatggtaaacaaatgtatgataaggatggaaattgtactataaagggaaggaaacttgttaaacagattgagattgaagtaaaaaagatacgggttgtacctcaaagaccaaagcttcgagcaacatcatcctttagaaatctctacatgcaagctggcagtgagtatgtcagacagatttctaagattctgaagagccaggttacgatgttgacatccacatcatctacatctttgccggaagaaatgttcacatgcactctagaactgcaaagttcttgcaaaggtcataagagagattcaatttctccacaatatttgaagccagggactggtgaatctcaactcttttatctagagagccagggggatgttattcttgttgaagtacaagacaacaatagggttgtcataggccgtgcaaaaattcaagtttcatcattgactgatactcaacaggatgaaatcatcaggtggtggcctctatatcttgatgatcaagattgtgtcggaaaagttcagcttgatgctgcaaggtggccctgcagtggataccatcatatatgacatggttctggaagcggcaatgagggctcaaaatttcaacagcaaaatgcttcatatcaatggtccatggatttggctgttggacgagttttctgattactatggaatatctgatgcatatagaaaattgaggtacttgtcttacatcatgaacgtggcaataccaaccaaggattgtttggaacttatatatgaacttatcgttccagtcacaaaagcacgagaagatagaactttaacaagacaagagcgaagtattttgatagactgtgaagatcggattaagagtctccttgcagctctgtttgaaaattacaaatcactggatgaatattctccaactggcttgtcagatttatttggccccataacagattctgctgcaccagctttggcacctgctgttcagatattcagtgtactgcatgacattctctccaaagaagcacaagacatacttaggaactatttgcagattgctgctgcgaaaaggtgcaggaggcatatgatcgagacagatgaattcttatcaagcaataacgacagtcttcttacggaccctatgactatatctgctgcatatcttaaaatgaagacattgtgcattaacatgagtcgtgaaattcaagctgacattaagattcacaaccagaatatacttccaagttccatagatctgccaaacatagcagcatccctatatagtaccgaactctgcaagcggctgaaaggttttctttcttcaagtcccccatcaagaccagtacaacatgttgctgaactgataaccgcaacttctgagtttgagagagatcttgaatcttggcaagtgagacctgttcatggcggcgtaatttcgagacagctctttcatgactacatcatggtgtggattgaagacactcgattgcagttacttgataattgcaaagctgagaagatatcatgccctgccgtgtcaacagtctcgccatttgttgagcaaatgtatgagcaaataaaagagagcataaatgagtatggagtggttatcaatagatggcctcaatatctgatgagtttagagagtgctgttgctgatgttgagagagaaattatgaaggcactggagaagcaatacatggatattctaatgcccctaagagatggcataccagaaaaaattgagaagcaggtccagagattaacaagaagacaatctatagctccctatgttgtgccaaatcagttaggagcattcatgaacacagtaaaaaggatgctagatgtgttacactgccgagtcgaagacattctcaagtcatgggcagcgtaccttactatatcatgtgggaacactgtttttggagagcaaatgaactccatcacagtcatgctgaagaagaagtacaagaaatacctgcaagcgatagtggacaagcttgtcagcaacacacaagctaatcggaatacgagactcaagcgaattcttgaagaaacaagagaggctgatggtgaaagtgatatacgagataggatgcaggctgtccgcctccagctctcggattcaattcacaatctgcatgaggtcttctccagcagaatatttgttgctatttgccgaggtttctgggatcggttaggccagattgtgttgagatttcttgagagcagaaaggagaacaggatttggtaccgaggatctgactatgctctagggatccttgacgatgtctttgcatcggagatgcaaaagctgctgggcagcgctctgcaggacaaggacctggatccaccgcagtcagtgattgacgcccgctccatcctctgctagggcgtgtggcaacagttttctctacagattgcttcagcaaaaggccggcgttggtttagtttttgttttatatatattccttggtgtgcagaatatgtacagatggagacaaccgattattcctgttcatagtgttttgctgaattgttcaaataaatagtggttaaaaaaactgtagcccgtaaacaggttagagaacacaatctgtacttgattgtgtactttctacctcagttcttgccttccccatctaattccatccaaatattgtaccctgaattgagtgaaccttgatacaactgattcttgttggctcatatgtgttcaagcctgcaatttggagaacatcttttccccaatttacctcacctgtgccatggccacaacgactgagctctccacatcgctggagtatgtgtcagtt

SEQ ID NO: 49835 - DNA, 3738 bp, Zea Mays
cgcccactacctcccaatcccaagtcccaactcgctccccattcgcctccctcccacccggctcctgtcctcttcccctccccaaccagcctccctcaaattcgccgatccccaaatcccgctcccctacaccacggtagctgagaagacggccggcgaagatgatgttcacggagggcctcgacgagtcggcgatcagctggatcaagcagggcatggactccccagcctcagccccagcccccgcacccccacggtccccgctgtcggagcgcccgccgctgggacaggtggcggcggcgccgaggagccccgcgctgcacgccaggccgtgcggggccggcgcaggcgtcggtttcttctcccccaagggcctcccgcaagtgcgggtgaacgggacgcaccactcgggcctgctcggccgccactccgtgctcctctcggtcgcggactccgatgagtgggaggacgagagcgtcgcatcgtggggcatgcccgaggactgctacggcggcggcaacttctccgagaccggcgacgaggcgtgctccagcgactccagactcatgcggagggccatggaccgctgcggcggagggtgggatgaggaggtcacgtcgcagctgagcaggaagggcggcggcggcgggatcgtgcgggggcagtccaaggagttcctgcgggtggaagtgcgaggtgcgggagcgttcgatgccgggaagtgctccggttccggggcacaacatccagtggactccatctcgcagggacgctactttgaggagcaggtattggggactcctagtgcccctccaattgcaggggtcgaggaggatgttatgtttcatgcagttgaaagggctgaaatggatggagggcttgagaggaatggagtatcatcagtagcagatatactggcccaagatgttcatgagcttcatacgagctcaattgttcatgaagatggcgttgagaataacttattagctcagataccgagcttcactattaaaatacagaacttcttgcttcatccaaaacacaatagtcaagttgatggtaaacaaatgtatgataaggatggaaattgtactataaagggaaggaaacttgttaaacagattgagattgaagaaatgttcacatgcactctagaactgcaaagttcttgcaaaggtcataagagagattcaatttctccacaatatttgaagccagggactggtgaatctcaactcttttatctagagagccagggggatgttattcttgttgaagtacaagacaacaatagggttgtcataggccgtgcaaaaattcaagtttcatcattgactgatactcaacaggatgaaatcatcaggtggtggcctctatatcttgatgatcaagattgtgtcggaaaagttcagcttggtatgaatttatccatgtcttccaataactatgggtccgaaaagatgctgcaaggtggccctgcagtggataccatcatatatgacatggttctggaagcggcaatgagggctcaaaatttcaacagcaaaatgcttcatatcaatggtccatggatttggctgttggacgagttttctgattactatggaatatctgatgcatatagaaaattgaggtacttgtcttacatcatgaacgtggcaataccaaccaaggattgtttggaacttatatatgaacttatcgttccagtcacaaaagcacgagaagatagaactttaacaagacaagagcgaagtattttgatagactgtgaagatcggattaagagtctccttgcagctctgtttgaaaattacaaatcactggatgaatattctccaactggcttgtcagatttatttggccccataacagattctgctgcaccagctttggcacctgctgttcagatattcagtgtactgcatgacattctctccaaagaagcacaagacatacttaggaactatttgcagattgctgctgcgaaaaggtgcaggaggcatatgatcgagacagatgaattcttatcaagcaataacgacagtcttcttacggaccctatgactatatctgctgcatatcttaaaatgaagacattgtgcattaacatgagtcgtgaaattcaagctgacattaagattcacaaccagaatatacttccaagttccatagatctgccaaacatagcagcatccctatatagtaccgaactctgcaagcggctgaaaggttttctttcttcaagtcccccatcaagaccagtacaacatgttgctgaactgataaccgcaacttctgagtttgagagagatcttgaatcttggcaagtgagacctgttcatggcggcgtaatttcgagacagctctttcatgactacatcatggtgtggattgaagacactcgattgcagttacttgataattgcaaagctgagaagatatcatgccctgccgtgtcaacagtctcgccatttgttgagcaaatgtatgagcaaataaaagagagcataaatgagtatggagtggttatcaatagatggcctcaatatctgatgagtttagagagtgctgttgctgatgttgagagagaaattatgaaggcactggagaagcaatacatggatattctaatgcccctaagagatggcataccagaaaaaattgagaagcaggtccagagattaacaagaagacaatctatagctccctatgttgtgccaaatcagttaggagcattcatgaacacagtaaaaaggatgctagatgtgttacactgccgagtcgaagacattctcaagtcatgggcagcgtaccttactatatcatgtgggaacactgtttttggagagcaaatgaactccatcacagtcatgctgaagaagaagtacaagaaatacctgcaagcgatagtggacaagcttgtcagcaacacacaagctaatcggaatacgagactcaagcgaattcttgaagaaacaagagaggctgatggtgaaagtgatatacgagataggatgcaggctgtccgcctccagctctcggattcaattcacaatctgcatgaggtcttctccagcagaatatttgttgctatttgccgaggtttctgggatcggttaggccagattgtgttgagatttcttgagagcagaaaggagaacaggatttggtaccgaggatctgactatgctctagggatccttgacgatgtctttgcatcggagatgcaaaagctgctgggcagcgctctgcaggacaaggacctggatccaccgcagtcagtgattgacgcccgctccatcctctgctagggcgtgtggcaacagttttctctacagattgcttcagcaaaaggccggcgttggtttagtttttgttttatatatattccttggtgtgcagaatatgtacagatggagacaaccgattattcctgttcatagtgttttgctgaattgttcaaataaatagtggttaaaaaaactgtagcccgtaaacaggttagagaacacaatctgtacttgattgtgtactttctacctcagttcttgccttccccatctaattccatccaaatattgtaccctgaattgagtgaaccttgatacaactgattcttgttggctcatatgtgttcaagcctgcaatttggagaacatcttttccccaatttacctcacctgtgccatggccacaacgactgagctctccacatcgctggagtatgtgtcagtt

SEQ ID NO: 49836 - DNA, 3901 bp, Zea Mays
cgcccactacctcccaatcccaagtcccaactcgctccccattcgcctccctcccacccggctcctgtcctcttcccctccccaaccagcctccctcaaattcgccgatccccagtagcgaaacccacactcgacaatcctctatcagaatcccgctcccctacaccacggtagctgagaagacggccggcgaagatgatgttcacggagggcctcgacgagtcggcgatcagctggatcaagcagggcatggactccccagcctcagccccagcccccgcacccccacggtccccgctgtcggagcgcccgccgctgggacaggtggcggcggcgccgaggagccccgcgctgcacgccaggccgtgcggggccggcgcaggcgtcggtttcttctcccccaagggcctcccgcaagtgcgggtgaacgggacgcaccactcgggcctgctcggccgccactccgtgctcctctcggtcgcggactccgatgagtgggaggacgagagcgtcgcatcgtggggcatgcccgaggactgctacggcggcggcaacttctccgagaccggcgacgaggcgtgctccagcgactccagactcatgcggagggccatggaccgctgcggcggagggtgggatgaggaggtcacgtcgcagctgagcaggaagggcggcggcggcgggatcgtgcgggggcagtccaaggagttcctgcgggtggaagtgcgaggtgcgggagcgttcgatgccgggaagtgctccggttccggggcacaacatccagtggactccatctcgcagggacgctactttgaggagcaggtattggggactcctagtgcccctccaattgcaggggtcgaggaggatgttatgtttcatgcagttgaaagggctgaaatggatggagggcttgagaggaatggagtatcatcagtagcagatatactggcccaagatgttcatgagcttcatacgagctcaattgttcatgaagatggcgttgagaataacttattagctcagataccgagcttcactattaagttatgtctgaatgcatgggcaagaaactgcatggaagctccagacttccttcgggatgagtgcatggtactgcgaagtgcctttggaatacagaacttcttgcttcatccaaaacacaatagtcaagttgatggtaaacaaatgtatgataaggatggaaattgtactataaagggaaggaaacttgttaaacagattgagattgaagtaaaaaagatacgggttgtacctcaaagaccaaagcttcgagcaacatcatcctttagaaatctctacatgcaagctggcagtgagtatgtcagacagatttctaagattctgaagagccaggttacgatgttgacatccacatcatctacatctttgccggaagaaatgttcacatgcactctagaactgcaaagttcttgcaaaggtcataagagagattcaatttctccacaatatttgaagccagggactggtgaatctcaactcttgtggtggcctctatatcttgatgatcaagattgtgtcggaaaagttcagcttggtatgaatttatccatgtcttccaataactatgggtccgaaaagatgctgcaaggtggccctgcagtggataccatcatatatgacatggttctggaagcggcaatgagggctcaaaatttcaacagcaaaatgcttcatatcaatggtccatggatttggctgttggacgagttttctgattactatggaatatctgatgcatatagaaaattgaggtacttgtcttacatcatgaacgtggcaataccaaccaaggattgtttggaacttatatatgaacttatcgttccagtcacaaaagcacgagaagatagaactttaacaagacaagagcgaagtattttgatagactgtgaagatcggattaagagtctccttgcagctctgtttgaaaattacaaatcactggatgaatattctccaactggcttgtcagatttatttggccccataacagattctgctgcaccagctttggcacctgctgttcagatattcagtgtactgcatgacattctctccaaagaagcacaagacatacttaggaactatttgcagattgctgctgcgaaaaggtgcaggaggcatatgatcgagacagatgaattcttatcaagcaataacgacagtcttcttacggaccctatgactatatctgctgcatatcttaaaatgaagacattgtgcattaacatgagtcgtgaaattcaagctgacattaagattcacaaccagaatatacttccaagttccatagatctgccaaacatagcagcatccctatatagtaccgaactctgcaagcggctgaaaggttttctttcttcaagtcccccatcaagaccagtacaacatgttgctgaactgataaccgcaacttctgagtttgagagagatcttgaatcttggcaagtgagacctgttcatggcggcgtaatttcgagacagctctttcatgactacatcatggtgtggattgaagacactcgattgcagttacttgataattgcaaagctgagaagatatcatgccctgccgtgtcaacagtctcgccatttgttgagcaaatgtatgagcaaataaaagagagcataaatgagtatggagtggttatcaatagatggcctcaatatctgatgagtttagagagtgctgttgctgatgttgagagagaaattatgaaggcactggagaagcaatacatggatattctaatgcccctaagagatggcataccagaaaaaattgagaagcaggtccagagattaacaagaagacaatctatagctccctatgttgtgccaaatcagttaggagcattcatgaacacagtaaaaaggatgctagatgtgttacactgccgagtcgaagacattctcaagtcatgggcagcgtaccttactatatcatgtgggaacactgtttttggagagcaaatgaactccatcacagtcatgctgaagaagaagtacaagaaatacctgcaagcgatagtggacaagcttgtcagcaacacacaagctaatcggaatacgagactcaagcgaattcttgaagaaacaagagaggctgatggtgaaagtgatatacgagataggatgcaggctgtccgcctccagctctcggattcaattcacaatctgcatgaggtcttctccagcagaatatttgttgctatttgccgaggtttctgggatcggttaggccagattgtgttgagatttcttgagagcagaaaggagaacaggatttggtaccgaggatctgactatgctctagggatccttgacgatgtctttgcatcggagatgcaaaagctgctgggcagcgctctgcaggacaaggacctggatccaccgcagtcagtgattgacgcccgctccatcctctgctagggcgtgtggcaacagttttctctacagattgcttcagcaaaaggccggcgttggtttagtttttgttttatatatattccttggtgtgcagaatatgtacagatggagacaaccgattattcctgttcatagtgttttgctgaattgttcaaataaatagtggttaaaaaaactgtagcccgtaaacaggttagagaacacaatctgtacttgattgtgtactttctacctcagttcttgccttccccatctaattccatccaaatattgtaccctgaattgagtgaaccttgatacaactgattcttgttggctcatatgtgttcaagcctgcaatttggagaacatcttttccccaatttacctcacctgtgccatggccacaacgactgagctctccacatcgctggagtatgtgtcagtt

SEQ ID NO: 49837 - DNA, 3994 bp, Zea Mays
cgcccactacctcccaatcccaagtcccaactcgctccccattcgcctccctcccacccggctcctgtcctcttcccctccccaaccagcctccctcaaattcgccgatccccaaatcccgctcccctacaccacggtagctgagaagacggccggcgaagatgatgttcacggagggcctcgacgagtcggcgatcagctggatcaagcagggcatggactccccagcctcagccccagcccccgcacccccacggtccccgctgtcggagcgcccgccgctgggacaggtggcggcggcgccgaggagccccgcgctgcacgccaggccgtgcggggccggcgcaggcgtcggtttcttctcccccaagggcctcccgcaagtgcgggtgaacgggacgcaccactcgggcctgctcggccgccactccgtgctcctctcggtcgcggactccgatgagtgggaggacgagagcgtcgcatcgtggggcatgcccgaggactgctacggcggcggcaacttctccgagaccggcgacgaggcgtgctccagcgactccagactcatgcggagggccatggaccgctgcggcggagggtgggatgaggaggtcacgtcgcagctgagcaggaagggcggcggcggcgggatcgtgcgggggcagtccaaggagttcctgcgggtggaagtgcgaggtgcgggagcgttcgatgccgggaagtgctccggttccggggcacaacatccagtggactccatctcgcagggacgctactttgaggagcaggtattggggactcctagtgcccctccaattgcaggggtcgaggaggatgttatgtttcatgcagttgaaagggctgaaatggatggagggcttgagaggaatggagtatcatcagtagcagatatactggcccaagatgttcatgagcttcatacgagctcaattgttcatgaagatggcgttgagaataacttattagctcagataccgagcttcactattaatgtccaaaatgcatggcaatcctttgttgcatatgatgcatgcttcaggttatgtctgaatgcatgggcaagaaactgcatggaagctccagacttccttcgggatgagtgcatggtactgcgaagtgcctttggaatacagaacttcttgcttcatccaaaacacaatagtcaagttgatggtaaacaaatgtatgataaggatggaaattgtactataaagggaaggaaacttgttaaacagattgagattgaagtaaaaaagatacgggttgtacctcaaagaccaaagcttcgagcaacatcatcctttagaaatctctacatgcaagctggcagtgagtatgtcagacagatttctaagattctgaagagccaggttacgatgttgacatccacatcatctacatctttgccggaagaaatgttcacatgcactctagaactgcaaagttcttgcaaaggtcataagagagattcaatttctccacaatatttgaagccagggactggtgaatctcaactcttttatctagagagccagggggatgttattcttgttgaagtacaagacaacaatagggttgtcataggccgtgcaaaaattcaagtttcatcattgactgatactcaacaggatgaaatcatcaggtggtggcctctatatcttgatgatcaagattgtgtcggaaaagttcagcttgatgctgcaaggtggccctgcagtggataccatcatatatgacatggttctggaagcggcaatgagggctcaaaatttcaacagcaaaatgcttcatatcaatggtccatggatttggctgttggacgagttttctgattactatggaatatctgatgcatatagaaaattgaggtacttgtcttacatcatgaacgtggcaataccaaccaaggattgtttggaacttatatatgaacttatcgttccagtcacaaaagcacgagaagatagaactttaacaagacaagagcgaagtattttgatagactgtgaagatcggattaagagtctccttgcagctctgtttgaaaattacaaatcactggatgaatattctccaactggcttgtcagatttatttggccccataacagattctgctgcaccagctttggcacctgctgttcagatattcagtgtactgcatgacattctctccaaagaagcacaagacatacttaggaactatttgcagattgctgctgcgaaaaggtgcaggaggcatatgatcgagacagatgaattcttatcaagcaataacgacagtcttcttacggaccctatgactatatctgctgcatatcttaaaatgaagacattgtgcattaacatgagtcgtgaaattcaagctgacattaagattcacaaccagaatatacttccaagttccatagatctgccaaacatagcagcatccctatatagtaccgaactctgcaagcggctgaaaggttttctttcttcaagtcccccatcaagaccagtacaacatgttgctgaactgataaccgcaacttctgagtttgagagagatcttgaatcttggcaagtgagacctgttcatggcggcgtaatttcgagacagctctttcatgactacatcatggtgtggattgaagacactcgattgcagttacttgataattgcaaagctgagaagatatcatgccctgccgtgtcaacagtctcgccatttgttgagcaaatgtatgagcaaataaaagagagcataaatgagtatggagtggttatcaatagatggcctcaatatctgatgagtttagagagtgctgttgctgatgttgagagagaaattatgaaggcactggagaagcaatacatggatattctaatgcccctaagagatggcataccagaaaaaattgagaagcaggtccagagattaacaagaagacaatctatagctccctatgttgtgccaaatcagttaggagcattcatgaacacagtaaaaaggatgctagatgtgttacactgccgagtcgaagacattctcaagtcatgggcagcgtaccttactatatcatgtgggaacactgtttttggagagcaaatgaactccatcacagtcatgctgaagaagaagtacaagaaatacctgcaagcgatagtggacaagcttgtcagcaacacacaagctaatcggaatacgagactcaagcgaattcttgaagaaacaagagaggctgatggtgaaagtgatatacgagataggatgcaggctgtccgcctccagctctcggattcaattcacaatctgcatgaggtcttctccagcagaatatttgttgctatttgccgaggtttctgggatcggttaggccagattgtgttgagatttcttgagagcagaaaggagaacaggatttggtaccgaggatctgactatgctctagggatccttgacgatgtctttgcatcggagatgcaaaagctgctgggcagcgctctgcaggacaaggacctggatccaccgcagtcagtgattgacgcccgctccatcctctgctagggcgtgtggcaacagttttctctacagattgcttcagcaaaaggccggcgttggtttagtttttgttttatatatattccttggtgtgcagaatatgtacagatggagacaaccgattattcctgttcatagtgttttgctgaattgttcaaataaatagtggttaaaaaaactgtagcccgtaaacaggttagagaacacaatctgtacttgattgtgtactttctacctcagttcttgccttccccatctaattccatccaaatattgtaccctgaattgagtgaaccttgatacaactgattcttgttggctcatatgtgttcaagcctgcaatttggagaacatcttttccccaatttacctcacctgtgccatggccacaacgactgagctctccacatcgctggagtatgtgtcagtt

SEQ ID NO: 49838 - DNA, 1503 bp, Zea Mays
ctcagatccaaatcaggtagcagcggttattggtcatcgcgtacgcagattgcgatctgttctgagcttcgaggaatcgacgatcaagatttggtgaaccactcgtcccgagatcaagttcttcgagtcctacgaagttgaagaccctgagcatctgtttggtgaaggaaagtgtcctctgacccattatgtcccatttactttataattcacgtcccacataccatgaacaacctaaggattgactagtattctattttcctgtccttgtttaccctttgggagttggttactatgattagtattatgttattgctttaccttaatcaaagaacatgatgagaacatttatgatacgatgatgctatcttttattatgatgatgaacttatgatactttaggggactcaggctatttcctgattacctctctgtaaggacctgttcgttgagagaccacccgggaaaacagtgcaaccatgagggtggtatgggacgcctttggccaagtaattagggaagtcttatgttgggtgttggttttggtcattggggacggaggcatctgttatggctcctatattctcgctcagggatctaggaacgtgcatcgtcccacggcttttcctgaaggtggaggtataggttttggtacgtcagatgatctctatggcaatggtggcatatgttatggctcttataatctcgctcagggatctaggtacgggcatcgccccacgactttttcggttttttcctgagggcggaggtataggttttggtacgtcagatggtcgcgatgcaatggtcgtttccaacattcgcatagtgaggaccctagggaaaagccacgtagtgagaccctgccagttcaccttggaagtgatcaatggggagtcgcgatcctcgggcagaaagggaatcacgactcatgggtaaagtatgcaacctctgcagagtgttatgaaactgatatatcagccgtgctcacagttatgggcggccttgggatcctatttgattagagatacagatggttcgagatgctatggttctatttatggttttggctcgatgatgataatgatgttcctcgacgaggaaatgattcacgggttggttattgctaaacttggctcccactaataataaatatttgaccaactaaaagaaactgctttgatcttaactccacataaagctagtccacttcagccaaacgggacatttattgagaacgttgatgtgtactcacccttgctttcacaaaacacgaggttgcctttggtgcaatctatgcttaggtaaagaagaagaaggcgtcgaggcggatctccaggagttccaggatgtcgatgagttcgaggattaggctagcgacctcccccagtcagctgcctgtgctgggttaatttacgttggctacgtttcgattctgtgtactttgatttatattatgtaaatgactatagtctttaatattattacttactctttattgtt

SEQ ID NO: 49839 - DNA, 1163 bp, Zea Mays
aagaagaaaaaaaaaagggacgcgggcgggaaaggggaaagcttcctccattccggcgcggccgcgggctacctcgctccacgctaccaaccatccgttgctgctcagcgctagtcagtagcgacgaggagtctacgcggactagacatgacaccactagcaaccgctaactacaggtccacagtaagatccaacagctagtggtgcaccggacagtgcaccggtgttatgatcacgctattaagcaacatgttacaaccaccaagtcatagtacatcaactcaagaacaaccaacatcatcaccagcccaagtctttgatggaccaattacacgtagccgagctaagaagctacagcaagaggtgcacgcgctactttatgaatttcaattaaacactaatgaaaactttatgctacctaagtcgtgtatgttgatattacttaggtttaccaaagaggaaggacaaaacatatcaaggacgagtcaacaagaagagctatgtccgagtcagtccagcgcaatagaaccgtccagaagaaacagtcatatcttttgattcccaaaagctatgaaggcccataagtactttttggaaagctcttgaagtctagattccaatgcttctaaagccgacttaatcaaatctaccagaaagtcagccgacctactttagtgctgactgttcagaaggtcaacaatctgcttgatgacaaagttttcgtattaaactgcatcattctacgaagtttcattaaacatgctatatatggtgagaaagcttatcaagttagcttttcaatgcaaccagtcccacgtcatttgaagattcttagaagaagttattatcaaaatactgaaggctgcgcagaagtcaaacagccacacggaaattagctctgcagatctcccgaagaggctcctttacattagcacgtgaaaatagttttgtttcgtgtttatacctcactaaggctagttgttactagtataaatacccccctatgtctatgatgtaaggcaacttatgataatctaaaacagaacctctttgttcagctgtgtgctaacaaatattgagagtgatctctatccctttgctcttgtgaattccttcgcgggattgtagaagtggcggcttcatccgctcccaattggtgctcc

SEQ ID NO: 49840 - DNA, 1923 bp, Zea Mays
ggatatttccgtcgccagcgctccgttcctgctcccgtgctgccgctcctgccctcttccatggcgcgtgccccatctccctcctcgcccctggcccctctgctcggagctccctcgccatggccctggtcgacgctctgccgggccgtgtctgccttggctaccgcgcccatgccgaactctctctccctcgcgtcttccttccccgcgcgcagctcgccttagctcctgctccttcaggctggctgcgcgcccatccctctgctcgttcttcaggccgccgcccagccgagattctccctcatccccatggcgcgctcctcctggtaccgagctcgcccatggccacgggctgcagctcgccccatctccctagcccccacgcgcgcgcaggcttcctgctcgctcggcttccctcctctcccttcccatggccgagctcttcgctgttgtccgtgcgcgcacgcctgctcctctgtccgcccatggccgctgttccttccctggttgcgggcgtgcggccggcgtcgagtcgtcggactcatccttcccttgctagcccatggaagcgtgccctgctccaactaggtccgaccgtggagctcttctctggtgccaagatgcagtctgtctttctcaacttcgctctagccgtcggagcagtagccatggctttctgtcctcggttttggccgtctcctctgcctccaatctatggcgccatcgcgagctcgccagccgccgttctccttgcctcctcaccggtcgttgaccttgcctaggctatcacatcttctcgtgctgttgtgcgtttgctgatgttttagtcatcgcccagctcgctgatggccagttcgttcgccttcgattagcccgccatgacgccgacgtctagccctggctccagtctcctcaccacggaagcacaaccgctgctcagtgtgttgatgccgtatgtgtggtgctgttgtgggttgtcgtcgttcgtctccgcgtcgtgtgtagcaacgtcgccgattcctccatggtgcttatcgtcgaacttcgcttcatcggtccaaagtgctcgaccacgccttgaccatggacatcgtgcgtcctcgtcaccaccatggacacaacttctcttctgtcattgtggacaccccgctatcctcgtgtgccggtcaccgtctctgagcctgattccgagatatcgtgtgccctactccatctcccagccgttccccgtgccgtcgatctgtgcagccttgacgcgccatcgtcgctgatagtttgcatctcctacgttgtgccatccttgttccctctggtcgcgacaacatcctattccaccaggtcgtcgggcgctactctcaactcgctatgaggcttgctgggcttgccatgttttaaaatgtagtcaaaaatttgcttgcaactgcggtctcgtcgtgtccgtcggtcttcaacttcagtgatcactatcatcttcaacaacaacgtcgtcgttgtctccttggtgctcgttgccaactctgctaccctgttcttatccgctacccgctgagtgcgtgatgaatagtttgaactggagtttgtcgtcattcctcgtcctcgccatggacgagtctgcatctccgcatgccgatgtgcctagaccgtcagtctcgcccttgctgttgaaagcatcaccgacgtccgcggataggtacgctagttagtcatgtgatgtgaaggacaagaactgagttgaccccaagatgatgcagagaatggacatctccgcaagacgaggttgtcagtcgggccaacctgaagatagataaatcaagcaagtgctcggctgagagatgatcgacaagcaagtctcgtctaacaaacactaacctagtgttattccaggcaagccccggtgcattatccctttccttgtgttttaaa

SEQ ID NO: 49841 - DNA, 1963 bp, Zea Mays
tggctgaaatccaaatttctttgagtatactagtggatggacaaaagctaaggtcgcgggtatgctcatgtggggcaaatgctttacacgtgctttatccgacctgctatcacaggtaacgaccatgactggaccatgttaaagtgttttgtcattcattgctaaatcctaatgggcctgggcaggggtgaatttgttgcgacacccgcccaggctggtacaattggtggcgacgaggattgtgctagcaataaccttgtcgtcattggcaaggcgcggtttcttgagagtgagcatggcgcgcgttgcagcgaaggtgggaagggcagtggctttggcgatgatgtcggtcatgttggaaaatcgagggttgagagttgagaccatgaaggaggttgagaacgatctcagagtccttcaccggatggccaacatcatggagggcgtcggtggtggtcttcatgcactagcagtaggagtcaatactagaatcaccctactgcatggagtggaactcatggttgaggaagattgtctgaggttccttgttagcgcagaagatgttctcaatggcgacccaaacatctcgggtagattgatcgtcatcttccattgcgaggtcgagagcggagtcatcgacagagccgaagatccatcttttgacgcagcagttcgcctgatcccagtttgtgtcggtgggattggtggggagcatcccatagatgtgtgatttaaggccgaacttgctgcacatggatttgaagtgggacgtccacttgctgtagttggaatccttcatccccaatgtcatgggaacaaaggattttacggacagtggtgtatggatgcaccatgatcaatgatggttgattgttggtgttggagatgatgtcgttggtggcagatgatgagaggaggtgggggttgcgtccatctagaacagattggccacaggggaggaggggtgaggtgttgcgcctagagaagagtaggcggcctaggttaggagcggtggcacctcggaaggtacaagcagtcgactgcggcctaggagggggtagcggtggcactatagggttagggctagatggggcttgcagtagggcgcatgggttgttgcgcctggagaagaggcgacaacctgagagcggcggctccactagaagggatgagcagtcgatgcttgggacgagggtccctagaagagatgaggagccgccggcggcctgggaggggtggcagcggaggggtgcaggctagggttaggcctagtctcgtgatacaatgtagagaataggaaaacacctcacacccataatgaagggtgacctttcattatataggtcatatggcttatagtacaagtcaagtgagtacaatggataagtgcaaaaataatagcccatacatgtctctaacaataagaatgaatcttcaaagtggtggtcttgggagtaaaatcgaaaataagttgaaatatttggaagcatgaaactttatcataattcattttgttatcaaatttcatgcatgtatttgattatcatcataggttcaaagaaaaagaaaaaaagaagaacccatgaatagtgatagcctacataaccaaccaacccttgtcctcaaaaagacaatggccagggactacttatcctgaccaaggaaagaaggtatgggatcgctgctgcctcaaccaaaagacaatggcatgcctggaaaataggacaaggaaagcaattgcgcaccaaaatagggtgattatgacaattagtttagagtaagcattttcatccatggacattgaatccatatcatagctaaaaagggaaaagaacatcctatgaaccgttgtagcctacataagctacctaccttgttctcaaaggtgtaaagaattatgtaggcaaaccaagaatagaaggtattcacatcattgatttctcaagaaaagaggagcggcaag

SEQ ID NO: 49842 - DNA, 705 bp, Zea Mays
aaacggcccaagcccaaaaaggcaggctgatatctcagacatagagcccactcgtcgagcgcgctcgcacgccgcgaatcgccggaccggtcggcgacggagacgacagagcccaagtcgaagcgatccgattttgccggcggcagcgaccggagtatggggctgggaggccggggcgtggtgggagacaggtggtcgcaacgcatcctctggatttgcgccctgggcagcgccgcctctacttcgtggcggtggagaggcaggctcagaatcgtgcgcgggcggtggcggagggcctcaaggcgctcgacggcgccggggatgacgtgtgacagcggtggacgctgccgtgcagagggcctcctttggttcacatgttcacagaacctcatagcgttgcaataatgtactaaacatctgtgctcagtctttgtagaattaaatgtggatcaatgtgagtgttctcctatttcacataattcatctgagcctttgttgctgcacagaaatgttgatccgtgccactacgtgagtgttttcttatttcacacaatttgtccatttaaggatccacatgatgtattccgtagagtggagtaaccagaattcaataactgtgtattcactgtgttttttattgtccaatacaatgcatatcacaaaatatcaatatgaaactgaagaaaatttactgtgatcttatca

SEQ ID NO: 49843 - DNA, 479 bp, Zea Mays
aagcgcccgcctctacttcgtggcggtggagaggcaggctcagaatcgtgcgcgggcggtggcggagggcctcaaggcgctcgacggcgccggggatgacgtgtgacagcggtggacgctgccgtgcagagggcctcctttggttcacatgttcacagaacctcatagcgttgcaataatgtactaaacatctgtgctcagtctttgtagaattaaatgtggatcaatgtgagtgttctcctatttcacataattcatctgagcctttgttgctgcacagaaatgttgatccgtgccactacgtgagtgttttcttatttcacacaatttgtccatttaaggatccacatgatgtattccgtagagtggagtaaccagaattcaataactgtgtattcactgtgttttttattgtccaatacaatgcatatcacaaaatatcaatatgaaactgaagaaaatttactgtgatcttatca

SEQ ID NO: 49844 - DNA, 308 bp, Zea Mays
ctcgctttctagacgaactctcattgtttgttcctatgcctatattggggtttggataggaccttttcgcatgttgttgacgaagcaatcctgggctgatgaagtgtgaccttggaggggatctcacatttccatacttgctttgcattgctatagcctacatagataacaaatgcacaaaaaattaaattaaaaggatgttgccctaatttttatagaaagcaacaaaactataaactagttcagtataggaaaacaagaacaatggtaagctatgaatagaagcaagaaaacagattaatggcaag

SEQ ID NO: 49845 - DNA, 1775 bp, Zea Mays
gaaagcggttgcttcgggcttcgaggccttactcgtcggctgctcctgcccgcctccgtctcccacagcccacagtcccacacagccacggccacgccgccgtcctcgagccgcctgatgagctgcctccgccgcgcttcccgcctcacccggggtctctcttcctcctcggcggcggaggcggagacgctcccgccgccgcgcccctctgcgggtcgccgcgtggtcgtgacggggctgggcgccgtcacgccgctggcgcgcggcgtgggcgccacctgggatcgcctcgtcgcggggagatgcgccgtgcgctctctcgccgcagaggacctccgctttccggaggaagcagcggggaggacgctcgagcagctcccgtccagggtggtcgccgccgtgccgcgcgggaagggcgaggacgagttcgccgaggacacgtggaccaaggataaatctgtatcaggatttatttcctatgctctgtgtgcagctgatgaggctttaagagatgcaaattggttgccttccgaagatgataagaaggaaagaacgggagtctctattggtggagggattggaagcatctccgatatcttagatgcatcacaaatgatcatcgaaaatcgtctacgtcgtctcagcccatacttcatccccaagattttgatcaacatggcatcaggtcatgtcagcatgagatatggtttccaggatgatccaatttggtgatgccgatgtgatggtggctggtggaactgagtccaatattgatgctttgtctatagcgggattttctaggttaagagcattgtctacaaaatataattcctctccacttttagcttcaagaccttttgattgcggtagagatggatttgtgattggtgagggctgtggggtcatggttttggaggcacttgatcatgcaaaggaacgcggtgcaaaaatatatgctgaagttcgaggctacggaatgtctggtgatgcacaccacataactcagccacaaagtggtggtagaggtgctattttagccatgaagcgtgctttggaccagtcaggtcttcatgtaaatgaaattggttatgtgaatgcgcatgccacgtcgactcctcttggtgatgctgtggaggcgaacgcgatcaaatctgtatttggcgaccacgcagcatccggtgatcttgcaatatcctcaacaaagggagcaattggtcatctgctaggggcagctggatcagtggaagcaatcttcactgtgctagcaattcaccacggactcgctccgcctactcttaacctggagcggccggacccgctgttcgaaggggcattcacgccactagctgcgcccaagaagatgtcgatacgagcagccatctccaactctttcgggtttggtggaactaacacgtcgctgctgttctcgtgcccgccctagtcctagtgtaacggcgctctgttttctggtcctcgctggaagtgaagaggcttcctgtaatattcagatatgttccgcaaggcaccacccgcctttagctgaagtttcttcaagttgttttttttcaagtcttagttaaactctgtttcgttattttttttaaaaaaaggaaaaagatggaaatttgataggtgagtgagacgttccctttggacatcattagcgtaaaatctgtactactgctatgatataacgtgtccaacatagacatcacttgctcttcatcggagaaagcagttcaaagtgaaaaactatgggcatgtttagttcgtgg

SEQ ID NO: 49846 - DNA, 1823 bp, Zea Mays
tcgtcggctgctcctgcccgcctccgtctcccacagcccacagtcccacacagccacggccacgccgccgtcctcgagccgcctgatgagctgcctccgccgcgcttcccgcctcacccggggtctctcttcctcctcggcggcggaggcggagacgctcccgccgccgcgcccctctgcgggtcgccgcgtggtcgtgacggggctgggcgccgtcacgccgctggcgcgcggcgtgggcgccacctgggatcgcctcgtcgcggggagatgcgccgtgcgctctctcgccgcagaggacctccgctttccggaggaagcagcggggaggacgctcgagcagctcccgtccagggtggtcgccgccgtgccgcgcgggaagggcgaggacgagttcgccgaggacacgtggaccaaggataaatctgtatcaggatttatttcctatgctctgtgtgcagctgatgaggctttaagagatgcaaattggttgccttccgaagatgataagaaggaaagaacggtaccatgtgtcttctgtagaagctcattttcatattcgtacttgtatttttgagttctgggtctgattaatgctgtatcagggagtctctattggtggagggattggaagcatctccgatatcttagatgcatcacaaatgatcatcgaaaatcgtctacgtcgtctcagcccatacttcatccccaagattttgatcaacatggcatcaggtcatgtcagcatgagatatggtttccaggatgatccaatttggtgatgccgatgtgatggtggctggtggaactgagtccaatattgatgctttgtctatagcgggattttctaggttaagagcattgtctacaaaatataattcctctccacttttagcttcaagaccttttgattgcggtagagatggatttgtgattggtgagggctgtggggtcatggttttggaggtgagtggtttgggactttaggcacttgatcatgcaaaggaacgcggtgcaaaaatatatgctgaagttcgaggctacggaatgtctgccacaaagtggtggtagaggtgctattttagccatgaagcgtgctttggaccagtcaggtcttcatgtaaatgaaattggttatgtgaatgcgcatgccacgtcgactcctcttggtgatgctgtggaggcgaacgcgatcaaatctgtatttggcgaccacgcagcatccggtgatcttgcaatatcctcaacaaagggagcaattggtcatctgctaggggcagctggatcagtggaagcaatcttcactgtgctagcaattcaccacggactcgctccgcctactcttaacctggagcggccggacccgctgttcgaaggggcattcacgccactagctgcgcccaagaagatgtcgatacgagcagccatctccaactctttcgggtttggtggaactaacacgtcgctgctgttctcgtgcccgccctagtcctagtgtaacggcgctctgttttctggtcctcgctggaagtgaagaggcttcctgtaatattcagatatgttccgcaaggcaccacccgcctttagctgaagtttcttcaagttgttttttttcaagtcttagttaaactctgtttcgttattttttttaaaaaaaggaaaaagatggaaatttgataggtgagtgagacgttccctttggacatcattagcgtaaaatctgtactactgctatgatataacgtgtccaacatagacatcacttgctcttcatcggagaaagcagttcaaagtgaaaaactatgggcatgtttagttcgtgg

SEQ ID NO: 49847 - DNA, 1693 bp, Zea Mays
tcgtcggctgctcctgcccgcctccgtctcccacagcccacagtcccacacagccacggccacgccgccgtcctcgagccgcctgatgagctgcctccgccgcgcttcccgcctcacccggggtctctcttcctcctcggcggcggaggcggagacgctcccgccgccgcgcccctctgcgggtcgccgcgtggtcgtgacggggctgggcgccgtcacgccgctggcgcgcggcgtgggcgccacctgggatcgcctcgtcgcggggagatgcgccgtgcgctctctcgccgcagaggacctccgctttccggaggaagcagcggggaggacgctcgagcagctcccgtccagggtggtcgccgccgtgccgcgcgggaagggcgaggacgagttcgccgaggacacgtggaccaaggataaatctgtatcaggatttatttcctatgctctgtgtgcagctgatgaggctttaagagatgcaaattggttgccttccgaagatgataagaaggaaagaacgggagtctctattggtggagggattggaagcatctccgatatcttagatgcatcacaaatgatcatcgaaaatcgtctacgtcgtctcagcccatacttcatccccaagattttgatcaacatggcatcaggtcatgtcagcatgagatatggtttccagggtccaaaccatgctgctgtgacagcttgcgccactggtgctcactctattggcgatgctactaggatgatccaatttggtgatgccgatgtgatggtggctggtggaactgagtccaatattgatgctttgtctatagcgggattttctaggcacttgatcatgcaaaggaacgcggtgcaaaaatatatgctgaagttcgaggctacggaatgtctggtgatgcacaccacataactcagccacaaagtggtggtagaggtgctattttagccatgaagcgtgctttggaccagtcaggtcttcatgtaaatgaaattggttatgtgaatgcgcatgccacgtcgactcctcttggtgatgctgtggaggcgaacgcgatcaaatctgtatttggcgaccacgcagcatccggtgatcttgcaatatcctcaacaaagggagcaattggtcatctgctaggggcagctggatcagtggaagcaatcttcactgtgctagcaattcaccacggactcgctccgcctactcttaacctggagcggccggacccgctgttcgaaggggcattcacgccactagctgcgcccaagaagatgtcgatacgagcagccatctccaactctttcgggtttggtggaactaacacgtcgctgctgttctcgtgcccgccctagtcctagtgtaacggcgctctgttttctggtcctcgctggaagtgaagaggcttcctgtaatattcagatatgttccgcaaggcaccacccgcctttagctgaagtttcttcaagttgttttttttcaagtcttagttaaactctgtttcgttattttttttaaaaaaaggaaaaagatggaaatttgataggtgagtgagacgttccctttggacatcattagcgtaaaatctgtactactgctatgatataacgtgtccaacatagacatcacttgctcttcatcggagaaagcagttcaaagtgaaaaactatgggcatgtttagttcgtgg

SEQ ID NO: 49848 - DNA, 1709 bp, Zea Mays
tcgtcggctgctcctgcccgcctccgtctcccacagcccacagtcccacacagccacggccacgccgccgtcctcgagccgcctgatgagctgcctccgccgcgcttcccgcctcacccggggtctctcttcctcctcggcggcggaggcggagacgctcccgccgccgcgcccctctgcgggtcgccgcgtggtcgtgacggggctgggcgccgtcacgccgctggcgcgcggcgtgggcgccacctgggatcgcctcgtcgcggggagatgcgccgtgcgctctctcgccgcagaggacctccgctttccggaggaagcagcggggaggacgctcgagcagctcccgtccagggtggtcgccgccgtgccgcgcgggaagggcgaggacgagttcgccgaggacacgtggaccaaggataaatctgtatcaggatttatttcctatgctctgtgtgcagctgatgaggctttaagagatgcaaattggttgccttccgaagatgataagaaggaaagaacgggagtctctattggtggagggattggaagcatctccgatatcttagatgcatcacaaatgatcatcgaaaatcgtctacgtcgtctcagcccatacttcatccccaagattttgatcaacatggcatcaggtcatgtcagcatgagatatggtttccaggatgatccaatttggtgatgccgatgtgatggtggctggtggaactgagtccaatattgatgctttgtctatagcgggattttctaggttaagagcattgtctacaaaatataattcctctccacttttagcttcaagaccttttgattgcggtagagatggatttgtgcacttgatcatgcaaaggaacgcggtgcaaaaatatatgctgaagttcgaggctacggaatgtctggtgatgcacaccacataactcagccacaaagtggtggtagaggtgctattttagccatgaagcgtgctttggaccagtcaggtcttcatgtaaatgaaattggttatgtgaatgcgcatgccacgtcgactcctcttggtgatgctgtggaggcgaacgcgatcaaatctgtatttggcgaccacgcagcatccggtgatcttgcaatatcctcaacaaagggagcaattggtcatctgctaggggcagctggatcagtggaagcaatcttcactgtgctagcaattcaccacggactcgctccgcctactcttaacctggagcggccggacccgctgttcgaaggggcattcacgccactagctgcgcccaagaagatgtcgatacgagcagccatctccaactctttcgggtttggtggaactaacacgtcgctgctgttctcgtgcccgccctagtcctagtgtaacggcgctctgttttctggtcctcgctggaagtgaagaggcttcctgtaatattcagatatgttccgcaaggcaccacccgcctttagctgaagtttcttcaagttgttttttttcaagtcttagttaaactctgtttcgttattttttttaaaaaaaggaaaaagatggaaatttgataggtgagtgagacgttccctttggacatcattagcgtaaaatctgtactactgctatgatataacgtgtccaacatagacatcacttgctcttcatcggagaaagcagttcaaagtgaaaaactatgggcatgtttagttcgtgg

SEQ ID NO: 49849 - DNA, 1853 bp, Zea Mays
tcgtcggctgctcctgcccgcctccgtctcccacagcccacagtcccacacagccacggccacgccgccgtcctcgagccgcctgatgagctgcctccgccgcgcttcccgcctcacccggggtctctcttcctcctcggcggcggaggcggagacgctcccgccgccgcgcccctctgcgggtcgccgcgtggtcgtgacggggctgggcgccgtcacgccgctggcgcgcggcgtgggcgccacctgggatcgcctcgtcgcggggagatgcgccgtgcgctctctcgccgcagaggacctccgctttccggaggaagcagcggggaggacgctcgagcagctcccgtccagggtggtcgccgccgtgccgcgcgggaagggcgaggacgagttcgccgaggacacgtggaccaaggataaatctgtatcaggatttatttcctatgctctgtgtgcagctgatgaggctttaagagatgcaaattggttgccttccgaagatgataagaaggaaagaacggtaccatgtgtcttctgtagaagctcattttcatattcgtacttgtatttttgagttctgggtctgattaatgctgtatcagggagtctctattggtggagggattggaagcatctccgatatcttagatgcatcacaaatgatcatcgaaaatcgtctacgtcgtctcagcccatacttcatccccaagattttgatcaacatggcatcaggtcatgtcagcatgagatatggtttccaggatgatccaatttggtgatgccgatgtgatggtggctggtggaactgagtccaatattgatgctttgtctatagcgggattttctaggttaagagcattgtctacaaaatataattcctctccacttttagcttcaagaccttttgattgcggtagagatggatttgtgattggtgagggctgtggggtcatggttttggaggcacttgatcatgcaaaggaacgcggtgcaaaaatatatgctgaagttcgaggctacggaatgtctggtacccttgttattcctcaatgaagattgtttatgtcttgaacacaaaggttgtttctgtcattagtatatgccagattatgaagctcagtttttcccaggtgatgcacaccacataactcagccacaaagtggtggtagaggtgctattttagccatgaagcgtgctttggaccagtcaggtcttcatgtaaatgaaattggttatgtgaatgcgcatgccacgtcgactcctcttggtgatgctgtggaggcgaacgcgatcaaatctgtatttggcgaccacgcagcatccggtgatcttgcaatatcctcaacaaagggactcgctccgcctactcttaacctggagcggccggacccgctgttcgaaggggcattcacgccactagctgcgcccaagaagatgtcgatacgagcagccatctccaactctttcgggtttggtggaactaacacgtcgctgctgttctcgtgcccgccctagtcctagtgtaacggcgctctgttttctggtcctcgctggaagtgaagaggcttcctgtaatattcagatatgttccgcaaggcaccacccgcctttagctgaagtttcttcaagttgttttttttcaagtcttagttaaactctgtttcgttattttttttaaaaaaaggaaaaagatggaaatttgataggtgagtgagacgttccctttggacatcattagcgtaaaatctgtactactgctatgatataacgtgtccaacatagacatcacttgctcttcatcggagaaagcagttcaaagtgaaaaactatgggcatgtttagttcgtgg

SEQ ID NO: 49850 - DNA, 1770 bp, Zea Mays
tcgtcggctgctcctgcccgcctccgtctcccacagcccacagtcccacacagccacggccacgccgccgtcctcgagccgcctgatgagctgcctccgccgcgcttcccgcctcacccggggtctctcttcctcctcggcggcggaggcggagacgctcccgccgccgcgcccctctgcgggtcgccgcgtggtcgtgacggggctgggcgccgtcacgccgctggcgcgcggcgtgggcgccacctgggatcgcctcgtcgcggggagatgcgccgtgcgctctctcgccgcagaggacctccgctttccggaggaagcagcggggaggacgctcgagcagctcccgtccagggtggtcgccgccgtgccgcgcgggaagggcgaggacgagttcgccgaggacacgtggaccaagctgatgaggctttaagagatgcaaattggttgccttccgaagatgataagaaggaaagaacgggagtctctattggtggagggattggaagcatctccgatatcttagatgcatcacaaatgatcatcgaaaatcgtctacgtcgtctcagcccatacttcatccccaagattttgatcaacatggcatcaggtcatgtcagcatgagatatggtttccagcttagggtccaaaccatgctgctgtgacagcttgcgccactggtgctcactctattggcgatgctactaggatgatccaatttggtgatgccgatgtgatggtggctggtggaactgagtccaatattgatgctttgtctatagcgggattttctaggttaagagcattgtctacaaaatataattcctctccacttttagcttcaagaccttttgattgcggtagagatggatttgtgattggtgagggctgtggggtcatggttttggaggcacttgatcatgcaaaggaacgcggtgcaaaaatatatgctgaagttcgaggctacggaatgtctggtgatgcacaccacataactcagccacaaagtggtggtagaggtgctattttagccatgaagcgtgctttggaccagtcaggtcttcatgtaaatgaaattggttatgtgaatgcgcatgccacgtcgactcctcttggtgatgctgtggaggcgaacgcgatcaaatctgtatttggcgaccacgcagcatccggtgatcttgcaatatcctcaacaaagggagcaattggtcatctgctaggggcagctggatcagtggaagcaatcttcactgtgctagcaattcaccacggactcgctccgcctactcttaacctggagcggccggacccgctgttcgaaggggcattcacgccactagctgcgcccaagaagatgtcgatacgagcagccatctccaactctttcgggtttggtggaactaacacgtcgctgctgttctcgtgcccgccctagtcctagtgtaacggcgctctgttttctggtcctcgctggaagtgaagaggcttcctgtaatattcagatatgttccgcaaggcaccacccgcctttagctgaagtttcttcaagttgttttttttcaagtcttagttaaactctgtttcgttattttttttaaaaaaaggaaaaagatggaaatttgataggtgagtgagacgttccctttggacatcattagcgtaaaatctgtactactgctatgatataacgtgtccaacatagacatcacttgctcttcatcggagaaagcagttcaaagtgaaaaactatgggcatgtttagttcgtgg

SEQ ID NO: 49851 - DNA, 1873 bp, Zea Mays
tcgtcggctgctcctgcccgcctccgtctcccacagcccacagtcccacacagccacggccacgccgccgtcctcgagccgcctgatgagctgcctccgccgcgcttcccgcctcacccggggtctctcttcctcctcggcggcggaggcggagacgctcccgccgccgcgcccctctgcgggtcgccgcgtggtcgtgacggggctgggcgccgtcacgccgctggcgcgcggcgtgggcgccacctgggatcgcctcgtcgcggggagatgcgccgtgcgctctctcgccgcagaggacctccgctttccggaggaagcagcggggaggacgctcgagcagctcccgtccagggtggtcgccgccgtgccgcgcgggaagggcgaggacgagttcgccgaggacacgtggaccaagctgatgaggctttaagagatgcaaattggttgccttccgaagatgataagaaggaaagaacggtaccatgtgtcttctgtagaagctcattttcatattcgtacttgtatttttgagttctgggtctgattaatgctgtatcagggagtctctattggtggagggattggaagcatctccgatatcttagatgcatcacaaatgatcatcgaaaatcgtctacgtcgtctcagcccatacttcatccccaagattttgatcaacatggcatcaggtcatgtcagcatgagatatggtttccagcttagggtccaaaccatgctgctgtgacagcttgcgccactggtgctcactctattggcgatgctactaggatgatccaatttggtgatgccgatgtgatggtggctggtggaactgagtccaatattgatgctttgtctatagcgggattttctaggttaagagcattgtctacaaaatataattcctctccacttttagcttcaagaccttttgattgcggtagagatggatttgtgattggtgagggctgtggggtcatggttttggaggtgagtggtttgggactttaggcacttgatcatgcaaaggaacgcggtgcaaaaatatatgctgaagttcgaggctacggaatgtctggtgatgcacaccacataactcagccacaaagtggtggtagaggtgctattttagccatgaagcgtgctttggaccagtcaggtcttcatgtaaatgaaattggttatgtgaatgcgcatgccacgtcgactcctcttggtgatgctgtggaggcgaacgcgatcaaatctgtatttggcgaccacgcagcatccggtgatcttgcaatatcctcaacaaagggagcaattggtcatctgctaggggcagctggatcagtggaagcaatcttcactgtgctagcaattcaccacggactcgctccgcctactcttaacctggagcggccggacccgctgttcgaaggggcattcacgccactagctgcgcccaagaagatgtcgatacgagcagccatctccaactctttcgggtttggtggaactaacacgtcgctgctgttctcgtgcccgccctagtcctagtgtaacggcgctctgttttctggtcctcgctggaagtgaagaggcttcctgtaatattcagatatgttccgcaaggcaccacccgcctttagctgaagtttcttcaagttgttttttttcaagtcttagttaaactctgtttcgttattttttttaaaaaaaggaaaaagatggaaatttgataggtgagtgagacgttccctttggacatcattagcgtaaaatctgtactactgctatgatataacgtgtccaacatagacatcacttgctcttcatcggagaaagcagttcaaagtgaaaaactatgggcatgtttagttcgtgg

SEQ ID NO: 49852 - DNA, 1764 bp, Zea Mays
tcgtcggctgctcctgcccgcctccgtctcccacagcccacagtcccacacagccacggccacgccgccgtcctcgagccgcctgatgagctgcctccgccgcgcttcccgcctcacccggggtctctcttcctcctcggcggcggaggcggagacgctcccgccgccgcgcccctctgcgggtcgccgcgtggtcgtgacggggctgggcgccgtcacgccgctggcgcgcggcgtgggcgccacctgggatcgcctcgtcgcggggagatgcgccgtgcgctctctcgccgcagaggacctccgctttccggaggaagcagcggggaggacgctcgagcagctcccgtccagggtggtcgccgccgtgccgcgcgggaagggcgaggacgagttcgccgaggacacgtggaccaaggataaatctgtatcaggatttatttcctatgctctgtgtgcagctgatgaggctttaagagatgcaaattggttgccttccgaagatgataagaaggaaagaacgggagtctctattggtggagggattggaagcatctccgatatcttagatgcatcacaaatgatcatcgaaaatcgtctacgtcgtctcagcccatacttcatccccaagattttgatcaacatggcatcaggtcatgtcagcatgagatatggtttccaggatgatccaatttggtgatgccgatgtgatggtggctggtggaactgagtccaatattgatgctttgtctatagcgggattttctaggttaagagcattgtctacaaaatataattcctctccacttttagcttcaagaccttttgattgcggtagagatggatttgtgattggtgagggctgtggggtcatggttttggaggtgagtggtttgggactttaggcacttgatcatgcaaaggaacgcggtgcaaaaatatatgctgaagttcgaggctacggaatgtctggtgatgcacaccacataactcagccacaaagtggtggtagaggtgctattttagccatgaagcgtgctttggaccagtcaggtcttcatgtaaatgaaattggttatgtgaatgcgcatgccacgtcgactcctcttggtgatgctgtggaggcgaacgcgatcaaatctgtatttggcgaccacgcagcatccggtgatcttgcaatatcctcaacaaagggagcaattggtcatctgctaggggcagctggatcagtggaagcaatcttcactgtgctagcaattcaccacggactcgctccgcctactcttaacctggagcggccggacccgctgttcgaaggggcattcacgccactagctgcgcccaagaagatgtcgatacgagcagccatctccaactctttcgggtttggtggaactaacacgtcgctgctgttctcgtgcccgccctagtcctagtgtaacggcgctctgttttctggtcctcgctggaagtgaagaggcttcctgtaatattcagatatgttccgcaaggcaccacccgcctttagctgaagtttcttcaagttgttttttttcaagtcttagttaaactctgtttcgttattttttttaaaaaaaggaaaaagatggaaatttgataggtgagtgagacgttccctttggacatcattagcgtaaaatctgtactactgctatgatataacgtgtccaacatagacatcacttgctcttcatcggagaaagcagttcaaagtgaaaaactatgggcatgtttagttcgtgg

SEQ ID NO: 49853 - DNA, 1813 bp, Zea Mays
tcgtcggctgctcctgcccgcctccgtctcccacagcccacagtcccacacagccacggccacgccgccgtcctcgagccgcctgatgagctgcctccgccgcgcttcccgcctcacccggggtctctcttcctcctcggcggcggaggcggagacgctcccgccgccgcgcccctctgcgggtcgccgcgtggtcgtgacggggctgggcgccgtcacgccgctggcgcgcggcgtgggcgccacctgggatcgcctcgtcgcggggagatgcgccgtgcgctctctcgccgcagaggacctccgctttccggaggaagcagcggggaggacgctcgagcagctcccgtccagggtggtcgccgccgtgccgcgcgggaagggcgaggacgagttcgccgaggacacgtggaccaaggataaatctgtatcaggatttatttcctatgctctgtgtgcagctgatgaggctttaagagatgcaaattggttgccttccgaagatgataagaaggaaagaacgggagtctctattggtggagggattggaagcatctccgatatcttagatgcatcacaaatgatcatcgaaaatcgtctacgtcgtctcagcccatacttcatccccaagattttgatcaacatggcatcaggtcatgtcagcatgagatatggtttccagcttagggtccaaaccatgctgctgtgacagcttgcgccactggtgctcactctattggcgatgctactaggatgatccaatttggtgatgccgatgtgatggtggctggtggaactgagtccaatattgatgctttgtctatagcgggattttctaggttaagagcattgtctacaaaatataattcctctccacttttagcttcaagaccttttgattgcggtagagatggatttgtgattggtgagggctgtggggtcatggttttggaggcacttgatcatgcaaaggaacgcggtgcaaaaatatatgctgaagttcgaggctacggaatgtctggtgatgcacaccacataactcagccacaaagtggtggtagaggtgctattttagccatgaagcgtgctttggaccagtcaggtcttcatgtaaatgaaattggttatgtgaatgcgcatgccacgtcgactcctcttggtgatgctgtggaggcgaacgcgatcaaatctgtatttggcgaccacgcagcatccggtgatcttgcaatatcctcaacaaagggagcaattggtcatctgctaggggcagctggatcagtggaagcaatcttcactgtgctagcaattcaccacggactcgctccgcctactcttaacctggagcggccggacccgctgttcgaaggggcattcacgccactagctgcgcccaagaagatgtcgatacgagcagccatctccaactctttcgggtttggtggaactaacacgtcgctgctgttctcgtgcccgccctagtcctagtgtaacggcgctctgttttctggtcctcgctggaagtgaagaggcttcctgtaatattcagatatgttccgcaaggcaccacccgcctttagctgaagtttcttcaagttgttttttttcaagtcttagttaaactctgtttcgttattttttttaaaaaaaggaaaaagatggaaatttgataggtgagtgagacgttccctttggacatcattagcgtaaaatctgtactactgctatgatataacgtgtccaacatagacatcacttgctcttcatcggagaaagcagttcaaagtgaaaaactatgggcatgtttagttcgtgg

SEQ ID NO: 49854 - DNA, 1861 bp, Zea Mays
tcgtcggctgctcctgcccgcctccgtctcccacagcccacagtcccacacagccacggccacgccgccgtcctcgagccgcctgatgagctgcctccgccgcgcttcccgcctcacccggggtctctcttcctcctcggcggcggaggcggagacgctcccgccgccgcgcccctctgcgggtcgccgcgtggtcgtgacggggctgggcgccgtcacgccgctggcgcgcggcgtgggcgccacctgggatcgcctcgtcgcggggagatgcgccgtgcgctctctcgccgcagaggacctccgctttccggaggaagcagcggggaggacgctcgagcagctcccgtccagggtggtcgccgccgtgccgcgcgggaagggcgaggacgagttcgccgaggacacgtggaccaaggataaatctgtatcaggatttatttcctatgctctgtgtgcagctgatgaggctttaagagatgcaaattggttgccttccgaagatgataagaaggaaagaacggtaccatgtgtcttctgtagaagctcattttcatattcgtacttgtatttttgagttctgggtctgattaatgctgtatcagggagtctctattggtggagggattggaagcatctccgatatcttagatgcatcacaaatgatcatcgaaaatcgtctacgtcgtctcagcccatacttcatccccaagattttgatcaacatggcatcaggtcatgtcagcatgagatatggtttccagcttagggtccaaaccatgctgctgtgacagcttgcgccactggtgctcactctattggcgatgctactaggatgatccaatttggtgatgccgatgtgatggtggctggtggaactgagtccaatattgatgctttgtctatagcgggattttctaggttaagagcattgtctacaaaatataattcctctccacttttagcttcaagaccttttgattgcggtagagatggatttgtgcacttgatcatgcaaaggaacgcggtgcaaaaatatatgctgaagttcgaggctacggaatgtctggtgatgcacaccacataactcagccacaaagtggtggtagaggtgctattttagccatgaagcgtgctttggaccagtcaggtcttcatgtaaatgaaattggttatgtgaatgcgcatgccacgtcgactcctcttggtgatgctgtggaggcgaacgcgatcaaatctgtatttggcgaccacgcagcatccggtgatcttgcaatatcctcaacaaagggagcaattggtcatctgctaggggcagctggatcagtggaagcaatcttcactgtgctagcaattcaccacggactcgctccgcctactcttaacctggagcggccggacccgctgttcgaaggggcattcacgccactagctgcgcccaagaagatgtcgatacgagcagccatctccaactctttcgggtttggtggaactaacacgtcgctgctgttctcgtgcccgccctagtcctagtgtaacggcgctctgttttctggtcctcgctggaagtgaagaggcttcctgtaatattcagatatgttccgcaaggcaccacccgcctttagctgaagtttcttcaagttgttttttttcaagtcttagttaaactctgtttcgttattttttttaaaaaaaggaaaaagatggaaatttgataggtgagtgagacgttccctttggacatcattagcgtaaaatctgtactactgctatgatataacgtgtccaacatagacatcacttgctcttcatcggagaaagcagttcaaagtgaaaaactatgggcatgtttagttcgtgg

SEQ ID NO: 49855 - DNA, 1839 bp, Zea Mays
tcgtcggctgctcctgcccgcctccgtctcccacagcccacagtcccacacagccacggccacgccgccgtcctcgagccgcctgatgagctgcctccgccgcgcttcccgcctcacccggggtctctcttcctcctcggcggcggaggcggagacgctcccgccgccgcgcccctctgcgggtcgccgcgtggtcgtgacggggctgggcgccgtcacgccgctggcgcgcggcgtgggcgccacctgggatcgcctcgtcgcggggagatgcgccgtgcgctctctcgccgcagaggacctccgctttccggaggaagcagcggggaggacgctcgagcagctcccgtccagggtggtcgccgccgtgccgcgcgggaagggcgaggacgagttcgccgaggacacgtggaccaaggataaatctgtatcaggatttatttcctatgctctgtgtgcagctgatgaggctttaagagatgcaaattggttgccttccgaagatgataagaaggaaagaacgggagtctctattggtggagggattggaagcatctccgatatcttagatgcatcacaaatgatcatcgaaaatcgtctacgtcgtctcagcccatacttcatccccaagattttgatcaacatggcatcaggtcatgtcagcatgagatatggtttccaggatgatccaatttggtgatgccgatgtgatggtggctggtggaactgagtccaatattgatgctttgtctatagcgggattttctaggttaagagcattgtctacaaaatataattcctctccacttttagcttcaagaccttttgattgcggtagagatggatttgtgattggtgagggctgtggggtcatggttttggaggcacttgatcatgcaaaggaacgcggtgcaaaaatatatgctgaagttcgaggctacggaatgtctggtacccttgttattcctcaatgaagattgtttatgtcttgaacacaaaggttgtttctgtcattagtatatgccagattatgaagctcagtttttcccaggtgatgcacaccacataactcagccacaaagtggtggtagaggtgctattttagccatgaagcgtgctttggaccaggtcttcatgtaaatgaaattggttatgtgaatgcgcatgccacgtcgactcctcttggtgatgctgtggaggcgaacgcgatcaaatctgtatttggcgaccacgcagcatccggtgatcttgcaatatcctcaacaaagggagcaattggtcatctgctaggggcagctggatcagtggaagcaatcttcactgtgctagcaattcaccacggactcgctccgcctactcttaacctggagcggccggacccgctgttcgaaggggcattcacgccactagctgcgcccaagaagatgtcgatacgagcagccatctccaactctttcgggtttggtggaactaacacgtcgctgctgttctcgtgcccgccctagtcctagtgtaacggcgctctgttttctggtcctcgctggaagtgaagaggcttcctgtaatattcagatatgttccgcaaggcaccacccgcctttagctgaagtttcttcaagttgttttttttcaagtcttagttaaactctgtttcgttattttttttaaaaaaaggaaaaagatggaaatttgataggtgagtgagacgttccctttggacatcattagcgtaaaatctgtactactgctatgatataacgtgtccaacatagacatcacttgctcttcatcggagaaagcagttcaaagtgaaaaactatgggcatgtttagttcgtgg

SEQ ID NO: 49856 - DNA, 1721 bp, Zea Mays
tcgtcggctgctcctgcccgcctccgtctcccacagcccacagtcccacacagccacggccacgccgccgtcctcgagccgcctgatgagctgcctccgccgcgcttcccgcctcacccggggtctctcttcctcctcggcggcggaggcggagacgctcccgccgccgcgcccctctgcgggtcgccgcgtggtcgtgacggggctgggcgccgtcacgccgctggcgcgcggcgtgggcgccacctgggatcgcctcgtcgcggggagatgcgccgtgcgctctctcgccgcagaggacctccgctttccggaggaagcagcggggaggacgctcgagcagctcccgtccagggtggtcgccgccgtgccgcgcgggaagggcgaggacgagttcgccgaggacacgtggaccaagctgatgaggctttaagagatgcaaattggttgccttccgaagatgataagaaggaaagaacgggagtctctattggtggagggattggaagcatctccgatatcttagatgcatcacaaatgatcatcgaaaatcgtctacgtcgtctcagcccatacttcatccccaagattttgatcaacatggcatcaggtcatgtcagcatgagatatggtttccaggatgatccaatttggtgatgccgatgtgatggtggctggtggaactgagtccaatattgatgctttgtctatagcgggattttctaggttaagagcattgtctacaaaatataattcctctccacttttagcttcaagaccttttgattgcggtagagatggatttgtgattggtgagggctgtggggtcatggttttggaggtgagtggtttgggactttaggcacttgatcatgcaaaggaacgcggtgcaaaaatatatgctgaagttcgaggctacggaatgtctggtgatgcacaccacataactcagccacaaagtggtggtagaggtgctattttagccatgaagcgtgctttggaccagtcaggtcttcatgtaaatgaaattggttatgtgaatgcgcatgccacgtcgactcctcttggtgatgctgtggaggcgaacgcgatcaaatctgtatttggcgaccacgcagcatccggtgatcttgcaatatcctcaacaaagggagcaattggtcatctgctaggggcagctggatcagtggaagcaatcttcactgtgctagcaattcaccacggactcgctccgcctactcttaacctggagcggccggacccgctgttcgaaggggcattcacgccactagctgcgcccaagaagatgtcgatacgagcagccatctccaactctttcgggtttggtggaactaacacgtcgctgctgttctcgtgcccgccctagtcctagtgtaacggcgctctgttttctggtcctcgctggaagtgaagaggcttcctgtaatattcagatatgttccgcaaggcaccacccgcctttagctgaagtttcttcaagttgttttttttcaagtcttagttaaactctgtttcgttattttttttaaaaaaaggaaaaagatggaaatttgataggtgagtgagacgttccctttggacatcattagcgtaaaatctgtactactgctatgatataacgtgtccaacatagacatcacttgctcttcatcggagaaagcagttcaaagtgaaaaactatgggcatgtttagttcgtgg

SEQ ID NO: 49857 - DNA, 673 bp, Zea Mays
gtgtcatgctttacttttgttgctcacggtgtccatgataaatctgtatcaggatttatttcctatgctctgtgtgcagctgatgaggctttaagagatgcaaattggttgccttccgaagatgataagaaggaaagaacgggagtctctattggtggagggattggaagcatctccgatatcttagatgcatcacaaatgatcatcgaaaatcgtctacgtcgtctcagcccatacttcatccccaagattttgatcaacatggcatcaggtcatgtcagcatgagatatggtttccaggatgatccaatttggtgatgccgatgtgatggtggctggtggaactgagtccaatattgatgctttgtctatagcgggattttctaggttaagagcattgtctacaaaatataattcctctccacttttagcttcaagaccttttgattgcggtagagatggatttgtgattggtgagggctgtggggtcatggttttggagaacagattatgaactgtgaactctgaagaagtctgatgttctctagggtggtcaggaagtctgaactatgaagaagtctgaactctgaagtttaggatggctgcacgctggacggtggacaccggtggaggcatggagcggaggcgggcgctgcacactggagggcggagg

SEQ ID NO: 49858 - DNA, 2609 bp, Zea Mays
cgcgcacgcccgcagctagctgccagctgcgcacccgccgccaccccgcgcccgccccaccgcgcgtcggctcgcgcgccgccacccagtgcggccccgccgccccaccgttaaggcaggttatgcggccgacaagggggcggcgtccgggaacccatagagtcacgtcgtgctggggaggcataggattcggatccggccgtggccgcacccggacctcgtcgaggtgatgcgggcgcaccggatcatggagtgcgtgcaggaggaacagcgccgctggtacggtgtcaaggagccgaggcaggtgctcgctgtcaccccgacctactcacgcgcgttccaggcgctccacctcatcggcctcctccactcactccgtcgaaatccttgcgcatactggcacggtagaccaactacggctcagcgaggaggacaagcagaatatgcctcttccagtccatggccctgcttgcaactcctcagggcatctgattggatggcacacgttcaactcattgcccttctctgggaagacggccacagttgttggtgaagcaacccctgttctgcctagggatttggagtgggctggttttgtgttgaactcgaggatgctgtggaaggaggctgacagcaagcctgactgggtgaaggatcttgatgctgtgggtgagaactttgaggagcgctggttaaaggcatcaaagcgcagtgccgctaagaaactgtcaaaattgtcgaggtcgcataatgagtcgttgttgtggatcaagaagatacctgatattattgctattgacgacgagatctattcaaatgatgatgatccagagagatgggacatgcagattttccgatcaattgattcgaattctgtcaagggttttccaaaagatccacgggaggccactagtaagcatatgtgaatgtcatccgaggtgctcaacatttcatctatattgagaaccagtacttccttggctcttcatttaactgggattcacatagagatgttgaaaatgacaatgcaaatgatgtatgagataatctataaggccttgaaagaagtaggactagatggtacatatgagccacaggattacctgaatttcttctgccttggtaaccgtgaagctgaggacactacttgcacatctagtggaccattctcagccagtaacccacaggttagactgcagactattgttctgttttctgctgctgattccggtacactttagaaatgcccaaaactgaaggaggtactgatttccccaaaaaaatacaattatgctgcaacttggatatccaatcaggaccaagctcggaagaataggagattcatggtgtatgtgcactcgaaaggcatgattgtggatgatgaatatgtgataattggatccgctaacatcaaccagagatccatggaaggaactagagatacagagattgcaatggctgcataccaaccccagcatacatgggcaaatatgctttctgctcctcgtggacagattttcgggtacaggaaaatacagtgtacgtgttgaaactgttatcctgccccaggttgggatggacggcggtacatacgtgttggtagaactgtgagaagaaaagatgggaaaatttgctttcttggctgcgatggttatctgctcaaacaagatatgcaaattgcaaaactcttaaaggatagtattagttctatttgttcatacagttctacagctagttgtttcttgctttgttcatggattgcaatactggataagatcatgatggatgtcgtgtgtgttttaatcaccatttctaaaatttattctattggtaagacgattctaagatataggtcggagttggattccttgcatatacataaacagataaagaagcaaccggtttataacaaaaatatgtcttctgttttgcctgttgcccaattctcttttagtgtagcctacttacaataattaaaagaagagttggtgtctgtttgagtagacagctaagtgcatatataagtacgtgcatgattttgattactaattgtgattttgatgatctttcttttgaagacggtctaacatataagcgcatgatttagatgaacggaattactattgtgccatttctgaagaatcttactattttctcttgccttcttagaacaacatgggaagaagtgatgatgacagtccatcgccgccaagaggtcacatgagaagaactcgcagcccaagtccttgtggtagttatggaggccatggcaagcgccccacaactaatcttatggtgacgaatcttggtccagattgtaggattccgactctcatcaagtgactcctcccctcacgatgactttgcggacagatgtctcaattatagtggtggagctacgaacaacaatccgatgtcctgatcgagagcgatggagctaatgtttgaacttgtgtgtttgaacttgtgaactaaaaatgtgaactatggatgtgaacttatgtgaatttgtgaacttatgtatttgaacttatgtgaatttgtgaacttatgtatttggacttgtgtgaatttgtgatatgaatatatatccatgtgtttgaaatctg

SEQ ID NO: 49859 - DNA, 2575 bp, Zea Mays
gcgcacccgccgccaccccgcgcccgccccaccgcgcgtcggctcgcgcgccgccacccagtgcggccccgccgccccaccgttaaggcaggttatgcggccgacaagggggcggcgtccgggaacccatagagtcacgtcgtgctggggaggcataggattcggatccggccgtggccgcacccggacctcgtcgaggtgatgcgggcgcaccggatcatggagtgcgtgcaggaggaacagcgccgctggtacggtgtcaaggagccgaggcaggtgctcgctgtcaccccgacctactcacgcgcgttccaggcgctccacctcatcggcctcctccactcactccgtcgaaatccttgcgcatactggcacggtagaccaactacggctcagcgaggaggacaagcagaatatgcctcttccagtccatggccctgcttgcaactcctcagggcatctgattggatggcacacgttcaactcattgcccttctctgggaagacggccacagttgttggtgaagcaacccctgttctgcctagggatttggagtgggctggttttgtgttgaactcgaggatgctgtggaaggaggctgacagcaagcctgactgggtgaaggatcttgatgctgtgggtgagaactttgaggagcgctggttaaaggcatcaaagcgcagtgccgctaagaaactgtcaaaattgtcgaggtcgcataatgagtcgttgttgtggatcaagaagatacctgatattattgctattgacgacgagatctattcaaatgatgatgatccagagagatgggacatgcagattttccgatcaattgattcgaattctgtcaagggttttccaaaagatccacgggaggccactagtaagaatcttgtttttgggaaaaatgtactgattgatatgagcgtgcatacagcatatgtgaatgtcatccgaggtgctcaacatttcatctatattgagaaccagtacttccttggctcttcatttaactgggattcacatagagatgttgaaaatgacaatgcaaatgatgtatgagataatctataaggccttgaaagaagtaggactagatggtacatatgagccacaggattacctgaatttcttctgccttggtaaccgtgaagctgaggacactacttgcacatctagtggaccattctcagccagtaacccacaggttagactgcagactattgttctgttttctgctgctgattccggtacactttagaaatgcccaaaactgaaggaggtactgatttccccaaaaaaatacaattatgctgcaacttggatatccaatcaggaccaagctcggaagaataggagattcatggtgtatgtgcactcgaaaggcatgattgtggatgatgaatatgtgataattggatccgctaacatcaaccagagatccatggaaggaactagagatacagagattgcaatggctgcataccaaccccagcatacatgggcaaatatgctttctgctcctcgtggacaggttgggatggacggcggtacatacgtgttggtagaactgtgagaagaaaagatgggaaaatttgctttcttggctgcgatggttatctgctcaaacaagatatgcaaattgcaaaactcttaaaggatagtattagttctatttgttcatacagttctacagctagttgtttcttgctttgttcatggattgcaatactggataagatcatgatggatgtcgtgtgtgttttaatcaccatttctaaaatttattctattggtaagacgattctaagatataggtcggagttggattccttgcatatacataaacagataaagaagcaaccggtttataacaaaaatatgtcttctgttttgcctgttgcccaattctcttttagtgtagcctacttacaataattaaaagaagagttggtgtctgtttgagtagacagctaagtgcatatataagtacgtgcatgattttgattactaattgtgattttgatgatctttcttttgaagacggtctaacatataagcgcatgatttagatgaacggaattactattgtgccatttctgaagaatcttactattttctcttgccttcttagaacaacatgggaagaagtgatgatgacagtccatcgccgccaagaggtcacatgagaagaactcgcagcccaagtccttgtggtagttatggaggccatggcaagcgccccacaactaatcttatggtgacgaatcttggtccagattgtaggattccgactctcatcaagtgactcctcccctcacgatgactttgcggacagatgtctcaattatagtggtggagctacgaacaacaatccgatgtcctgatcgagagcgatggagctaatgtttgaacttgtgtgtttgaacttgtgaactaaaaatgtgaactatggatgtgaacttatgtgaatttgtgaacttatgtatttgaacttatgtgaatttgtgaacttatgtatttggacttgtgtgaatttgtgatatgaatatatatccatgtgtttgaaatctg

SEQ ID NO: 49860 - DNA, 2621 bp, Zea Mays
gcgcacccgccgccaccccgcgcccgccccaccgcgcgtcggctcgcgcgccgccacccagtgcggccccgccgccccaccgttaaggcaggttatgcggccgacaagggggcggcgtccgggaacccatagagtcacgtcgtgctggggaggcataggattcggatccggccgtggccgcacccggacctcgtcgaggtgatgcgggcgcaccggatcatggagtgcgtgcaggaggaacagcgccgctggtacggtgtcaaggagccgaggcaggtgctcgctgtcaccccgacctactcacgcgcgttccaggcgctccacctcatcggcctcctccactcactccgtcgaaatccttgcgcatactggcacggtagaccaactacggctcagcgaggaggacaagcagaatatgcctcttccagtccatggccctgcttgcaactcctcagggcatctgattggatggcacacgttcaactcattgcccttctctgggaagacggccacagttgttggtgaagcaacccctgttctgcctagggatttggagtgggctggttttgtgttgaactcgaggatgctgtggaaggaggctgacagcaagcctgactgggtgaaggatcttgatgctgtgggtgagaactttgaggagcgctggttaaaggcatcaaagcgcagtgccgctaagaaactgtcaaaattgtcgaggtcgcataatgagtcgttgttgtggatcaagaagatacctgatattattgctattgacgacgagatctattcaaatgatgatgatccagagagatgggacatgcagattttccgatcaattgattcgaattctgtcaagggttttccaaaagatccacgggaggccactagtaagcatatgtgaatgtcatccgaggtgctcaacatttcatctatattgagaaccagtacttccttggctcttcatttaactgggattcacatagagatgttgaaaatgacaatgcaaatgatgtatgagataatctataaggccttgaaagaagtaggactagatggtacatatgagccacaggattacctgaatttcttctgccttggtaaccgtgaagctgaggacactacttgcacatctagtggaccattctcagccagtaacccacaggttagactgcagactattgttctgttttctgctgctgattccggtacactttagaaatgcccaaaactgaaggaggtactgatttccccaaaaaaatacaattatgctgcaacttggatatccaatcaggaccaagctcggaagaataggagattcatggtgtatgtgcactcgaaaggcatgattgtggatgatgaatatgtgataattggatccgctaacatcaaccagagatccatggaaggaactagagatacagagattgcaatggctgcataccaaccccagcatacatgggcaaatatgctttctgctcctcgtggacagattttcgggtacaggaaaatacagtgtacgtgttgaaactgttatcctgccccaggttgggatggacggcggtacatacgtgttggtagaactgtgagaagaaaagatgggaaaatttgctttcttggctgcgatggttatctgctcaaacaagatatgcaaattgcaaaactcttaaaggatagtattagttctatttgttcatacagttctacagctagttgtttcttgctttgttcatggattgcaatactggataagatcatgatggatgtcgtgtgtgttttaatcaccatttctaaaatttattctattggtaagacgattctaagatataggtcggagttggattccttgcatatacataaacagataaagaagcaaccggtttataacaaaaatatgtcttctgttttgcctgttgcccaattctcttttagtgtagcctacttacaataattaaaagaagagttggtgtctgtttgagtagacagctaagtgcatatataagtacgtgcatgattttgattactaattgtgattttgatgatctttcttttgaagacggtctaacatataagcgcatgatttagatgaacggaattactattgtgccatttctgaagaatcttactattttctcttgccttcttagaacaacatgggaagaagtgatgatgacagtccatcgccgccaagaggtcacatgagaagaactcgcagcccaagtccttgtggtagttatggaggccatggcaagcgccccacaactaatcttatggtgacgaatcttggtccagattgtaggagttatcaccttcgtgaaccattttggtttattttgtaggattccgactctcatcaagtgactcctcccctcacgatgactttgcggacagatgtctcaattatagtggtggagctacgaacaacaatccgatgtcctgatcgagagcgatggagctaatgtttgaacttgtgtgtttgaacttgtgaactaaaaatgtgaactatggatgtgaacttatgtgaatttgtgaacttatgtatttgaacttatgtgaatttgtgaacttatgtatttggacttgtgtgaatttgtgatatgaatatatatccatgtgtttgaaatctg

SEQ ID NO: 49861 - DNA, 2330 bp, Zea Mays
gcgcacccgccgccaccccgcgcccgccccaccgcgcgtcggctcgcgcgccgccacccagtgcggccccgccgccccaccgttaaggcaggttatgcggccgacaagggggcggcgtccgggaacccatagagtcacgtcgtgctggggaggcataggattcggatccggccgtggccgcacccggacctcgtcgaggtgatgcgggcgcaccggatcatggagtgcgtgcaggaggaacagcgccgctggtacggtgtcaaggagccgaggcaggtgctcgctgtcaccccgacctactcacgcgcgttccaggcgctccacctcatcggcctcctccactcactccgtcgaaatccttgcgcatactggcacggtagaccaactacggctcagcgaggaggacaagcagaatatgcctcttccagtccatggccctgcttgcaactcctcagggcatctgattggatggcacacgttcaactcattgcccttctctgggaagacggccacagttgttggtgaagcaacccctgttctgcctagggatttggagtgggctggttttgtgttgaactcgaggatgctgtggaaggaggctgacagcaagcctgactgggtgaaggatcttgatgctgtgggtgagaactttgaggagcgctggttaaaggcatcaaagcgcagtgccgctaagaaactgtcaaaattgtcgaggtcgcataatgagtcgttgttgtggatcaagaagatacctgatattattgctattgacgacgagatctattcaaatgatgatgatccagagagatgggacatgcagattttccgatcaattgattcgaattctgtcaagggttttccaaaagatccacgggaggccactagtaagaatcttgtttttgggaaaaatgtactgattgatatgagcgtgcatacagcatatgtgaatgtcatccgaggtgctcaacatttcatctatattgagaaccagtacttccttggctcttcatttaactgggattcacatagagatgttggaccaagctcggaagaataggagattcatggtgtatgtgcactcgaaaggcatgattgtggatgatgaatatgtgataattggatccgctaacatcaaccagagatccatggaaggaactagagatacagagattgcaatggctgcataccaaccccagcatacatgggcaaatatgctttctgctcctcgtggacagattttcgggtacaggaaaatacagtgtacgtgttgaaactgttatcctgccccaggttgggatggacggcggtacatacgtgttggtagaactgtgagaagaaaagatgggaaaatttgctttcttggctgcgatggttatctgctcaaacaagatatgcaaattgcaaaactcttaaaggatagtattagttctatttgttcatacagttctacagctagttgtttcttgctttgttcatggattgcaatactggataagatcatgatggatgtcgtgtgtgttttaatcaccatttctaaaatttattctattggtaagacgattctaagatataggtcggagttggattccttgcatatacataaacagataaagaagcaaccggtttataacaaaaatatgtcttctgttttgcctgttgcccaattctcttttagtgtagcctacttacaataattaaaagaagagttggtgtctgtttgagtagacagctaagtgcatatataagtacgtgcatgattttgattactaattgtgattttgatgatctttcttttgaagacggtctaacatataagcgcatgatttagatgaacggaattactattgtgccatttctgaagaatcttactattttctcttgccttcttagaacaacatgggaagaagtgatgatgacagtccatcgccgccaagaggtcacatgagaagaactcgcagcccaagtccttgtggtagttatggaggccatggcaagcgccccacaactaatcttatggtgacgaatcttggtccagattgtaggattccgactctcatcaagtgactcctcccctcacgatgactttgcggacagatgtctcaattatagtggtggagctacgaacaacaatccgatgtcctgatcgagagcgatggagctaatgtttgaacttgtgtgtttgaacttgtgaactaaaaatgtgaactatggatgtgaacttatgtgaatttgtgaacttatgtatttgaacttatgtgaatttgtgaacttatgtatttggacttgtgtgaatttgtgatatgaatatatatccatgtgtttgaaatctg

SEQ ID NO: 49862 - DNA, 1699 bp, Zea Mays
aaacaagatttattcgaatgagagattttcagcttatatagtagttccaatgtggcctgagggcaatcctactggaactcttacgcaaaggattctttattggcagaaaatgacaatgcaaatgatgtatgagataatctataaggccttgaaagaagtaggactagatggtacatatgagccacaggattacctgaatttcttctgccttggtaaccgtgaagctgaggacactacttgcacatctagtggaccattctcagccagtaacccacaggttagactgcagactattgttctgttttctgctgctgattccggtacactttagaaatgcccaaaactgaaggaggtactgatttccccaaaaaaatacaattatgctgcaacttggatatccaatcaggaccaagctcggaagaataggagattcatggtgtatgtgcactcgaaaggcatgattgtggatgatgaatatgtgataattggatccgctaacatcaaccagagatccatggaaggaactagagatacagagattgcaatggctgcataccaaccccagcatacatgggcaaatatgctttctgctcctcgtggacagattttcgggtacaggaaaatacagtgtacgtgttgaaactgttatcctgccccaggttgggatggacggcggtacatacgtgttggtagaactgtgagaagaaaagatgggaaaatttgctttcttggctgcgatggttatctgctcaaacaagatatgcaaattgcaaaactcttaaaggatagtattagttctatttgttcatacagttctacagctagttgtttcttgctttgttcatggattgcaatactggataagatcatgatggatgtcgtgtgtgttttaatcaccatttctaaaatttattctattggtaagacgattctaagatataggtcggagttggattccttgcatatacataaacagataaagaagcaaccggtttataacaaaaatatgtcttctgttttgcctgttgcccaattctcttttagtgtagcctacttacaataattaaaagaagagttggtgtctgtttgagtagacagctaagtgcatatataagtacgtgcatgattttgattactaattgtgattttgatgatctttcttttgaagacggtctaacatataagcgcatgatttagatgaacggaattactattgtgccatttctgaagaatcttactattttctcttgccttcttagaacaacatgggaagaagtgatgatgacagtccatcgccgccaagaggtcacatgagaagaactcgcagcccaagtccttgtggtagttatggaggccatggcaagcgccccacaactaatcttatggtgacgaatcttggtccagattgtaggattccgactctcatcaagtgactcctcccctcacgatgactttgcggacagatgtctcaattatagtggtggagctacgaacaacaatccgatgtcctgatcgagagcgatggagctaatgtttgaacttgtgtgtttgaacttgtgaactaaaaatgtgaactatggatgtgaacttatgtgaatttgtgaacttatgtatttgaacttatgtgaatttgtgaacttatgtatttggacttgtgtgaatttgtgatatgaatatatatccatgtgtttgaaatctg

SEQ ID NO: 49863 - DNA, 1765 bp, Zea Mays
ttttttaccttaaaaaggtttagtaaaccctgctgtctgctggtcttcagttttcacggcgggttgtcgtggcctgtggctgggagcctgggtggctgtgggcaggagtatgccaagatgatcgagacaccaacaaaccaaacaccatccgccacgaccacgactccacgagagagcggaggaggagggggagcaatggcagagccgggccagcagttgctgcggtcgttcgtggaggtggcagcgggctcgcacttccctatccagaacctgcccttcggggtcttccgccggcgggggtcgccaccgcaggctccgctccccccggtggccatcggggacttcgcgctcgacctcgccaccgtcgccgacgcgggtctcttcgacgggcccgcgctctccggctccccgtgcttccaccaggagacgctcaacatgttcttggggatgggccgaccggcgtggagggaggcgcgcgccacgctacaaaaaatcctctcagccgacgagccagtcttgcgtgacaacgaagccctgaggaataaatgtcttattccaatgagtgatatcgagatggttctaccaatcacggttggaggttacacagatttcttttgttctgtgcaccatgcaaggaactgcggattcatcttccgagggccgcagactccagttaatccaaattggttttatcttccaataggatacaatggacgagcatcatctatagttgtgtctggaaccgatgtaattaggcccagaggacaaggacatccaacaggaaactccgctccttattttggtccctctcagaagcttgattttgagcttgagatggctgccattgttggtccaggaaatgaattaggcaaaccaattgatatcaatgatgctgaagaacatatttttggcctaactttgatgaatgattggagcgccagagatattcaggcttgggagactatacctcttggacctttccttgggaaaagcttcagtaccaccatatcaccatggattgttactcttgatgctttgaagcctttcatgtgtgaggctcctaagcaggtcttgattaagcctaaagatcaaaatgttgcactaattgtcacaaaaactaatttcaagcatctgtattggacggtgacgcagcagctaacacaccacactatcaatggatgcaacatgaggccgggggatatatttgcaactggcacactcagtggacctgaaccggactccctcggatgtctattggagctaacatggaacgggcagaaggagataccagtgggcaatttgacccgcaagtttctagaagatggagatgaggtcatcttgacaggatgctgcaagggtgaaggctacaacattggttttggaacttgcactgggaaggtcctgccggcacttccctgagccaacacgtctttacatcagttctcgagtccaaacactcaacaatctagcaagatgctatgtaactgaacaacgggggttgttttcgcataggaaactgatactctgttgtggaataaaatcggttcaccattttatacacattttctctctcaagaattgtgttattaaacttgtaaaaatgcaatgtctctcatctcttcatccatcgcccagtgagatttgaattctgtgagtatctgtgtatatgggcctggccgcccactagggttccatatactcttgtactcctgcagctagggtattgtattctatactgcaacatggtatcaaagctttatgtttc

SEQ ID NO: 49864 - DNA, 1824 bp, Zea Mays
ttttttaccttaaaaaggtttagtaaaccctgctgtctgctggtcttcagttttcacggcgggttgtcgtggcctgtggctgggagcctgggtggctgtgggcaggagtatgccaagatgatcgagacaccaacaaaccaaacaccatccgccacgaccacgactccacgagagagcggaggaggagggggagcaatggcagagccgggccagcagttgctgcggtcgttcgtggaggtggcagcgggctcgcacttccctatccagaacctgcccttcggggtcttccgccggcgggggtcgccaccgcaggctccgctccccccggtggccatcggggacttcgcgctcgacctcgccaccgtcgccgacgcgggtctcttcgacgggcccgcgctctccggctccccgtgcttccaccaggagacgctcaacatgttcttggggatgggccgaccggcgtggagggaggcgcgcgccacgctacaaaaaatcctctcagccgacgagccagtcttgcgtgacaacgaagccctgaggaataaatgtcttattccaatgagtgatatcgagatggttctaccaatcacggttggaggttacacagatttcttttgttctgtgcaccatgcaaggaactgcggattcatcttccgagggccgcagactccagttaatccaaattggttttatcttccaataggatacaatggacgagcatcatctatagttgtgtctggaaccgatgtaattaggcccagaggacaaggacatccaacaggaaactccgctccttattttggtccctctcagaagcttgattttgagcttgagatggctgccattgttggtccaggaaatgaattaggcaaaccaattgatatcaatgatgctgaagaacatatttttggcctaactttgatgaatgattggagcgagatattcaggcttgggagactatacctcttggacctttccttgggaaaagcttcagtaccaccatatcaccatggattgttactcttgatgctttgaagcctttcatgtgtgaggctcctaagcaggaacccgaacctttaccatacctagctgaaaagaatcacataaactatgacattcctcttgaagtcttgattaagcctaaagatcaaaatgttgcactaattgtcacaaaaactaatttcaagcatctgtattggacggtgacgcagcagctaacacaccacactatcaatggatgcaacatgaggccgggggatatatttgcaactggcacactcagtggacctgaaccggactccctcggatgtctattggagctaacatggaacgggcagaaggagataccagtgggcaatttgacccgcaagtttctagaagatggagatgaggtcatcttgacaggatgctgcaagggtgaaggctacaacattggttttggaacttgcactgggaaggtcctgccggcacttccctgagccaacacgtctttacatcagttctcgagtccaaacactcaacaatctagcaagatgctatgtaactgaacaacgggggttgttttcgcataggaaactgatactctgttgtggaataaaatcggttcaccattttatacacattttctctctcaagaattgtgttattaaacttgtaaaaatgcaatgtctctcatctcttcatccatcgcccagtgagatttgaattctgtgagtatctgtgtatatgggcctggccgcccactagggttccatatactcttgtactcctgcagctagggtattgtattctatactgcaacatggtatcaaagctttatgtttc

SEQ ID NO: 49865 - DNA, 1741 bp, Zea Mays
ttttttaccttaaaaaggtttagtaaaccctgctgtctgctggtcttcagttttcacggcgggttgtcgtggcctgtggctgggagcctgggtggctgtgggcaggagtatgccaagatgatcgagacaccaacaaaccaaacaccatccgccacgaccacgactccacgagagagcggaggaggagggggagcaatggcagagccgggccagcagttgctgcggtcgttcgtggaggtggcagcgggctcgcacttccctatccagaacctgcccttcggggtcttccgccggcgggggtcgccaccgcaggctccgctccccccggtggccatcggggacttcgcgctcgacctcgccaccgtcgccgacgcgggtctcttcgacgggcccgcgctctccggctccccgtgcttccaccaggagacgctcaacatgttcttggggatgggccgaccggcgtggagggaggcgcgcgccacgctacaaaaaatcctctcagccgacgagccagtcttgcgtgacaacgaagccctgaggaataaatgtcttattccaatgagtgatatcgagatggttctaccaatcacggttggaggttacacagatttcttttgttctgtgcaccatgcaaggaactgcggattcatcttccgagggccgcagactccagttaatccaaattggttttatcttccaataggatacaatggacgagcatcatctatagttgtgtctggaaccgatgtaattaggcccagaggacaaggacatccaacaggaaactccgctccttattttggtccctctcagaagcttgattttgagcttgagatggctgccattgttggtccaggaaatgaattaggcaaaccaattgatatcaatgatgctgaagaacatatttttggcctaactttgatgaatgattggagcgccagagatattcaggcttgggagactatacctcttggacctttccttgggaaaagcttcagtaccaccatatcaccatggattgttactcttgatgctttgaagcctttcatgtgtgaggctcctaagcaggaacccgaacctttaccatacctagctgaaaagaatcacataaactatgacattcctcttgaactaacacaccacactatcaatggatgcaacatgaggccgggggatatatttgcaactggcacactcagtggacctgaaccggactccctcggatgtctattggagctaacatggaacgggcagaaggagataccagtgggcaatttgacccgcaagtttctagaagatggagatgaggtcatcttgacaggatgctgcaagggtgaaggctacaacattggttttggaacttgcactgggaaggtcctgccggcacttccctgagccaacacgtctttacatcagttctcgagtccaaacactcaacaatctagcaagatgctatgtaactgaacaacgggggttgttttcgcataggaaactgatactctgttgtggaataaaatcggttcaccattttatacacattttctctctcaagaattgtgttattaaacttgtaaaaatgcaatgtctctcatctcttcatccatcgcccagtgagatttgaattctgtgagtatctgtgtatatgggcctggccgcccactagggttccatatactcttgtactcctgcagctagggtattgtattctatactgcaacatggtatcaaagctttatgtttc

SEQ ID NO: 49866 - DNA, 1723 bp, Zea Mays
ttttttaccttaaaaaggtttagtaaaccctgctgtctgctggtcttcagttttcacggcgggttgtcgtggcctgtggctgggagcctgggtggctgtgggcaggagtatgccaagatgatcgagacaccaacaaaccaaacaccatccgccacgaccacgactccacgagagagcggaggaggagggggagcaatggcagagccgggccagcagttgctgcggtcgttcgtggaggtggcagcgggctcgcacttccctatccagaacctgcccttcggggtcttccgccggcgggggtcgccaccgcaggctccgctccccccggtggccatcggggacttcgcgctcgacctcgccaccgtcgccgacgcgggtctcttcgacgggcccgcgctctccggctccccgtgcttccaccaggagacgctcaacatgttcttggggatgggccgaccggcgtggagggaggcgcgcgccacgctacaaaaaatcctctcagccgacgagccagtcttgcgtgacaacgaagccctgaggaataaatgtcttattccaatgagtgatatcgagatggttctaccaatcacggttggaggatacaatggacgagcatcatctatagttgtgtctggaaccgatgtaattaggcccagaggacaaggacatccaacaggaaactccgctccttattttggtccctctcagaagcttgattttgagcttgagatggctgccattgttggtccaggaaatgaattaggcaaaccaattgatatcaatgatgctgaagaacatatttttggcctaactttgatgaatgattggagcgccagagatattcaggcttgggagactatacctcttggacctttccttgggaaaagcttcagtaccaccatatcaccatggattgttactcttgatgctttgaagcctttcatgtgtgaggctcctaagcaggaacccgaacctttaccatacctagctgaaaagaatcacataaactatgacattcctcttgaagtcttgattaagcctaaagatcaaaatgttgcactaattgtcacaaaaactaatttcaagcatctgtattggacggtgacgcagcagctaacacaccacactatcaatggatgcaacatgaggccgggggatatatttgcaactggcacactcagtggacctgaaccggactccctcggatgtctattggagctaacatggaacgggcagaaggagataccagtgggcaatttgacccgcaagtttctagaagatggagatgaggtcatcttgacaggatgctgcaagggtgaaggctacaacattggttttggaacttgcactgggaaggtcctgccggcacttccctgagccaacacgtctttacatcagttctcgagtccaaacactcaacaatctagcaagatgctatgtaactgaacaacgggggttgttttcgcataggaaactgatactctgttgtggaataaaatcggttcaccattttatacacattttctctctcaagaattgtgttattaaacttgtaaaaatgcaatgtctctcatctcttcatccatcgcccagtgagatttgaattctgtgagtatctgtgtatatgggcctggccgcccactagggttccatatactcttgtactcctgcagctagggtattgtattctatactgcaacatggtatcaaagctttatgtttc

SEQ ID NO: 49867 - DNA, 1842 bp, Zea Mays
cgatttaatctttgtgctgttttgcgtggagttgtaattgggctgttaagccgggatttggggtgtcaatgtggctaattagctttgtaatagtgggccggccttattagcttgactaaaagctgtaacctggagtggatctggaaataagaaagaaatagaaacagaatcccaacaaacttatctgtgagtttgagcgcttttcttctgttcctctcctttgctggatttggcgcggctcacgtcgtcgaagttgcgcatcggcggccacgggcggtgtcatctggtatcggattcggggtcggctgcgtcttcatcctcttccacgtgctgttcctcgtctttggcggagacgctcaacatgttcttggggatgggccgaccggcgtggagggaggcgcgcgccacgctacaaaaaatcctctcagccgacgagccagtcttgcgtgacaacgaagccctgaggaataaatgtcttattccaatgagtgatatcgagatggttctaccaatcacggttggaggttacacagatttcttttgttctgtgcaccatgcaaggaactgcggattcatcttccgagggccgcagactccagttaatccaaattggttttatcttccaataggatacaatggacgagcatcatctatagttgtgtctggaaccgatgtaattaggcccagaggacaaggacatccaacaggaaactccgctccttattttggtccctctcagaagcttgattttgagcttgagatggctgccattgttggtccaggaaatgaattaggcaaaccaattgatatcaatgatgctgaagaacatatttttggcctaactttgatgaatgattggagcggtattctattattttcaattttcatctgtttaagattaagatgcatgatgtgattatactgagctgcatgatgtgattaatatgtcagccagagatattcaggcttgggagactatacctcttggacctttccttgggaaaagcttcagtaccaccatatcaccatggattgttactcttgatgctttgaagcctttcatgtgtgaggctcctaagcaggaacccgaacctttaccatacctagctgaaaagaatcacataaactatgacattcctcttgaagtcttgattaagcctaaagatcaaaatgttgcactaattgtcacaaaaactaatttcaagcatctgtattggacggtgacgcagcagctaacacaccacactatcaatggatgcaacatgaggccgggggatatatttgcaactggcacactcagtggacctgaaccggactccctcggatgtctattggagctaacatggaacgggcagaaggagataccagtgggcaatttgacccgcaagtttctagaagatggagatgaggtcatcttgacaggatgctgcaagggtgaaggctacaacattggttttggaacttgcactgggaaggtcctgccggcacttccctgagccaacacgtctttacatcagttctcgagtccaaacactcaacaatctagcaagatgctatgtaactgaacaacgggggttgttttcgcataggaaactgatactctgttgtggaataaaatcggttcaccattttatacacattttctctctcaagaattgtgttattaaacttgtaaaaatgcaatgtctctcatctcttcatccatcgcccagtgagatttgaattctgtgagtatctgtgtatatgggcctggccgcccactagggttccatatactcttgtactcctgcagctagggtattgtattctatactgcaacatggtatcaaagctttatgtttc

SEQ ID NO: 49868 - DNA, 470 bp, Zea Mays
atggagctcgccacgacacccgctgttctgcctacttgtgctcggcccagcactcgtgcttgccatcggcttgcattggcactcgcgtgcctgctcgtcgtcaccgctgcgcgctcgctcttcgtccatcgggtttcgcgtgtgctcgcgtttgcgttgagtcgtcgaacccatcatcccctgctcgactgtcaagcaaaccccctgatccgcgtcctgctcgccgtcaactctcggctcacaagctcattttcccttgtgcacatctccacagactctgtctcatcacgcgtgtgcgttatcgaactcgtcgtcgactttatctcccggagacggatcctggatttggatgaaaaggtgagacaagttcgtctagcatctgctaggggctcgaccaaatgtctaaattggacaaccgtcatcgtcctcgcggttatcgaatcaattcggttttggtatgttaattaatc

SEQ ID NO: 49869 - DNA, 3408 bp, Zea Mays
agtcagccaccatctgctccgcatcctcctccggcgcccatggcggaggaaaccctcgcgccctcgtcctcgtactcggtctcgtcggcaaagccctaaaccctagtcgacctccatttcggaaccctagccttcccgcgccgccgccatggtccgcagttgcgatgtccgttttgtctcctccggtgtcaagctcccgtgcgagtccacctccgcgctggccccgtccccgtccccgtctccggcacccgcgctcctctccgcagcgctcccgttcgcgcacatcggccgcgccatcgatgccgccgcccgccgcctgggctcctgcctcccacgcgtccctgttgcgcgggccgacccggctccgtccccgccacggcggcacggcaaggacggcggagggcccgaggagcgggtgctgatcagcgaggtcgcggtgcggggaaaggacggggagcccctggagctgcccgagctggaggccgcggccgccgcggcgctgcgcgcgtgccgccccaacgccgcgctcaccgtgcgggaggtgcaggaggacgtgcaccgcatcgtcgagagcggactcttccgatcgtgtggagccgaaccaagacttccatgggctggtatgcgagggcgccaacatgctaccgtccaagttcatggaagatgcatttcgcgatcgccatggaaaaattattaacattaggcatctggatcaagtgatcaagtctgttaacagatggtatcaggagcgtggcctaactgggttggtttcatatgctgagatactttctggagggattctgaggctgcaggtttcagaagctgaggttaataacattagcattcgctttctagacaggaagaccggtgaaccaactgttggaaaaacacagacggaaaccatccttcggcagcttaccaccaagaaagggcaggcttacaatagagcacaagtgaaaagggatgtagaaacaatacttactatgggaatcatggaagatgttacgataatcccacagccagttggagattctaataaagtagaccttgtcatgaatcttgttgaacgcccttcgggtggtttctctgctggtggtggaatttcaagtgggataacaaatggacccctttctggacttattggcagctttgcatattcacatcggaatgtttttgggaggaacaagaaattaaatctctctttggaaagggggcaaatcgattcaatatttagattgaactttactgacccttggattgatggagacaacaagagaacctctagaactgttatggttcagaactctaggactcctggaacacttgttcatggtggtgatcatcctgaccatgcgcctataacaattggacgtgttattgctggcttagaatatagtcgaccattcagacccaagtggagtgggacacttggcttaatttttcagcatgctggtgctcgtgatgataaagggaatccggtcatcagggatttctataacagccaattgactgccagtggacatgattatgatgatacactgttagctaagtttgaaagtatctacacagattctggagaccatagctctacaatgtttgttttcaacattgagcaaggtctccctgttctcccggagtggctaagcttcaaccgactgacagcacgcttgaggcagggctatgaaattggtcctgctaggcttcttctaagtgcctctggaggtcacatggagggaaattttccacctcatgaagcatttgcaattggtgggacaaatagtgtaagaggatatgaagaaggtgctgttggctctgggcgttcttatgctgtaggtagtggtgaagtgtcatgccgcatggtaaacttctttctcctctcgaccttactggctttttgttgttgtcaaatggactccacatggaagtatgacaggcacaactgaatggtaatttaccacagaatgccgtactggcaacaccgcaacaagggtatacatatctacataattgattaaaaatggtattatcctagtacgatttgtaatttaggtaaaatttctttctcagatttagttcaagaaaatcagaaaggaaacaaacaggtgggcatgctgccaaagttcaagactaatacagattagatatggaacgttttgcgcgcacacagtttttatctgtattgctgtatggaaccttctactcataggtgccaggcccagaagcagggcccaaaattctctgcaaatcacaatagtcctggaatatgaatatctagcaacgaatatttgagcaaaaaacaggatcaacattcttctgtcacattgtttattgttgctactagggcccaacatgaaaataaagtgaccagctcagttaaccatctcttacccagtcacattattgggctccttcgcctgtgctagtagcacaatgggctgcagctgctgctgtttatttcctctatagaagaacagtgattgcaggtgtgctcgctgcagcggtaagctcttccgatcaggccactcaaatgagaggatcttgtatgcctgggccatcacccaatggtcgcctgcggtagcttaacttgagctgctgctttcattgccctactttcatattgggcccaagtagcaataatgttatagatggatgctggttctgttcttattagaatatttgttgaacagtacagtatgctatcgttgtaatagcttagtacaactacaacaattgtactgagccccttttccatagataatctgccctgttcttcatgtctgaaatctttttcctgagaacctgtatacatagtcgtctacaaatgccatcatgcgtttgaagaaatgcatgatgttcatggtggtcttacacttctactttaatgcacattttacctagtctgatctcgcgaatgaagaaatcaatgttttaagtcatcatttgattactttatattcttgctctgaatgcagtttgggccactggaaggcgtggtctttggagactatggtagtgatcttggttctggtcctaaagttcctggtgacccagccggagctcgtggaaagccagggagtggctttggctatggtgttggcgtccgcgtggactcccctctgggacctctacggcttgagtacgcctttaatgataggcaagcaagcagatttcactttggtgttggctacagaaattaacatgtatattggtcacattctgattcaatcttgttcttctgagcattttgggctggtagaaactagtgccatgccttccattttttggcgatatcaaagcaagttttgtccagatcagatttcattttttttgtaacatatagttcctttacttctgttgagtgttcttcatctagagaaattaaatggacccttactggtaggttttacc

SEQ ID NO: 49870 - DNA, 2307 bp, Zea Mays
agtcagccaccatctgctccgcatcctcctccggcgcccatggcggaggaaaccctcgcgccctcgtcctcgtactcggtctcgtcggcaaagccctaaaccctagtcgacctccatttcggaaccctagccttcccgcgccgccgccatggtccgcagttgcgatgtccgttttgtctcctccggtgtcaagctcccgtgcgagtccacctccgcgctggccccgtccccgtccccgtctccggcacccgcgctcctctccgcagcgctcccgttcgcgcacatcggccgcgccatcgatgccgccgcccgccgcctgggctcctgcctcccacgcgtccctgttgcgcgggccgacccggctccgtccccgccacggcggcacggcaaggacggcggagggcccgaggagcgggtgctgatcagcgaggtcgcggtgcggggaaaggacggggagcccctggagctgcccgagctggaggccgcggccgccgcggcgctgcgcgcgtgccgccccaacgccgcgctcaccgtgcgggaggtgcaggaggacgtgcaccgcatcgtcgagagcggactcttccgatcgtgtatgcccgtcgctgtcgacacccgcgatggcattcgcctcgtctttgaggtggagccgaaccaagacttccatgggctggtatgcgagggcgccaacatgctaccgtccaagttcatggaagatgcatttcgcgatcgccatggaaaaattattaacattaggcatctggatcaagtgatcaagtctgttaacagatggtatcaggagcgtggcctaactgggttggtttcatatgctgagatactttctggagggattctgaggctgcaggtttcagaagctgagcggtgaaccaactgttggaaaaacacagacggaaaccatccttcggcagcttaccaccaagaaagggcaggcttacaatagagcacaagtgaaaagggatgtagaaacaatacttactatgggaatcatggaagatgttacgataatcccacagccagttggagattctaataaagtagaccttgtcatgaatcttgttgaacgcccttcgggtggtttctctgctggtggtggaatttcaagtgggataacaaatggacccctttctggacttattggcagctttgcatattcacatcggaatgtttttgggaggaacaagaaattaaatctctctttggaaagggggcaaatcgattcaatatttagattgaactttactgacccttggattgatggagacaacaagagaacctctagaactgttatggttcagaactctaggactcctggaacacttgttcatggtggtgatcatcctgaccatgcgcctataacaattggacgtgttattgctggcttagaatatagtcgaccattcagacccaagtggagtgggacacttggcttaatttttcagcatgctggtgctcgtgatgataaagggaatccggtcatcagggatttctataacagccaattgactgccagtggacatgattatgatgatacactgttagctaagtttgaaagtatctacacagattctggagaccatagctctacaatgtttgttttcaacattgagcaaggtctccctgttctcccggagtggctaagcttcaaccgactgacagcacgcttgaggcagggctatgaaattggtcctgctaggcttcttctaagtgcctctggaggtcacatggagggaaattttccacctcatgaagcatttgcaattggtgggacaaatagtgtaagaggatatgaagaaggtgctgttggctctgggcgttcttatgctgtaggtagtggtgaagtgtcatgccgcatgtttgggccactggaaggcgtggtctttggagactatggtagtgatcttggttctggtcctaaagttcctggtgacccagccggagctcgtggaaagccagggagtggctttggctatggtgttggcgtccgcgtggactcccctctgggacctctacggcttgagtacgcctttaatgataggcaagcaagcagatttcactttggtgttggctacagaaattaacatgtatattggtcacattctgattcaatcttgttcttctgagcattttgggctggtagaaactagtgccatgccttccattttttggcgatatcaaagcaagttttgtccagatcagatttcattttttttgtaacatatagttcctttacttctgttgagtgttcttcatctagagaaattaaatggacccttactggtaggttttacc

SEQ ID NO: 49871 - DNA, 3380 bp, Zea Mays
agtcagccaccatctgctccgcatcctcctccggcgcccatggcggaggaaaccctcgcgccctcgtcctcgtactcggtctcgtcggcaaagccctaaaccctagtcgacctccatttcggaaccctagccttcccgcgccgccgccatggtccgcagttgcgatgtccgttttgtctcctccggtgtcaagctcccgtgcgagtccacctccgcgctggccccgtccccgtccccgtctccggcacccgcgctcctctccgcagcgctcccgttcgcgcacatcggccgcgccatcgatgccgccgcccgccgcctgggctcctgcctcccacgcgtccctgttgcgcgggccgacccggctccgtccccgccacggcggcacggcaaggacggcggagggcccgaggagcgggtgctgatcagcgaggtcgcggtgcggggaaaggacggggagcccctggagctgcccgagctggaggccgcggccgccgcggcgctgcgcgcgtgccgccccaacgccgcgctcaccgtgcgggaggtgcaggaggacgtgcaccgcatcgtcgagagcggactcttccgatcgtgtatgcccgtcgctgtcgacacccgcgatggcattcgcctcgtctttgaggtggagccgaaccaagacttccatgggctggtatgcgagggcgccaacatgctaccgtccaagttcatggaagatgcatttcgcgatcgccatggaaaaattattaacattaggcatctggatcaagtgatcaagtctgttaacagatggtatcaggagcgtggcctaactgggttggtttcatatgctgagatactttctggagggattctgaggctgcaggtttcagaagctgaggttaataacattagcattcgctttctagacaggaagaccggtgaaccaactgttggaaaaacacagacggaaaccatccttcggcagcttaccaccaagaaagggcaggcttacaatagagcacaagtgaaaagggatgtagaaacaatacttactatgggaatcatggaagatgttacgataatcccacagccagttggagattctaataaagtagaccttgtcatgaatcttgttgaacgcccttcgggtggtttctctgctggtggtggaatttcaagtgggataacaaatggacccctttctggacttattggcagctttgcatattcacatcggaatgtttttgggaggaacaagaaattaaatctctctttggaaagggggcaaatcgattcaatatttagattgaactttactgacccttggattgatggagacaacaagagaacctctagaactgttatggttcagaactctaggactcctggaacacttgttcatggtggtgatcatcctgaccatgcgcctataacaattggacgtgttattgctggcttagaatatagtcgaccattcagacccaagtggagtgggacacttggcttaatttttcagcatgctggtgctcgtgatgataaagggaatccggtcatcagggatttctataacagccaattgactgccagtggacatgattatgatgatacactgttagctaagtttgaaagtatctacacagattctggagaccatagctctacaatgtttgttttcaacattgagcaaggtctccctgttctcccggagtggctaagcttcaaccgactgacagcacgcttgaggcagggctatgaaattggtcctgctaggcttcttctaagtgcctctggaggtcacatggagggaaattttccacctcatgaagcatttgcaattggtgggacaaatagtgtaagaggatatgaagaaggtgctgttggctctgggcgttcttatgctgtaggtagtggtgaagtgtcatgccgcatggtaaacttctttctcctctcgaccttactggctttttgttgttgtcaaatggactccacatggaagtatgacaggcacaactgaatggtaatttaccacagaatgccgtactggcaacaccgcaacaaggatttagttcaagaaaatcagaaaggaaacaaacaggtgggcatgctgccaaagttcaagactaatacagattagatatggaacgttttgcgcgcacacagtttttatctgtattgctgtatggaaccttctactcataggtgccaggcccagaagcagggcccaaaattctctgcaaatcacaatagtcctggaatatgaatatctagcaacgaatatttgagcaaaaaacaggatcaacattcttctgtcacattgtttattgttgctactagggcccaacatgaaaataaagtgaccagctcagttaaccatctcttacccagtcacattattgggctccttcgcctgtgctagtagcacaatgggctgcagctgctgctgtttatttcctctatagaagaacagtgattgcaggtgtgctcgctgcagcggtaagctcttccgatcaggccactcaaatgagaggatcttgtatgcctgggccatcacccaatggtcgcctgcggtagcttaacttgagctgctgctttcattgccctactttcatattgggcccaagtagcaataatgttatagatggatgctggttctgttcttattagaatatttgttgaacagtacagtatgctatcgttgtaatagcttagtacaactacaacaattgtactgagccccttttccatagataatctgccctgttcttcatgtctgaaatctttttcctgagaacctgtatacatagtcgtctacaaatgccatcatgcgtttgaagaaatgcatgatgttcatggtggtcttacacttctactttaatgcacattttacctagtctgatctcgcgaatgaagaaatcaatgttttaagtcatcatttgattactttatattcttgctctgaatgcagtttgggccactggaaggcgtggtctttggagactatggtagtgatcttggttctggtcctaaagttcctggtgacccagccggagctcgtggaaagccagggagtggctttggctatggtgttggcgtccgcgtggactcccctctgggacctctacggcttgagtacgcctttaatgataggcaagcaagcagatttcactttggtgttggctacagaaattaacatgtatattggtcacattctgattcaatcttgttcttctgagcattttgggctggtagaaactagtgccatgccttccattttttggcgatatcaaagcaagttttgtccagatcagatttcattttttttgtaacatatagttcctttacttctgttgagtgttcttcatctagagaaattaaatggacccttactggtaggttttacc

SEQ ID NO: 49872 - DNA, 947 bp, Zea Mays
cgcgatcgccatggtttcatatgctgagatactttctggagggattctgaggctgcaggtttcagaagctgaggttaataacattagcattcgctttctagacaggaagaccggtgaaccaactgttggaaaaacacagacggaaaccatccttcggcagcttaccaccaagaaagggcaggcttacaatagagcacaagtgaaaagggatgtagaaacaatacttactatgggaatcatggaagatgttacgataatcccacagccagttggagattctaataaagtagaccttgtcatgaatcttgttgaacgcccttcgggtggtttctctgctggtggtggaatttcaagtgggataacaaatggacccctttctggacttattggcagctttgcatattcacatcggaatgtttttgggaggaacaagaaattaaatctctctttggaaagggggcaaatcgattcaatatttagattgaactttactgacccttggattgatggagacaacaagagaacctctagaactgttatggttcagaactctaggactcctggaacacttgttcatggtggtgacccagccggagctcgtggaaagccagggagtggctttggctatggtgttggcgtccgcgtggactcccctctgggacctctacggcttgagtacgcctttaatgataggcaagcaagcagatttcactttggtgttggctacagaaattaacatgtatattggtcacattctgattcaatcttgttcttctgagcattttgggctggtagaaactagtgccatgccttccattttttggcgatatcaaagcaagttttgtccagatcagatttcattttttttgtaacatatagttcctttacttctgttgagtgttcttcatctagagaaattaaatggacccttactggtaggttttacc

SEQ ID NO: 49873 - DNA, 2424 bp, Zea Mays
gagggcttgatggcttcatgggctatgattatcatcgtaattgtcctgtagctaccacattcggagcagcttaagcccaagtcattcaggatcaagaaaaattatcatttattttagaatctatcaattattggttatggactcatgatgtgtaattgaatagctttgcatattcacatcggaatgtttttgggaggaacaagaaattaaatctctctttggaaagggggcaaatcgattcaatatttagattgaactttactgacccttggattgatggagacaacaagagaacctctagaactgttatggttcagaactctaggactcctggaacacttgttcatggtggtgatcatcctgaccatgcgcctataacaattggacgtgttattgctggcttagaatatagtcgaccattcagacccaagtggagtgggacacttggcttaatttttcagcatgctggtgctcgtgatgataaagggaatccggtcatcagggatttctataacagccaattgactgccagtggacatgattatgatgatacactgttagctaagtttgaaagtatctacacagattctggagaccatagctctacaatgtttgttttcaacattgagcaaggtctccctgttctcccggagtggctaagcttcaaccgactgacagcacgcttgaggcagggctatgaaattggtcctgctaggcttcttctaagtgcctctggaggtcacatggagggaaattttccacctcatgaagcatttgcaattggtgggacaaatagtgtaagaggatatgaagaaggtgctgttggctctgggcgttcttatgctgtaggtagtggtgaagtgtcatgccgcatggtaaacttctttctcctctcgaccttactggctttttgttgttgtcaaatggactccacatggaagtatgacaggcacaactgaatggtaatttaccacagaatgccgtactggcaacaccgcaacaagggtatacatatctacataattgattaaaaatggtattatcctagtacgatttgtaatttaggtaaaatttctttctcagatttagttcaagaaaatcagaaaggaaacaaacaggtgggcatgctgccaaagttcaagactaatacagattagatatggaacgttttgcgcgcacacagtttttatctgtattgctgtatggaaccttctactcataggtgccaggcccagaagcagggcccaaaattctctgcaaatcacaatagtcctggaatatgaatatctagcaacgaatatttgagcaaaaaacaggatcaacattcttctgtcacattgtttattgttgctactagggcccaacatgaaaataaagtgaccagctcagttaaccatctcttacccagtcacattattgggctccttcgcctgtgctagtagcacaatgggctgcagctgctgctgtttatttcctctatagaagaacagtgattgcaggtgtgctcgctgcagcggtaagctcttccgatcaggccactcaaatgagaggatcttgtatgcctgggccatcacccaatggtcgcctgcggtagcttaacttgagctgctgctttcattgccctactttcatattgggcccaagtagcaataatgttatagatggatgctggttctgttcttattagaatatttgttgaacagtacagtatgctatcgttgtaatagcttagtacaactacaacaattgtactgagccccttttccatagataatctgccctgttcttcatgtctgaaatctttttcctgagaacctgtatacatagtcgtctacaaatgccatcatgcgtttgaagaaatgcatgatgttcatggtggtcttacacttctactttaatgcacattttacctagtctgatctcgcgaatgaagaaatcaatgttttaagtcatcatttgattactttatattcttgctctgaatgcagtttgggccactggaaggcgtggtctttggagactatggtagtgatcttggttctggtcctaaagttcctggtgacccagccggagctcgtggaaagccagggagtggctttggctatggtgttggcgtccgcgtggactcccctctgggacctctacggcttgagtacgcctttaatgataggcaagcaagcagatttcactttggtgttggctacagaaattaacatgtatattggtcacattctgattcaatcttgttcttctgagcattttgggctggtagaaactagtgccatgccttccattttttggcgatatcaaagcaagttttgtccagatcagatttcattttttttgtaacatatagttcctttacttctgttgagtgttcttcatctagagaaattaaatggacccttactggtaggttttacc

SEQ ID NO: 49874 - DNA, 1252 bp, Zea Mays
taggctctaccttttttatcgggctcccccaccatccgtggcccgacgacgtccccatttccaagctcctcctcgcgattccaatccacgcacgcctcctccgcttccgcctcgctcaggagattcggatttgattatattaccctgattcgtttaaaaggatgggttgagctgtatttgcgcaacatattttgcgacacttatagtcagtgatggaacacaaggaggcgggctgccagcagccggagggcccaatcctatgcatcaataactgcggcttcttcggcagtgctgcgacgatgaacatgtgctccaagtgccacaaggagatgataacgaagcaggagcaggcccagctggctgcctcctccatcgatagcattgtcaatggcggtgacggcgggaaaggacctgtaattgctgcatctgtaaatgtggcagttcctcaagttgagcagaagactattgttgtgcagcccatgcttgtagctgaaaccagcgaggctgctgctgtaatccccaaggccaaggaaggcccagaccggtgcgcggcctgcaggaagcgtgttgggctgacgggatttagctgccgatgcgggaacatgtactgttcggtgcaccgctactccgacaaacatgactgtcagttcgactatcggactgcagcaagggacgcgattgccaaggccaatcctgtggtgagggcggagaagctcgacaagatctgaggcgggcattgggggagcgaaatggttgcaatctgcaagaattcaacatgctgtctttgctgcgttatcattgaaacttgccattcttgtctgctgctgcgtcccgtgaggttcaatactgtgatgcacacagcatccaggcagccgcaagaatttcatcaaaatggtttcccgtgttggctatgtcgtgacacagcttggtgtttgagtatgctgaatctggattagctacaacctacacaagcacaatttcctggtgaatgttgacactaggtgacctgaattctcaagcaaggcgtttcatattctgcaatctctttccagcgtgcgtacaacgggaacatgcagctcgcctttccgcatgtgattgcaacacgcctaacttgtttttgtatgattgtcacctgcaaagaattggaacaagtctaagcaacttgttttttgtatgatcgccacttgcaaagaagataatgatttgtacgaaatagtattcttctgctgggcatgaaatgttttcctccctc

SEQ ID NO: 49875 - DNA, 1621 bp, Zea Mays
cttttttatcgggctcccccaccatccgtggcccgacgacgtccccatttccaagctcctcctcgcgattccaatccacgcacgcctcctccgcttccgcctcgctcaggcttatagtcagtgatggaacacaaggaggcgggctgccagcagccggagggcccaatcctatgcatcaataactgcggcttcttcggcagtgctgcgacgatgaacatgtgctccaagtgccacaaggagatgataacgaagcaggagcaggcccagctggctgcctcctccatcgatagcattgtcaatggcggtgacggcgggaaaggacctaagactattgttgtgcagcccatgcttgtagctgaaaccagcgaggctgctgctgtaatccccaaggccaaggaaggcccagaccggtgcgcggcctgcaggaagcgtgttgggctgacgggatttagctgccgatgcgggaacatgtactgttcggtgcaccgctactccgacaaacatgactgtcagttcgactatcggactgcagcaagggacgcgattgccaaggccaatcctgtggtgagggcggagaagctcgacaagatctgaggcgggcattgggggagcgaaatggttgcaatctgcaagaattcaacatgctgtctttgctgcgttatcattgaaacttgccattcttgtctgctgctgcgtcccgtgaggttcaatactgtgatgcacacagcatccaggcagccgcaagaatttcatcaaaatggtttcccgtgttggctatgtcgtgtaagcttaattcagttattcatggtggtttcggtcggtattgtggtattcccatttaggtagctctgtaatgtattgctgtctcaagcgtgttacattccaattagtaatagtaatcagcaattgtctgccccatatattttttaaaaagtatgttcttgtgatgtcccagcaacatatcacattcagttaaacgctttgcatacgattcattatttcattcagagggccagatgctagaggctgagaggttgtcatagtgttttcaggccactgctctactatacccttatgttatgttcaagtaattgttcatatgtgaagttattgaccaatcaactgatcttgctcctcgtaggaggaagcaacctctgctgctcgtgtagagtcaagggtgcaataaagtggaattcttgttgatgaacacttcatttcatttttttgttgatgaacacttgatttcaaaaatcttcttttatttcagagctgtgattttgtatcaggacacagcttggtgtttgagtatgctgaatctggattagctacaacctacacaagcacaatttcctggtgaatgttgacactaggtgacctgaattctcaagcaaggcgtttcatattctgcaatctctttccagcgtgcgtacaacgggaacatgcagctcgcctttccgcatgtgattgcaacacgcctaacttgtttttgtatgattgtcacctgcaaagaattggaacaagtctaagcaacttgttttttgtatgatcgccacttgcaaagaagataatgatttgtacgaaatagtattcttctgctgggcatgaaatgttttcctccctc

SEQ ID NO: 49876 - DNA, 1735 bp, Zea Mays
gggctcccccaccatccgtggcccgacgacgtccccatttccaagctcctcctcgcgattccaatccacgcacgcctcctccgcttccgcctcgctcaggagattcggatttgattatattaccctgattcgtttaaaaggatgggttgagctgtatttgcgcaacatattttgcgacacttatagtcagtgatggaacacaaggaggcgggctgccagcagccggagggcccaatcctatgcatcaataactgcggcttcttcggcagtgctgcgacgatgaacatgtgctccaagtgccacaaggagatgataacgaagcaggagcaggcccagctggctgcctcctccatcgatagcattgtcaatggcggtgacggcgggaaaggacctgtaattgctgcatctgtaaatgtggcagttcctcaagttgagcagaagactattgttgtgcagcccatgcttgtagctgaaaccagcgaggctgctgctgtaatccccaaggccaaggaaggcccagaccggtgcgcggcctgcaggaagcgtgttgggctgacgggatttagctgccgatgcgggaacatgtactgttcggtgcaccgctactccgacaaacatgactgtcagttcgactatcggactgcagcaagggacgcgattgccaaggccaatcctgtggtgagggcggagaagctcgacaagatctgaggcgggcattgggggagcgaaatggttgcaatctgcaagaattcaacatgctgtctttgctgcgttatcattgaaacttgccattcttgtctgctgctgcgtcccgtgaggttcaatactgtgatgcacacagcatccaggcagccgcaagaatttcatcaaaatggtttcccgtgttggctatgtcgtgtaagcttaattcagttattcatggtggtttcggtcggtattgtggtattcccatttaggtagctctgtaatgtattgctgtctcaagcgtgttacattccaattagtaatagtaatcagcaattgtctgccccatatattttttaaaaagtatgttcttgtgatgtcccagcaacatatcacattcagttaaacgctttgcatacgattcattatttcattcagagggccagatgctagaggctgagaggttgtcatagtgttttcaggccactgctctactatacccttatgttatgttcaagtaattgttcatatgtgaagttattgaccaatcaactgatcttgctcctcgtaggaggaagcaacctctgctgctcgtgtagagtcaagggtgcaataaagtggaattcttgttgatgaacacttcatttcatttttttgttgatgaacacttgatttcaaaaatcttcttttatttcagagctgtgattttgtatcaggacacagcttggtgtttgagtatgctgaatctggattagctacaacctacacaagcacaatttcctggtgaatgttgacactaggtgacctgaattctcaagcaaggcgtttcatattctgcaatctctttccagcgtgcgtacaacgggaacatgcagctcgcctttccgcatgtgattgcaacacgcctaacttgtttttgtatgattgtcacctgcaaagaattggaacaagtctaagcaacttgttttttgtatgatcgccacttgcaaagaagataatgatttgtacgaaatagtattcttctgctgggcatgaaatgttttcctccctc

SEQ ID NO: 49877 - DNA, 1741 bp, Zea Mays
agatcggagagcgaaagcgaaaccggcgccgtctctccccaccctcgcggtcgtcgcccaccgtttttattacatcttcttcttggtttcagctgcgcacagggaatccgtgaagctcctgtgccagacacagagagagcaaaccgtgcagcggtgcaggccagcgcgatccagctcccatcagtgggcgcgcccgccgtctcttgcgaccctgtcttcttggtttcttggcggggtcgtcctgctcgtgtcgcgctgcccacaacccgcgttctgtcgcggcatccgccgtggatcttggcccgggttgtccctatatcacgcagaaaaaagggccatccccccccccccccccccttcgccctcgggttcgttactgagtgtgccggagtggtattcgtgttccgccgggtgccgaggtggcctcgcggtcttctgccgtctcatcgtcgcctgctccccgtcgcgttcatcccgaggcatatcttggtcttgtaattgtataaaaagaaggtttggggaatcaggtttatctaaccagtggacatggtatcagttaatcttgggttagttcattatgtactggaccacatatatggaacacttcttcatcgcaccaaactaggaacaccatttttctcaaaaggatggggaggtaccaaacttgatttgctagagaagatggtgaagcagttgtttcccgaggcacgttgccaaaactggccaccaactgctgtgcagccaatgtggaaaacagtatgggagacaaacaattcttgtctgcgagaaggagttttcaggactacatgtgatgagcgactaatcgatgcattgccacctgagagtcacaatgcaagagttgcttttcttacccctaaaaatgttacacctgagaagatgtcatgtgtggtccatcttgcaggcactggtgatcacacatttgagcgcaggcttcggctgggtgggcctcttcttaagaacaatattgcaactatggttcttgagagcccctattatggacagcgacgtcctagcatgcagcgtggtgcaaagctccagtgtgttagtgatctgttacttctagggaaagccacaattgatgaagctcgcagtctcctgtactggctgcagaatgaggctggttacggcaagatgggcatatgtgggctcagcatgggactttgtacgagtgtgctccacatgccagcgctataaatcagagcacctccaccctgtcggcctcctcctacctctaccagtgccacgggggtctggacggacgtggcactggacttcgtcgaggcgctttttaaagtgcgtggcaagtctgtcatcttgactgtggtggacaggttcaacaaatactgccacttcctccccttggcgcacccgtactccgccgtgagcatggctcaagctttcttcaccgacatcgttcgccttcacggcgtgccgcagtccatggtgtcggaccgtgactcggtcttaacctccaggtttttgcgcgagctgatgcgggtaaggcttggcgcttaaagatacccttccctagaccccgcacagtgtgggaagtctacgacactaggtacgcccttttttttatacttggtttgagcaagatgaataccatcttttaccttctgaacttcaataccaagaaaataatgtagctggccaatatctttttctctctctctaaagagcaggagaactgcgccccattatatatgaggcctccccc

SEQ ID NO: 49878 - DNA, 1924 bp, Zea Mays
cgtattccacctttattttttatattagttattgaaaagtctaattattgtgcctagctttttccatggttcgtaaccactcccttatatttcttgtacaagcactccacctcaatcaggttgcaagtcctacttttgctagttcgcggtcggaagaagccatagccatccaggaagaagaagccatagcaaaagcagctgaggggggattagagaagaacagcagcgcatcagatagggagaattgaagctgatcttttgtatcatatatctttcctgcatgcttcatcagtccgacacttgagagaggttcgagagagaagttattaagctgcctccacactggtagcaagtgattgcatgcatgggggataggacatggcagcagccacatgcgcaggcttcttccccagacgcagggaccaaggtccaagcttcatcatcgtccgtccatggcaacatcatcagaaaggagccagctggaggcggcggatacgacgacatggccgagttcgatcaagcgctcttcctctatcttaacagcagccaggatcaagcatcagttattcaagatcaacctcaaactctcaacatcttcccttctgaaccaatgcatgtcgtcgagcctgctgcaccaaaggaatctatgggggctacgactaacaacacggcgtggaacaacgccggcgcaggcccatccaagcagccgccatccaaccttccgtcgaggacgacggcgactccggcagggccgcgaaaggacggcagcaaaccgccggcagccgtcaagagagaagggagcagcagcggtggcgccatgggaagcggcacaccgtcgacgtcgaaccaacaggagggccccaccaggacctcagacgccaagacgctgagaaggctcgcgcagaacagggaggcggcacggaaaagcaggctcagaaagaaggcgtacattcagaacctagagacaagcagggttaggctggcccatctggaacaagaggtacacagatcaagaactcagggagcagtatttggtggtggaggtctatctggttccaatggcggactgctaagcccagaggcggcatggttcgacatggagcacgcgaggtggcaggaggagcacggcaaggtgatgcgccacctgcgggcggcgctggaggcggagtacgccgcgacggcgacgacgccagcggcggcggcggcggacgcgcagctccggcagctggtggacgcggcggcggcgcaccacggtgcgctggcggagctgaaggccgtggcggcgagcgccgacgcgttccacctcgtgtccggggcgtgggtgtccgccgccgagcgctgcttcctctggatcggcggcttccgcccttcagagctcatcaagatagcggcccggcacgcggagcccctgacggagcagcaggcgatgagcgtctgcggtgtgcagcagtgggcgagggacgcggaggcggcgttggaccacgagctgcaagcgatgcacagctccgtgtcggaggccatctcctccgacgcggcggcgctgctctacccctactccgacgtgcccggcttcatggccaccatgtccctcgccatcagcaagctcgcctccctcgaagccttcgtcagacaagcggacgcgcttaggctgcagacgctgcaccggctgccgcagatcctgacggcgcggcagtcagcgcggtgcttcctcgccatcgccgactactcccaccgcctccgcgcgctcagcgaactctggcacacccggcaaggacatgagcgagcggcgagcacccaggcggccaggcccagccagacaccgccctaccaaagtagagacggtttactatagacgttacaaagtagagatagtttcaaagatacagatagaggtgatcactgatcaggaattctgatgacccat

SEQ ID NO: 49879 - DNA, 2528 bp, Zea Mays
gaagaagccatagccatccaggaagaagaagccatagcaaaagcagctgaggggggattagagaagaacagcagcgcatcagatagggagaattgaagctgatcttttgtatcatatatctttcctgcatgcttcatcagtccgacacttgagagaggttcgagagagaagttattaagctgcctccacactggtagcaagtgattgcatgcatgggggataggacatggcagcagccacatgcgcaggcttcttccccagacgcagggaccaaggtccaagcttcatcatcgtccgtccatggcaacatcatcagaaaggagccagctggaggcggcggatacgacgacatggccgagttcgatcaagcgctcttcctctatcttaacagcagccaggatcaagcatcagttattcaagatcaacctcaaactctcaacatcttcccttctgaaccaatgcatgtcgtcgagcctgctgcaccaaaggaatctatgggggctacgactaacaacacggcgtggaacaacgccggcgcaggcccatccaagcagccgccatccaaccttccgtcgaggacgacggcgactccggcagggccgcgaaaggacggcagcaaaccgccggcagccgtcaagagagaagggagcagcagcggtggcgccatgggaagcggcacaccgtcgacgtcgaaccaacaggagggccccaccaggacctcagacgccaagacgctgagaaggctcgcgcagaacagggaggcggcacggaaaagcaggctcagaaagaaggcgtacattcagaacctagagacaagcagggttaggctggcccatctggaacaagaggtacacagatcaagaactcaggtatgaaatgaaaagaaatatgccaaacaatactgaattcacaacttcagtacgtggaaacttttgaggtgtctaccatatatagaattattaacacgagggaggcgtggcaaaaaaaggactaatggtttgatttagttatattgttattattactactatgtagaatcaacactgctttttttaggcaaaacagctgctctctctccatccataaaacgatacaacaactataaaatttgtgcaagtcaagatagcttaaatttagataaagtttatagtatcaacgtacatttatgttttaaactataggttcacagtataaaaatatatttcataattaaatttaatgttacttatttattttgtataataaatattggtgttagagttcttggtcaaatcgacttaaattatttcgctcctagaaagtgagagctatatccttttcgtggatgtagtcttatttaaagatactcgtattattattgttccatagacacactaattactaactaagcttgttctatgtgcatgcacgtcgccaaacaaatcaaccacagggagcagtatttggtggtggaggtctatctggttccaatggcggactgctaagcccaggcacatgcatgcattcaaattaaccctagctgaactgctcgcatgcatgcaatggcgtacttgtacatgcatgcatgctagctagctctcctctttgttatatctcctgcatgcattccgcgcttacacacgtttgctccaagttaagttaagttgatgaatattgcgtccatgcatatgcatggtcgagcagaggcggcatggttcgacatggagcacgcgaggtggcaggaggagcacggcaaggtgatgcgccacctgcgggcggcgctggaggcggagtacgccgcgacggcgacgacgccagcggcggcggcggcggacgcgcagctccggcagctggtggacgcggcggcggcgcaccacggtgcgctggcggagctgaaggccgtggcggcgagcgccgacgcgttccacctcgtgtccggggcgtgggtgtccgccgccgagcgctgcttcctctggatcggcggcttccgcccttcagagctcatcaagatagcggcccggcacgcggagcccctgacggagcagcaggcgatgagcgtctgcggtgtgcagcagtgggcgagggacgcggaggcggcgttggaccacgagctgcaagcgatgcacagctccgtgtcggaggccatctcctccgacgcggcggcgctgctctacccctactccgacgtgcccggcttcatggccaccatgtccctcgccatcagcaagctcgcctccctcgaagccttcgtcagacaagcggacgcgcttaggctgcagacgctgcaccggctgccgcagatcctgacggcgcggcagtcagcgcggtgcttcctcgccatcgccgactactcccaccgcctccgcgcgctcagcgaactctggcacacccggcaaggacatgagcgagcggcgagcacccaggcggccaggcccagccagacaccgccctaccaaagtagagacggtttactatagacgttacaaagtagagatagtttcaaagatacagatagaggtgatcactgatcaggaattctgatgacccat

SEQ ID NO: 49880 - DNA, 1996 bp, Zea Mays
cgatcctcgccattccgacgccgcactcgcagatcttcccttcgtcctccacgccccacccctcgcgtcgccgctatggccgacgaggccctggaccagccgccagacgcggccccgtctccgtctctggccccagcgacgccgccggcccccgccacctcgtcccccgcggcgctgctccgcccgcgtcgggaggcgttcgagcatgggctcctgcccatccccaagctcatcttcccggagggcatgctagcgcagaccctcgcccagctcaaggagaagctcgccgcctcagtccccgacgggcgcgtgcgcgctgcggccctggctgaggcgctgcagatcccgcaggagcaggcggcgctcgccctcggcacgctcgcggcggtgctcccggccgaggaccccgtgcttggggacggcgccatggatggtgctgccgccgacatccgcgacgtgctgctcttcctctatatccagtcttacaagcgcctcgttccgcggagcgcgcacaaggactcgcccgccgtggcggacgtctggccgtccacctccgcgttcgatgggtacctctccgcgctctccccgatccagcttgttcgcagcaacagccgccgttttatgccttctcaagctgatgaagaaattcatcagttgtcctttctgcaaaagcatatggcgaatattcttactctcttggcagattctgttgagggtgagggtgacgattcactggtattgacaatggagacttttgagcaccttggatttctagttcagttctcagaaggaacttccttaagccaggctgctacattttttgcaaactcagacccagacatgcctgctgtgcctgtccctgctgctcaggttcttgattggatgtcacagaacatagctttttcgctggaatattcttctgagaggtccgtagctaaggaaagcaaccagcaaaccatgtctgatcttgatgtgaccatggctgaggccaatacaagtcactcacggaacagcacaccaagtgctaatcctgcatactacagaaatgtaacgtttgtggagggcttttccaaaacctctgttgtcaagcatgcatctgatgtcaaagggaattcaataaaggttttgaactgtcatgattctgttatctacatattagcaccactgaagtatgctactgtgtatggttgttctgatgctacggttgttcttggtgctgttggtaaggtagtaaaagtggagcattgtgaaagagtgcatatcattgcagctgcaaaacggatttgtattgccaactgccgggagtgcatcttctacctaggagtaaatcaccaacctcttgtattgggggacaaccataaattacaaattcctagttggtttggggatgaagggcaagagcctataaactgcaatcctttcccactgcctgaaatttatgaggcattccaaagcaaaaagcgttctgctctggaagatatccaaaagatgattcgggagctacagcttgacgagaatcggaaaagggaattggcagctgcccttcatgctcagttcaaggattggttatacgcttcgggcaatatccgccagctctactgtctacaaggtgattaatggtgcaatttacaagactgattatcctctgccgactcctcaaaaacattcgacgattgtcgaagctgacctcttccttccatggaaaggactcccaccctgctcacctgcggtatttacacaagtatgtaaaaaatgaagatgtactattgcctattttttacagattcatttgcgtatttctccaagtcttctctttgctgcgagttgggtattaattaggatgtgatattgcttaatttcccccctgtttctactcattttttggcccttgataatgtccacgagtatgtaatagggactaatgaatcaaacgttgttaaataaacatttcattccgttttgctaaatggctcatcatgtcaaccctctatggacc

SEQ ID NO: 49881 - DNA, 2095 bp, Zea Mays
cgatcctcgccattccgacgccgcactcgcagatcttcccttcgtcctccacgccccacccctcgcgtcgccgctatggccgacgaggccctggaccagccgccagacgcggccccgtctccgtctctggccccagcgacgccgccggcccccgccacctcgtcccccgcggcgctgctccgcccgcgtcgggaggcgttcgagcatgggctcctgcccatccccaagctcatcttcccggagggcatgctagcgcagaccctcgcccagctcaaggagaagctcgccgcctcagtccccgacgggcgcgtgcgcgctgcggccctggctgaggcgctgcagatcccgcaggagcaggcggcgctcgccctcggcacgctcgcggcggtgctcccggccgaggaccccgtgcttggggacggcgccatggatggtgctgccgccgacatccgcgacgtgctgctcttcctctatatccagtcttacaagcgcctcgttccgcggagcgcgcacaaggactcgcccgccgtggcggacgtctggccgtccacctccgcgttcgatgggtacctctccgcgctctccccgatccagcttgttcgcagcaacagccgccgttttatgccttctcaagctgatgaagaaattcatcagttgtcctttctgcaaaagcatatggcgaatattcttactctcttggcagattctgttgagggtgagggtgacgattcactggtattgacaatggagacttttgagcaccttggatttctagttcagttctcagaaggaacttccttaagccaggctgctacattttttgcaaactcagacccagacatgcctgctgtgcctgtccctgctgctcaggttcttgattggatgtcacagaacatagctttttcgctggaatattcttctgagaggtccgtagctaaggaaagcaaccagcaaaccatgtctgatcttgatgtgaccatggctgaggccaatacaagtcactcacggaacagcacaccaagtgctaatcctgcatactacagaaatgtaacgtttgtggagggcttttccaaaacctctgttgtcaagcatgcatctgatgtcaaagggaattcaataaaggtagtaaaagtggagcattgtgaaagagtgcatatcattgcagctgcaaaacggatttgtattgccaactgccgggagtgcatcttctacctaggagtaaatcaccaacctcttgtattgggggacaaccataaattacaagttgctccattcaatacatgctacccacaactgcaggatcatatgatgcaagtgggtgttgatcccagtgtcaacaaatgggaccaaccttttgtattgggagttgtggatccacatgattcattatcccatcctgctggggttgcagatgttaaagctgaatcagcaacatgtctggatcctgatctattcaccagttttttgattcctagttggtttggggatgaagggcaagagcctataaactgcaatcctttcccactgcctgaaatttatgaggcattccaaagcaaaaagcgttctgctctggaagatatccaaaagatgattcgggagctacagcttgacgagaatcggaaaagggaattggcagctgcccttcatgctcagttcaaggattggttatacgcttcgggcaatatccgccagctctactgtctacaaggtgattaatggtgcaatttacaagactgattatcctctgccgactcctcaaaaacattcgacgattgtcgaagctgacctcttccttccatggaaaggactcccaccctgctcacctgcggtatttacacaagtatgtaaaaaatgaagatgtactattgcctattttttacagattcatttgcgtatttctccaagtcttctctttgctgcgagttgggtattaattaggatgtgatattgcttaatttcccccctgtttctactcattttttggcccttgataatgtccacgagtatgtaatagggactaatgaatcaaacgttgttaaataaacatttcattccgttttgctaaatggctcatcatgtcaaccctctatggacc

SEQ ID NO: 49882 - DNA, 1603 bp, Zea Mays
ctaaaactgaagtcgctttgccagtggacacaaaaaaagtcctattttgctggtattgacaatggagacttttgagcaccttggatttctagttcagttctcagaaggaacttccttaagccaggctgctacattttttgcaaactcagacccagacatgcctgctgtgcctgtccctgctgctcaggttcttgattggatgtcacagaacatagctttttcgctggaatattcttctgagaggtccgtagctaaggaaagcaaccagcaaaccatgtctgatcttgatgtgaccatggctgaggccaatacaagtcactcacggaacagcacaccaagtgctaatcctgcatactacagaaatgtaacgtttgtggagggcttttccaaaacctctgttgtcaagcatgcatctgatgtcaaagggaattcaataaaggttttgaactgtcatgattctgttatctacatattagcaccactgaagtatgctactgtgtatggttgttctgatgctacggttgttcttggtgctgttggtaaggtagtaaaagtggagcattgtgaaagagtgcatatcattgcagctgcaaaacggatttgtattgccaactgccgggagtgcatcttctacctaggagtaaatcaccaacctcttgtattgggggacaaccataaattacaagttgctccattcaatacatgctacccacaactgcaggatcatatgatgcaagtgggtgttgatcccagtgtcaacaaatgggaccaaccttttgtattgggagttgtggatccacatgattcattatcccatcctgctggggttgcagatgttaaagctgaatcagcaacatgtctggatcctgatctattcaccagttttttgattcctagttggtttggggatgaagggcaagagcctataaactgcaatcctttcccactgcctgaaatttatgaggcattccaaagcaaaaagcgttctgctctggaagatatccaaaagatgattcgggagctacagcttgacgagaatcggaaaagggaattggcagctgcccttcatgctcagttcaaggattggttatacgcttcgggcaatatccgccagctctactgtctacaaggtgattaatggtgcaatttacaagactgattatcctctgccgactcctcaaaaacattcgacgattgtcgaagctgacctcttccttccatggaaaggactcccaccctgctcacctgcggtatttacacaagaagaagcgggtgatcttggaaagaagcgggattataagaagccatattatggttttccgcatcaggcccacctccatcagtaggagtctaggccccatcttctaaagaagttaagcaagtttcaacaacatcttctgcagacaacaagatggcagctctgtatgcttatccaaaagtccaagggctttgttacaagtgtgggatgacttactctcgaggacatcgatgtgctgaaacagtccagttgcagatggtggaagaattgtggcagatggtttcattgcctgagactaaaatgttatcgtcgtctgaagctaactcgtcgtctcaagcagttgtg

SEQ ID NO: 49883 - DNA, 1566 bp, Zea Mays
aagacaccaagtccagtaaaatgtccatttcagcttgggaggagagagaattgtggtattgacaatggagacttttgagcaccttggatttctagttcagttctcagaaggaacttccttaagccaggctgctacattttttgcaaactcagacccagacatgcctgctgtgcctgtccctgctgctcaggttcttgattggatgtcacagaacatagctttttcgctggaatattcttctgagaggtccgtagctaaggaaagcaaccagcaaaccatgtctgatcttgatgtgaccatggctgaggccaatacaagtcactcacggaacagcacaccaagtgctaatcctgcatactacagaaatgtaacgtttgtggagggcttttccaaaacctctgttgtcaagcatgcatctgatgtcaaagggaattcaataaaggttttgaactgtcatgattctgttatctacatattagcaccactgaagtatgctactgtgtatggttgttctgatgctacggttgttcttggtgctgttggtaaggtagtaaaagtggagcattgtgaaagagtgcatatcattgcagctgcaaaacggatttgtattgccaactgccgggagtgcatcttctacctaggagttgctccattcaatacatgctacccacaactgcaggatcatatgatgcaagtgggtgttgatcccagtgtcaacaaatgggaccaaccttttgtattgggagttgtggatccacatgattcattatcccatcctgctggggttgcagatgttaaagctgaatcagcaacatgtctggatcctgatctattcaccagttttttgattcctagttggtttggggatgaagggcaagagcctataaactgcaatcctttcccactgcctgaaatttatgaggcattccaaagcaaaaagcgttctgctctggaagatatccaaaagatgattcgggagctacagcttgacgagaatcggaaaagggaattggcagctgcccttcatgctcagttcaaggattggttatacggtaaccttcgggcaatatccgccagctctactgtctacaaggtgattaatggtgcaatttacaagactgattatcctctgccgactcctcaaaaacattcgacgattgtcgaagctgacctcttccttccatggaaaggactcccaccctgctcacctgcggtatttacacaagaagaagcgggtgatcttggaaagaagcgggattataagaagccatattatggttttccgcatcaggcccacctccatcagtaggagtctaggccccatcttctaaagaagttaagcaagtttcaacaacatcttctgcagacaacaagatggcagctctgtatgcttatccaaaagtccaagggctttgttacaagtgtgggatgacttactctcgaggacatcgatgtgctgaaacagtccagttgcagatggtggaagaattgtggcagatggtttcattgcctgagactaaaatgttatcgtcgtctgaagctaactcgtcgtctcaagcagttgtg

SEQ ID NO: 49884 - DNA, 2860 bp, Zea Mays
tgcaacacggcatctaccccaccggactcactatatctacggcccatcagcatacgcacagaccgcgcgctcggtcgactactggctagcttgtttcagtcgtccgatctgatctacagaaaaagcaggggcagggcagctagccatgattcagatgaacatgaagcagcctctcgtgctgcccgcgcaccggggcaatgtcgccggcgacttcttcggcaagacgctgctgatggaactcgtcagctccgaggtcgacgcaaagacgggtctggagaagccgcgggtgacggcgttcgctcacaagacgctgcgggagggccactacgaggcggagttcaaggtgccggcgtcgttcgggcccgtgggcgcggtgctgctggagaacgagcaccacaaggagatcttcatcagggagatcaagctcgtcacgggcagcgacagcagcaccgccgtcaccttcggctgcaactcctgggtgcactccaagttcgacaacccggagaagcgcatcttcttcaccctcaagtcctacctgccgtccgacacgcccaagggcctggaggacctgaggaagaaggacctgcaggcgcttcggggcgacggccacggcgagcgcaaggcgtccgagcgcgtctacgactacgacgtgtacaacgacctgggcgacccggacaagaaccccgcccaccagcggcccgtgctgggcggcagcaagcggtacccgtacccgcgccgctgccgcaccggtcgccccaggaccaggaaggaccccgaggcggaggtgcgccatgggcacaactacgtgccccgcgacgagcagttctcggaggtcaagcagctcacgttcggggccacgacgctgcgctcgggcctgcacgcgctgctcccggccatcaggccgatgctcatcaagagggagctgcgcttcccgcacttcccggccatcgacgacctctacagcgacggcatcccgctgccggcgcagaccgggttgggcgccatccgcagcatcgtcccgcgcgtggtcaagctggtggaggacaccaccgagcacgtcctccgcttcgagctgccggacatgatagagagagaccgcttctcgtggttcaaagacgaggagttcgcgaggcagacgatcgcggggctcaacccgctgtgcatccagctcctgacggagttccccatcaggagcaagctggacccggaggtgtacggcccggcggagtccgccatcaccaaggagatcctggagaagcacatgagcggcggcgccgccatgaccgtggagcaggcgctcgcggcgaagcgtctgttcatcctggactaccacgacgtgttcctgccctacgtgcacagggtgcgcgagctgccggacacgacgctctacggctcccgcaccgtcttcttcctcacggacctgggcacgctgatgccgctggccatcgagctggtgcggcccaaatcgccgacgcagccgcagtggaagcgggtgttcacgcacgggcccgacgccaccgacgcctggctgtggaagcttgccaaggcgcacgtggtgacccacgacacggggtaccaccagctggtgagccactggctgcgcacgcactgctgcgtggagccctacatcattgccgcgaaccggcagctcagccggctgcacccggtgtaccgcctcctgcacccgcacttccgctacaccatggagatcaacgcgctggccagggaggcgctcatcaacgccgacggcatcatcgaggagtccttctggccgggcaggtacgccgtcgagctcagctcagcggcgtacggcgccacgtggcagttcgacacggaggcgctgcccaacgacctcgtcaagcgtgggctcgccgtgcgccgggacgacggcgagctggagctcaccatcaaggactacccctacgcgcacgacgggctcatggtctggaacaccataaggcagtgggcggccgactacgtcaacgtctactacaagtccgacgaggccgtcgccgccgaccccgagctgaaggcgttctgggacgaggtgcgcaacgtgggccacggcgacaagaaggacgagccgtggtggcccgtgctcgacacccgcgacagcctcgcggagacgctcaccaccatcatgtgggtcacctccggccaccactcggcggtcaacttcgggcagtaccacttcggcggatacttcccgaaccgcccgaccaccatccggaagagcatgcccgtggaggaggaggcgggccgggacgaagagatgaagaagttcctgaagcagccggagacgaccctgctggacatgctgccgacgcagatgcaggccatcagggtgatgacgacgctggacatcctctcgtcgcactcgcccgacgaggagtacatgggagagttggcggagccgtcgtggctggaggagcccatggtgaaggcggcgttcgagaagttcggcggcaggatgaaggagatcgagggattcatcgacgagtgcaacaacaacccggagctcaggaaccggtgcggagcagggatcgtgccgtacgaactgctcaagcccttctccaagccgggagtcaccgggaggggcatccccaacagcatctccatttgacccgtccgtcctctccatccaatgggggtttgccttattgcgtgcacgctagctagctgcttggaaataaaaataattaaaataaaaggtctcgtctgtactattgtattgtaccatggatcatatcgtacatgttgtgtcaatgcaaagaggcacgtttgagttaccattaggatgacattactagcagatcctttttatacagcgaaaatacatacacaaaaaaaaaagacaata

SEQ ID NO: 49885 - DNA, 5049 bp, Zea Mays
aaacgtaccaaacggccaaggttccaaaggccaaacccgacgagtaaagccatgccgctatagaatcgtactatcgtagtcgtcgccgccgccgccatcgcgccgctccggtctctggcggccaccgcatcatcttctcttgcgttgttctgtctgttacactgactttcttctgctcagcgaccgacgagttttgtcgtatcgcttcctcccccgcctctatgggtccttttggcggtgtcgagctggaattgggggtggatgtggaagcggaacagagagaggtgcaggctttggcctgcttcgctgatgcgacgccgcgggcgagtcagtgctggtgctgtggtgccgggtttgtcgatcacgtctgcaaattttgtggggaaacaccaattttgcagttgtttggtcatcggttaagcagactttcccttttttttaatcttagtaaagttgcagagtagaatggttgtccattactaatctagcatgttgtataccagcacatcaaagctcctttctgaaagcacgaattatataaaccctgcttggctgcttcccacgaggcgttgcaaatcatgctatgtcggttgaggcatttacgaataagagctattctgagtttgtaagaaagataaaagataaatagttcagcaattcacaaactagaaatatataatggcattcttttgcttctaaggtaactaggaagtactcgttccaagttcttttatgtcatcagcatgcatgtgttctccattagttggaggcattgctatttttcagaactctgctgcatgcacaattattttgaggctacctgaacatccgtacctttcgttttaacatttcctttccttttggcaggatacattcagcttgctcatcctatttgtttgcttcatcactgcttttggtggatcagatataaagaatctatatgctctgagggatgaactcgtggaatcaaagcaattccttcaagactggtttgatatagaaagtcctccatgcttgtggtcacatataacttgtgtggacaaatctgttgcagtcatagatttgtcaaatatcccactccatgttccttttccattatgcatcacggcattccaggcacttgctcgtctcaacttaagtaggtgtgatttatttggtgagattccagaagccttgggaaatttgaagcatcttcagtacctggacttgagcagtaaccagcttactgggattgtgcctttctcattatatgatttgaagatgctgaaagaaatagtgttagacagaaacagcttgtcgggacaattgatccctgccattgctaagcttcagcaactcgctaagctaaccatatctaagaacaacatttctggagaacttcctccagaggtgggcagtttgaaggacctagaggtcttggactttcaccagaacagcttcaatggatcaataccagaagcactaggcaatttgtctcagctcttctaccttgatgcaagcaagaatcaactcactggatcaatatttccaggaataagcacattgttcaacctgttgacacttgatttctcttcaaatgatttggcggggccaatacctaaggagattgctcgcatggaaaatctagagtgcttggttttggggtccaacaatttcactggaggcattccaaaagagattggtaacctaaagaagctaaaaaaactcattctctctgcatgcaacttatcaggcaccatcccttggtcaattggtggtcttaaaagcctacatgaacttgatatatcagacaacaactttaagtcagaactcccagcatctattggtgagctgggaaatttgaccgtcctgattgcaatgagagcaaagctcataggcagcataccaaaagaacttggtagctgcaagaagcttactctccttcgtctgtccttcaataggttaactggttgtatccccaaagaacttgcaggtttagaagctattgttcattttgaggtggaaggtaacaaactgtcaggtcatattgctgattggtttcaaaactggggaaatgttgtatctataagactgggagataataagttcaatggttctatacttcctgccatatgtcaagccaattctcttcagtcacttgacttgcatttaaacgatctgacagggagtatcaatgagacatttaaaaggtgtaggaaccttactcaactgaatttgcaaggcaaccatttccatggtgagataccagaatatttggctgagttaccgctcacaattctggaattgccctataacaactttactggactcttgcctgccaagttgtttaagtcatcaacaattttggagatagatctcagctataacaagctcactggctgtattcctgagagcatttgtgagctccatagcttgcagaggttgaggatgagcagtaactacttagaaggatcaatcccgccggcggtaggtgctctcaagaatttgaatgaaatctcccttgatgggaatagattatctgggaacataccacaagagctcttcaactgcagaaacttagtcaagttaaacctgagctctaataatctgaacggaagcatctcgagatccatatctcagttgacttcgctcactggcttggttttgtctcacaaccaactctctggttcgattcctgctgagatatgtgggggattcacgaatccgtctcaccctgaatcagagtatgttcaatatcatggcttacttgatctgtcatacaaccggttgattggtcgtatcccaccagaaatcaagaattgtgttattctggaggagctacacctgcaagataactttctgaatgaatctattcctgtggagcttgctgagctgaagaatcttatgaacgttgacctctcttttaatgcattagttggacctatgcttccttggtccacgccattgctcaagctgcaaggcctttttctgtctaataaccacctaactggcaatattcctgctgagataggtcgcatccttcccaacatcgtggttctaagcttgtcctgtaatgcatttgtggctaccctaccccaatctctactatgcagcaagaccctgaaccgtctggatgtcagtaacaataacctctctggtaaaatcccgttatcttgtactggctttgaaggaacattgagctcgctgatcttgttcaatgcaagcagtaaccatttctcagggagccttgatgggtctatctcaaatttcgtacatttgtcttatcttgatattcacaacaacagcctcaacgggagcttgccagcagcactgtccaatctcagtttgctctatcttgatgtctcaatgaatgatttcagtggtgccatcccctgtggtatgtgcaatctatctaacatcacgtttgtcgatttctctggtaaaaatactggcatgcatagcttcgcagattgtgcagcatcaggcatttgtgctgctgatattaccagtaccaatcatgtggaggttcatacacctcatggaatggtaataacaatgaccatttgtgccgccattctcattgtggttcttcttgtggtttttgtgaaatggatggtgttgagaaacagttccttacctcttgtatccggccttgaatccaaggccacaattgagccagcctccagtaaagagttgctaggaaaaaaatcaagggaacctctaagcatcaatctttctacatttgagcatgcactgctgagggttaccatggatgatatcctgaaagctaccaataatttcagcgaggtgcacatcataggacatggtggttttgggactgtctatgaagcagcattccctgaaggacagagggtcgccgtcaagaggcttcatggtagctgccagttccttggtgaccgtcaattccttgctgagatggagaccattggaaaggtgaagcatcataaccttgtccccctacttggctactgcgctcgtggtgacgagcgtttcctgatctatgagtacatgcatcatgggagccttgagacatggctgaggacccatgaaaatacacctgaagcaattggatggcctgaacgtctgaggatctgcctcggttctgctaatgggctcatgttcctccaccatggctttgtgccccatatcatccatcgggacatgaagtcaagcaacattctactggatgagaacatggagccgaagatctctgactttggccttgcaaggataattagtgcctatgacactcatgttagcaccaccgtctctggcacgcttggctacattcccccagaatatgcgatgattatggaatcgaccgcgaggggtgatgtctacagctttggcgtagtcatgctggaggtgctcactggacggccgcctacagggaaagaggtggaagaagggggagggaaccttgtcgactgggtgcggtggatgattgcatgcagtcgggagggtgagctgtttgatcctcgcctgcctgtttcaggcctgtggcgagagcagatggtgcgtgtgcttgccattgctctggattgcaccaccgacgagccatcgaagaggccgaccatggtggaggtagtgaagggactcaagatggtccagctgatgaagcgtgattctcacaacccccagcatcatgcggtgcagccatgatctgggcatgtactgctgcctactgtttgtcactgttggagatgagcttggagcaaactacacccctacaactattttcagcttcaaggcagcttctgaagcggacaactcggcagatgggtcgcgtgcacaagctagggcagagaagaataaggcgccaagccaaacagaaccaaaacttcgtgtatgagtatgaccgaaccctgcgcggtcgtgggcatgcagagctcccgatgtgcgtggttctcattcaagccctgttcgtttaaatatttgatgtatgtgttttatataaatgagatttattgtcattatttaaatatggacacaaaaataaagaactgaaatgaacaatatattgagatagagggagtatattcgagccat

SEQ ID NO: 49886 - DNA, 4773 bp, Zea Mays
acccgacgagtaaagccatgccgctatagaatcgtactatcgtagtcgtcgccgccgccgccatcgcgccgctccggtctctggcggccaccgcatcatcttctcttgcgttgttctgtctgttacactgactttcttctgctcagcgaccgacgagttttgtcgtatcgcttcctcccccgcctctatgggtccttttggcggtgtcgagctggaattgggggtggatgtggaagcggaacagagagaggtgcaggctttggcctgcttcgctgatgcgacgccgcgggcgagtcagtgctggtgctgtggtgccgggtttgtcgatcacgtctgcaaattttgtggggaaacaccaattttgcagttgtttggtcatcggttaagcagactttcccttttttttaatcttagtaaagttgcagagtagaatggttgtccattactaatctagcatgttgtataccagcacatcaaagctcctttctgaaagcacgaattatataaaccctgcttggctgcttcccacgaggcgttgcaaatcatgctatgtcggttgaggcatttacgaataagagctattctgagtttgatacattcagcttgctcatcctatttgtttgcttcatcactgcttttggtggatcagatataaagaatctatatgctctgagggatgaactcgtggaatcaaagcaattccttcaagactggtttgatatagaaagtcctccatgcttgtggtcacatataacttgtgtggacaaatctgttgcagtcatagatttgtcaaatatcccactccatgttccttttccattatgcatcacggcattccaggcacttgctcgtctcaacttaagtaggtgtgatttatttggtgagattccagaagccttgggaaatttgaagcatcttcagtacctggacttgagcagtaaccagcttactgggattgtgcctttctcattatatgatttgaagatgctgaaagaaatagtgttagacagaaacagcttgtcgggacaattgatccctgccattgctaagcttcagcaactcgctaagctaaccatatctaagaacaacatttctggagaacttcctccagaggtgggcagtttgaaggacctagaggtcttggactttcaccagaacagcttcaatggatcaataccagaagcactaggcaatttgtctcagctcttctaccttgatgcaagcaagaatcaactcactggatcaatatttccaggaataagcacattgttcaacctgttgacacttgatttctcttcaaatgatttggcggggccaatacctaaggagattgctcgcatggaaaatctagagtgcttggttttggggtccaacaatttcactggaggcattccaaaagagattggtaacctaaagaagctaaaaaaactcattctctctgcatgcaacttatcaggcaccatcccttggtcaattggtggtcttaaaagcctacatgaacttgatatatcagacaacaactttaagtcagaactcccagcatctattggtgagctgggaaatttgaccgtcctgattgcaatgagagcaaagctcataggcagcataccaaaagaacttggtagctgcaagaagcttactctccttcgtctgtccttcaataggttaactggttgtatccccaaagaacttgcaggtttagaagctattgttcattttgaggtggaaggtaacaaactgtcaggtcatattgctgattggtttcaaaactggggaaatgttgtatctataagactgggagataataagttcaatggttctatacttcctgccatatgtcaagccaattctcttcagtcacttgacttgcatttaaacgatctgacagggagtatcaatgagacatttaaaaggtgtaggaaccttactcaactgaatttgcaaggcaaccatttccatggtgagataccagaatatttggctgagttaccgctcacaattctggaattgccctataacaactttactggactcttgcctgccaagttgtttaagtcatcaacaattttggagatagatctcagctataacaagctcactggctgtattcctgagagcatttgtgagctccatagcttgcagaggttgaggatgagcagtaactacttagaaggatcaatcccgccggcggtaggtgctctcaagaatttgaatgaaatctcccttgatgggaatagattatctgggaacataccacaagagctcttcaactgcagaaacttagtcaagttaaacctgagctctaataatctgaacggaagcatctcgagatccatatctcagttgacttcgctcactggcttggttttgtctcacaaccaactctctggttcgattcctgctgagatatgtgggggattcacgaatccgtctcaccctgaatcagagtatgttcaatatcatggcttacttgatctgtcatacaaccggttgattggtcgtatcccaccagaaatcaagaattgtgttattctggaggagctacacctgcaagataactttctgaatgaatctattcctgtggagcttgctgagctgaagaatcttatgaacgttgacctctcttttaatgcattagttggacctatgcttccttggtccacgccattgctcaagctgcaaggcctttttctgtctaataaccacctaactggcaatattcctgctgagataggtcgcatccttcccaacatcgtggttctaagcttgtcctgtaatgcatttgtggctaccctaccccaatctctactatgcagcaagaccctgaaccgtctggatgtcagtaacaataacctctctggtaaaatcccgttatcttgtactggctttgaaggaacattgagctcgctgatcttgttcaatgcaagcagtaaccatttctcagggagccttgatgggtctatctcaaatttcgtacatttgtcttatcttgatattcacaacaacagcctcaacgggagcttgccagcagcactgtccaatctcagtttgctctatcttgatgtctcaatgaatgatttcagtggtgccatcccctgtggtatgtgcaatctatctaacatcacgtttgtcgatttctctggtaaaaatactggcatgcatagcttcgcagattgtgcagcatcaggcatttgtgctgctgatattaccagtaccaatcatgtggaggttcatacacctcatggaatggtaataacaatgaccatttgtgccgccattctcattgtggttcttcttgtggtttttgtgaaatggatggtgttgagaaacagttccttacctcttgtatccggccttgaatccaaggccacaattgagccagcctccagtaaagagttgctaggaaaaaaatcaagggaacctctaagcatcaatctttctacatttgagcatgcactgctgagggttaccatggatgatatcctgaaagctaccaataatttcagcgaggtgcacatcataggacatggtggttttgggactgtctatgaagcagcattccctgaaggacagagggtcgccgtcaagaggcttcatggtagctgccagttccttggtgaccgtcaattccttgctgagatggagaccattggaaaggtgaagcatcataaccttgtccccctacttggctactgcgctcgtggtgacgagcgtttcctgatctatgagtacatgcatcatgggagccttgagacatggctgaggacccatgaaaatacacctgaagcaattggatggcctgaacgtctgaggatctgcctcggttctgctaatgggctcatgttcctccaccatggctttgtgccccatatcatccatcgggacatgaagtcaagcaacattctactggatgagaacatggagccgaagatctctgactttggccttgcaaggataattagtgcctatgacactcatgttagcaccaccgtctctggcacgcttggctacattcccccagaatatgcgatgattatggaatcgaccgcgaggggtgatgtctacagctttggcgtagtcatgctggaggtgctcactggacggccgcctacagggaaagaggtggaagaagggggagggaaccttgtcgactgggtgcggtggatgattgcatgcagtcgggagggtgagctgtttgatcctcgcctgcctgtttcaggcctgtggcgagagcagatggtgcgtgtgcttgccattgctctggattgcaccaccgacgagccatcgaagaggccgaccatggtggaggtagtgaagggactcaagatggtccagctgatgaagcgtgattctcacaacccccagcatcatgcggtgcagccatgatctgggcatgtactgctgcctactgtttgtcactgttggagatgagcttggagcaaactacacccctacaactattttcagcttcaaggcagcttctgaagcggacaactcggcagatgggtcgcgtgcacaagctagggcagagaagaataaggcgccaagccaaacagaaccaaaacttcgtgtatgagtatgaccgaaccctgcgcggtcgtgggcatgcagagctcccgatgtgcgtggttctcattcaagccctgttcgtttaaatatttgatgtatgtgttttatataaatgagatttattgtcattatttaaatatggacacaaaaataaagaactgaaatgaacaatatattgagatagagggagtatattcgagccat

SEQ ID NO: 49887 - DNA, 4563 bp, Zea Mays
acccgacgagtaaagccatgccgctatagaatcgtactatcgtagtcgtcgccgccgccgccatcgcgccgctccggtctctggcggccaccgcatcatcttctcttgcgttgttctgtctgttacactgactttcttctgctcagcgaccgacgagttttgtcgtatcgcttcctcccccgcctctatgggtccttttggcggtgtcgagctggaattgggggtggatgtggaagcggaacagagagaggtgcaggctttggcctgcttcgctgatgcgacgccgcgggcgagtcagtgctggtgctgtggtgccgggtttgtcgatcacgtctgcaaattttgtggggaaacaccaattttgcagttgtttggtcatcggatacattcagcttgctcatcctatttgtttgcttcatcactgcttttggtggatcagatataaagaatctatatgctctgagggatgaactcgtggaatcaaagcaattccttcaagactggtttgatatagaaagtcctccatgcttgtggtcacatataacttgtgtggacaaatctgttgcagtcatagatttgtcaaatatcccactccatgttccttttccattatgcatcacggcattccaggcacttgctcgtctcaacttaagtaggtgtgatttatttggtgagattccagaagccttgggaaatttgaagcatcttcagtacctggacttgagcagtaaccagcttactgggattgtgcctttctcattatatgatttgaagatgctgaaagaaatagtgttagacagaaacagcttgtcgggacaattgatccctgccattgctaagcttcagcaactcgctaagctaaccatatctaagaacaacatttctggagaacttcctccagaggtgggcagtttgaaggacctagaggtcttggactttcaccagaacagcttcaatggatcaataccagaagcactaggcaatttgtctcagctcttctaccttgatgcaagcaagaatcaactcactggatcaatatttccaggaataagcacattgttcaacctgttgacacttgatttctcttcaaatgatttggcggggccaatacctaaggagattgctcgcatggaaaatctagagtgcttggttttggggtccaacaatttcactggaggcattccaaaagagattggtaacctaaagaagctaaaaaaactcattctctctgcatgcaacttatcaggcaccatcccttggtcaattggtggtcttaaaagcctacatgaacttgatatatcagacaacaactttaagtcagaactcccagcatctattggtgagctgggaaatttgaccgtcctgattgcaatgagagcaaagctcataggcagcataccaaaagaacttggtagctgcaagaagcttactctccttcgtctgtccttcaataggttaactggttgtatccccaaagaacttgcaggtttagaagctattgttcattttgaggtggaaggtaacaaactgtcaggtcatattgctgattggtttcaaaactggggaaatgttgtatctataagactgggagataataagttcaatggttctatacttcctgccatatgtcaagccaattctcttcagtcacttgacttgcatttaaacgatctgacagggagtatcaatgagacatttaaaaggtgtaggaaccttactcaactgaatttgcaaggcaaccatttccatggtgagataccagaatatttggctgagttaccgctcacaattctggaattgccctataacaactttactggactcttgcctgccaagttgtttaagtcatcaacaattttggagatagatctcagctataacaagctcactggctgtattcctgagagcatttgtgagctccatagcttgcagaggttgaggatgagcagtaactacttagaaggatcaatcccgccggcggtaggtgctctcaagaatttgaatgaaatctcccttgatgggaatagattatctgggaacataccacaagagctcttcaactgcagaaacttagtcaagttaaacctgagctctaataatctgaacggaagcatctcgagatccatatctcagttgacttcgctcactggcttggttttgtctcacaaccaactctctggttcgattcctgctgagatatgtgggggattcacgaatccgtctcaccctgaatcagagtatgttcaatatcatggcttacttgatctgtcatacaaccggttgattggtcgtatcccaccagaaatcaagaattgtgttattctggaggagctacacctgcaagataactttctgaatgaatctattcctgtggagcttgctgagctgaagaatcttatgaacgttgacctctcttttaatgcattagttggacctatgcttccttggtccacgccattgctcaagctgcaaggcctttttctgtctaataaccacctaactggcaatattcctgctgagataggtcgcatccttcccaacatcgtggttctaagcttgtcctgtaatgcatttgtggctaccctaccccaatctctactatgcagcaagaccctgaaccgtctggatgtcagtaacaataacctctctggtaaaatcccgttatcttgtactggctttgaaggaacattgagctcgctgatcttgttcaatgcaagcagtaaccatttctcagggagccttgatgggtctatctcaaatttcgtacatttgtcttatcttgatattcacaacaacagcctcaacgggagcttgccagcagcactgtccaatctcagtttgctctatcttgatgtctcaatgaatgatttcagtggtgccatcccctgtggtatgtgcaatctatctaacatcacgtttgtcgatttctctggtaaaaatactggcatgcatagcttcgcagattgtgcagcatcaggcatttgtgctgctgatattaccagtaccaatcatgtggaggttcatacacctcatggaatggtaataacaatgaccatttgtgccgccattctcattgtggttcttcttgtggtttttgtgaaatggatggtgttgagaaacagttccttacctcttgtatccggccttgaatccaaggccacaattgagccagcctccagtaaagagttgctaggaaaaaaatcaagggaacctctaagcatcaatctttctacatttgagcatgcactgctgagggttaccatggatgatatcctgaaagctaccaataatttcagcgaggtgcacatcataggacatggtggttttgggactgtctatgaagcagcattccctgaaggacagagggtcgccgtcaagaggcttcatggtagctgccagttccttggtgaccgtcaattccttgctgagatggagaccattggaaaggtgaagcatcataaccttgtccccctacttggctactgcgctcgtggtgacgagcgtttcctgatctatgagtacatgcatcatgggagccttgagacatggctgaggacccatgaaaatacacctgaagcaattggatggcctgaacgtctgaggatctgcctcggttctgctaatgggctcatgttcctccaccatggctttgtgccccatatcatccatcgggacatgaagtcaagcaacattctactggatgagaacatggagccgaagatctctgactttggccttgcaaggataattagtgcctatgacactcatgttagcaccaccgtctctggcacgcttggctacattcccccagaatatgcgatgattatggaatcgaccgcgaggggtgatgtctacagctttggcgtagtcatgctggaggtgctcactggacggccgcctacagggaaagaggtggaagaagggggagggaaccttgtcgactgggtgcggtggatgattgcatgcagtcgggagggtgagctgtttgatcctcgcctgcctgtttcaggcctgtggcgagagcagatggtgcgtgtgcttgccattgctctggattgcaccaccgacgagccatcgaagaggccgaccatggtggaggtagtgaagggactcaagatggtccagctgatgaagcgtgattctcacaacccccagcatcatgcggtgcagccatgatctgggcatgtactgctgcctactgtttgtcactgttggagatgagcttggagcaaactacacccctacaactattttcagcttcaaggcagcttctgaagcggacaactcggcagatgggtcgcgtgcacaagctagggcagagaagaataaggcgccaagccaaacagaaccaaaacttcgtgtatgagtatgaccgaaccctgcgcggtcgtgggcatgcagagctcccgatgtgcgtggttctcattcaagccctgttcgtttaaatatttgatgtatgtgttttatataaatgagatttattgtcattatttaaatatggacacaaaaataaagaactgaaatgaacaatatattgagatagagggagtatattcgagccat

SEQ ID NO: 49888 - DNA, 4258 bp, Zea Mays
acccgacgagtaaagccatgccgctatagaatcgtactatcgtagtcgtcgccgccgccgccatcgcgccgctccggatacattcagcttgctcatcctatttgtttgcttcatcactgcttttggtggatcagatataaagaatctatatgctctgagggatgaactcgtggaatcaaagcaattccttcaagactggtttgatatagaaagtcctccatgcttgtggtcacatataacttgtgtggacaaatctgttgcagtcatagatttgtcaaatatcccactccatgttccttttccattatgcatcacggcattccaggcacttgctcgtctcaacttaagtaggtgtgatttatttggtgagattccagaagccttgggaaatttgaagcatcttcagtacctggacttgagcagtaaccagcttactgggattgtgcctttctcattatatgatttgaagatgctgaaagaaatagtgttagacagaaacagcttgtcgggacaattgatccctgccattgctaagcttcagcaactcgctaagctaaccatatctaagaacaacatttctggagaacttcctccagaggtgggcagtttgaaggacctagaggtcttggactttcaccagaacagcttcaatggatcaataccagaagcactaggcaatttgtctcagctcttctaccttgatgcaagcaagaatcaactcactggatcaatatttccaggaataagcacattgttcaacctgttgacacttgatttctcttcaaatgatttggcggggccaatacctaaggagattgctcgcatggaaaatctagagtgcttggttttggggtccaacaatttcactggaggcattccaaaagagattggtaacctaaagaagctaaaaaaactcattctctctgcatgcaacttatcaggcaccatcccttggtcaattggtggtcttaaaagcctacatgaacttgatatatcagacaacaactttaagtcagaactcccagcatctattggtgagctgggaaatttgaccgtcctgattgcaatgagagcaaagctcataggcagcataccaaaagaacttggtagctgcaagaagcttactctccttcgtctgtccttcaataggttaactggttgtatccccaaagaacttgcaggtttagaagctattgttcattttgaggtggaaggtaacaaactgtcaggtcatattgctgattggtttcaaaactggggaaatgttgtatctataagactgggagataataagttcaatggttctatacttcctgccatatgtcaagccaattctcttcagtcacttgacttgcatttaaacgatctgacagggagtatcaatgagacatttaaaaggtgtaggaaccttactcaactgaatttgcaaggcaaccatttccatggtgagataccagaatatttggctgagttaccgctcacaattctggaattgccctataacaactttactggactcttgcctgccaagttgtttaagtcatcaacaattttggagatagatctcagctataacaagctcactggctgtattcctgagagcatttgtgagctccatagcttgcagaggttgaggatgagcagtaactacttagaaggatcaatcccgccggcggtaggtgctctcaagaatttgaatgaaatctcccttgatgggaatagattatctgggaacataccacaagagctcttcaactgcagaaacttagtcaagttaaacctgagctctaataatctgaacggaagcatctcgagatccatatctcagttgacttcgctcactggcttggttttgtctcacaaccaactctctggttcgattcctgctgagatatgtgggggattcacgaatccgtctcaccctgaatcagagtatgttcaatatcatggcttacttgatctgtcatacaaccggttgattggtcgtatcccaccagaaatcaagaattgtgttattctggaggagctacacctgcaagataactttctgaatgaatctattcctgtggagcttgctgagctgaagaatcttatgaacgttgacctctcttttaatgcattagttggacctatgcttccttggtccacgccattgctcaagctgcaaggcctttttctgtctaataaccacctaactggcaatattcctgctgagataggtcgcatccttcccaacatcgtggttctaagcttgtcctgtaatgcatttgtggctaccctaccccaatctctactatgcagcaagaccctgaaccgtctggatgtcagtaacaataacctctctggtaaaatcccgttatcttgtactggctttgaaggaacattgagctcgctgatcttgttcaatgcaagcagtaaccatttctcagggagccttgatgggtctatctcaaatttcgtacatttgtcttatcttgatattcacaacaacagcctcaacgggagcttgccagcagcactgtccaatctcagtttgctctatcttgatgtctcaatgaatgatttcagtggtgccatcccctgtggtatgtgcaatctatctaacatcacgtttgtcgatttctctggtaaaaatactggcatgcatagcttcgcagattgtgcagcatcaggcatttgtgctgctgatattaccagtaccaatcatgtggaggttcatacacctcatggaatggtaataacaatgaccatttgtgccgccattctcattgtggttcttcttgtggtttttgtgaaatggatggtgttgagaaacagttccttacctcttgtatccggccttgaatccaaggccacaattgagccagcctccagtaaagagttgctaggaaaaaaatcaagggaacctctaagcatcaatctttctacatttgagcatgcactgctgagggttaccatggatgatatcctgaaagctaccaataatttcagcgaggtgcacatcataggacatggtggttttgggactgtctatgaagcagcattccctgaaggacagagggtcgccgtcaagaggcttcatggtagctgccagttccttggtgaccgtcaattccttgctgagatggagaccattggaaaggtgaagcatcataaccttgtccccctacttggctactgcgctcgtggtgacgagcgtttcctgatctatgagtacatgcatcatgggagccttgagacatggctgaggacccatgaaaatacacctgaagcaattggatggcctgaacgtctgaggatctgcctcggttctgctaatgggctcatgttcctccaccatggctttgtgccccatatcatccatcgggacatgaagtcaagcaacattctactggatgagaacatggagccgaagatctctgactttggccttgcaaggataattagtgcctatgacactcatgttagcaccaccgtctctggcacgcttggctacattcccccagaatatgcgatgattatggaatcgaccgcgaggggtgatgtctacagctttggcgtagtcatgctggaggtgctcactggacggccgcctacagggaaagaggtggaagaagggggagggaaccttgtcgactgggtgcggtggatgattgcatgcagtcgggagggtgagctgtttgatcctcgcctgcctgtttcaggcctgtggcgagagcagatggtgcgtgtgcttgccattgctctggattgcaccaccgacgagccatcgaagaggccgaccatggtggaggtagtgaagggactcaagatggtccagctgatgaagcgtgattctcacaacccccagcatcatgcggtgcagccatgatctgggcatgtactgctgcctactgtttgtcactgttggagatgagcttggagcaaactacacccctacaactattttcagcttcaaggcagcttctgaagcggacaactcggcagatgggtcgcgtgcacaagctagggcagagaagaataaggcgccaagccaaacagaaccaaaacttcgtgtatgagtatgaccgaaccctgcgcggtcgtgggcatgcagagctcccgatgtgcgtggttctcattcaagccctgttcgtttaaatatttgatgtatgtgttttatataaatgagatttattgtcattatttaaatatggacacaaaaataaagaactgaaatgaacaatatattgagatagagggagtatattcgagccat

SEQ ID NO: 49889 - DNA, 1811 bp, Zea Mays
atatatatatggctggagcttaaaagtccaatctgtgttcttttctacctctttcggtctccgctgagacttgaaacagcctttcatggatgtactgaagagaaaaagaaccttttgtaccataagatagtagaacagaattggtgtctcagatttcttcaaagttctgagtctccaaattggcaaaaagttgaagttaatgggggccatgtgcatgtgtccgggtccggcatctggaaatggaatggtactccaatatatattcggctcgcccctcaccaaccggtggaggacgacgaccggtcccattccccccgccccaacttgtcaggactcaagaggctcccctcctccctcgccgcggaacacgcgcgccgtcgtcgccagcccgggttcatttctccgttccttggtgcggtggtagccgagcgctccggccatggcgttctatcggggcctcaccgcagtctcgagactgcgatcacgcatggcgcaggaggccaccacgctggggggtgtgaggtggctgcagatgcagagcgcgtccgatctcgatcttaagtcccagttgcaggaattgattccggaacaacaggatcgcttaaagaagctcaagtcagagcatggaaagacccagcttggaaacataactgtggatatggtccttggtggaatgagagggatgactggaatgctttgggaaacatccctacttgatccagaggagggtattcgttttaggggcctctcaattccagaatgccaaaaagtgctgccaacagcagttaagggcggtgaacctttgcctgagggtctcctttggcttcttttgacggggaaggtcccaaccaaagagcaagttgatgcactatcaaaggaattgcttgcgcgctcaactgttccagctcatgtctataagacaatagatgctctcccagtagatgcacatcctatgacacagtttaccacaggagtaatggctcttcaggttgagagtgaatttcaaaaggcttatgacaatggattgccaaagtcaaagttttgggagcctacttatgaagactgcttaaatttgattgctcggcttccaccagtggcttcttatgtttaccggagaattttcaagagtgggaaatcaatagaagccgataattctttggactatgcggcaaatttctcacacatgcttggttttgacgacccaaaaatgctggagctgatgcggctctatgtaacaattcacactgatcatgaaggcgggaatgtcagtgctcatactggtcatctggtaatatttgttctcttgttgtaatctttatattttttgttagtgtttcttaacgatccaagataatgacagctgtcggcgtgataccctattttgtaccatcattgcactttgcttttggtttgctacaatgtgattattactcctgtgacaatactttagtatgtacttttaaagcgaactgaattgttaatctggaaatacctttttaaaaagtgcatgatagcacttattaggaactggatcttggaacaggataagagggttagttttagcatatactttgctaatttaatcatgattcgccaggactaattcatattacttgttccatctttgttatattccatgtattccatagtagtgagtataaatttttggttctaacagtagtccgggtatgttgttacacttgtgtcggctattgtagatcaggagagctccatgtgatggaggatcataatgtgttggaagggggtctggggatcattgtagttgtagaagtattttttattgtgtactc

SEQ ID NO: 49890 - DNA, 2551 bp, Zea Mays
aaaaaataccctagctgattttatgaaaatacaaaacgctccgccgcatctcaaaccctagatttctcagatttcctcatccctcatctctcctcccgtgacgtcgcgccacatcgtcctcttcctccgcgtgccgctgctaccgtggcccccttgcctgctcgcctccacggccacacgaaggccccctgtgttgctctcggatatgcgctgccatcgccggcgtagccggagctggccgtccacgcaaccctgccacgggagggcgacgcgttgatgctggagctcacaaggtgtcgctgctggagcagcgtacgacgacgaaggcgctgtggcagcacctggtgctagcgctacactactactgaattttgtgatgttgcaatttcatcttttattttgttttttggggtgatgcaaaaaaacaaaactcaaaagtctactaaaggccataaattgagcaatgttgctgcttcaagaaacaaattatcaacttattcccatctaacctttgatgggatttggtttagcattaaggaattctcaaaatcaaaatagcagtttcaagtgccagatgatgcaaggctttcagctagaagtgtagctgttctctgaaatctttgccaaaaggttgtactatatggttgattgttctgatttcgagcttggttagtctaatgttcttaattatggatgatgatcctttgaagttcatgcacgaagacttgccgttctgaaggcccttacttcctgttccactagtagttctgagatgatggaaaagctaaacgaaatcgtgtttgacatcttggaaaaggttggccatccataatttgagtattctttgtacagttacattagtctttaaactacttttctcatcctcactaattatattgtcggcaatatattgtcgacaagaatggttctggatatattgaatgttcaatggtactcctattggataatcctatcagcacgacaagtgcttccatagcttatgatgttgaattttgctgctccatggcagcagcagcagcccctgccagttgaccattctgacgccttctcctagcattatgctttcttgtagcttcatttggaaaaggcagattgctcaaggaatttcatgcttagttgcaccacaccagggtatcatcaatcattcagccccattctactgatgtaaattgtgcaaatcctttttctttgagacttttgagagtggtctgtcgattacttgcaagaaatatgaacctttgtttctgtgcatgggcataaaacaaacagcttctagcctcttttacggtacttgcacttgcaagaaatgtgaactccttttcatttctgtatgtggacataatgccaaagcatccaggatttttcatggttgttgatgtctttacacagttcatctccaccagtatgccctcctcgtactctatataaacacatcaacagcaccgcaattagccacataaacacatctcgcagccacctttttttgttctgttgtaagtatactttcccttaccatctttatttgttagtttaatttgtaattgggaagtattagtggaaagaggatgagacgctatcatctatgtactctgcaaatgcatctgacattatatgggctgcttcatataatttgaattgctccattcttgccgacaatatattgcaaggtacatgtctaggagctatttaaactacgtcgacctcactaattataagcattgaaaaagcaacaattgctacagtgcacttaaacttgcagctcattattatctggctaagatgatgggccaacttagtttatttgatctaaaaattgtgagtcttatgttctgaactcaaacttgtgacaatttattttattttcgcagtctattatacgtggtaatttgcaatatgcttctttaagtgcactcagaaggcatccacttgatctcggtaatcaagcattcctccaccgagctgtggaaggattaaatacaggaacatgacccctgaagcagctttggatcatgtacgatccattaggcctcgagtgcttttggcaccctcgcagtggtcactcaagtagatctaaagttattctttgagtccatatgtggtgagctaaaagtttgcagaaatggcaccatcaagatcgatctggagaccaacaagatcatggacttcatcaagtttgacgtcggcaatgtggtcatggtgaccggcgggaggaacaccgggcgtgtaggagtgatcaagaacagggagaagcacaagggcagcttcgagaccatccacgtgctgcttggagctttttgctatgtctagttttctcctatttgttgtacaggaaaacatagaatggaattcaaatttggtggccacaaaagtgtggagacttgaattcatataaagttagccttaacattagtgcaaacagttgtatcttagtttagatttagagtacacttatgtatgcgttgtttgacaatgcttatttatgatatattgaatggtacttatttatattatattaattataatgttgttc

SEQ ID NO: 49891 - DNA, 2506 bp, Zea Mays
aaataccctagctgattttatgaaaatacaaaacgctccgccgcatctcaaaccctagatttctcagatttcctcatccctcatctctcctcccgtgacgtcgcgccacatcgtcctcttcctccgcgtgccgctgctaccgtggcccccttgcctgctcgcctccacggccacacgaaggccccctgtgttgctctcggatatgcgctgccatcgccggcgtagccggagctggccgtccacgcaaccctgccacgggagggcgacgcgttgatgctggagctcacaaggtgtcgctgctggagcagcgtacgacgacgaaggcgctgtggcagcacctggtgctagcgctacactactactgaattttgtgatgttgcaatttcatcttttattttgttttttggggtgatgcaaaaaaacaaaactcaaaagtctactaaaggccataaattgagcaatgttgctgcttcaagaaacaaattatcaacttattcccatctaacctttgatgggatttggtttagcattaaggaattctcaaaatcaaaatagcaggtacttgtcacgatctctactgtgtttctttgaggtattcacttttctatttgaagaacaccactaatcgagtttatttttcttagtttcaagtgccagatgatgcaaggctttcagctagaagtgtagctgttctctgaaatctttgccaaaagttcatgcacgaagacttgccgttctgaaggcccttacttcctgttccactagtagttctgagatgatggaaaagctaaacgaaatcgtgtttgacatcttggaaaaggttggccatccataatttgagtattctttgtacagttacattagtctttaaactacttttctcatcctcactaattatattgtcggcaatatattgtcgacaagaatggttctggatatattgaatgttcaatggtactcctattggataatcctatcagcacgacaagtgcttccatagcttatgatgttgaattttgctgctccatggcagcagcagcagcccctgccagttgaccattctgacgccttctcctagcattatgctttcttgtagcttcatttggaaaaggcagattgctcaaggaatttcatgcttagttgcaccacaccagggtatcatcaatcattcagccccattctactgatgtaaattgtgcaaatcctttttctttgagacttttgagagtggtctgtcgattacttgcaagaaatatgaacctttgtttctgtgcatgggcataaaacaaacagcttctagcctcttttacggtacttgcacttgcaagaaatgtgaactccttttcatttctgtatgtggacataatgccaaagcatccaggatttttcatggttgttgatgtctttacacagttcatctccaccagtatgccctcctcgtactctatataaacacatcaacagcaccgcaattagccacataaacacatctcgcagccacctttttttgttctgttgtaagtatactttcccttaccatctttatttgttagtttaatttgtaattgggaagtattagtggaaagaggatgagacgctatcatctatgtactctgcaaatgcatctgacattatatgggctgcttcatataatttgaattgctccattcttgccgacaatatattgcaaggtacatgtctaggagctatttaaactacgtcgacctcactaattataagcattgaaaaagcaacaattgctacagtgcacttaaacttgcagctcattattatctggctaagatgatgggccaacttagtttatttgatctaaaaattgtgagtcttatgttctgaactcaaacttgtgacaatttattttattttcgcagtctattatacgtggtaatttgcaatatgcttctttaagtgcactcagaaggcatccacttgatctcggtaatcaagcattcctccaccgagctgtggaaggattaaatacaggaacatgacccctgaagcagctttggatcatgtacgatccattaggcctcgagtgcttttggcaccctcgcagtgctaaaagtttgcagaaatggcaccatcaagatcgatctggagaccaacaagatcatggacttcatcaagtttgacgtcggcaatgtggtcatggtgaccggcgggaggaacaccgggcgtgtaggagtgatcaagaacagggagaagcacaagggcagcttcgagaccatccacgtgctgcttggagctttttgctatgtctagttttctcctatttgttgtacaggaaaacatagaatggaattcaaatttggtggccacaaaagtgtggagacttgaattcatataaagttagccttaacattagtgcaaacagttgtatcttagtttagatttagagtacacttatgtatgcgttgtttgacaatgcttatttatgatatattgaatggtacttatttatattatattaattataatgttgttc

SEQ ID NO: 49892 - DNA, 2631 bp, Zea Mays
ctcaaaccctagatttctcagatttcctcatccctcatctctcctcccgtgacgtcgcgccacatcgtcctcttcctccgcgtgccgctgctaccgtggcccccttgcctgctcgcctccacggccacacgaaggccccctgtgttgctctcggatatgcgctgccatcgccggcgtagccggagctggccgtccacgcaaccctgccacgggagggcgacgcgttgatgctggagctcacaaggtgtcgctgctggagcagcgtacgacgacgaaggcgctgtggcagcacctggtgctagcgctacactactactgaattttgtgatgttgcaatttcatcttttattttgttttttggggtgatgcaaaaaaacaaaactcaaaagtctactaaaggccataaattgagcaatgttgctgcttcaagaaacaaattatcaacttattcccatctaacctttgatgggatttggtttagcattaaggaattctcaaaatcaaaatagcagtttcaagtgccagatgatgcaaggctttcagctagaagtgtagctgttctctgaaatctttgccaaaaggttaatttcattctaccttgcatgctacctgtttagcatgatcgttagtttattcgctaacaaaaaactttgccgaatggatgacttccttctgagaagactgaactgaataattatgtcaaagttgtttcagtagtttggcctaatcagtattgatctatggtgtatagtctacaggttgtactatatggttgattgttctgatttcgagcttggttagtctaatgttcttaattatggatgatgatcctttgaagttcatgcacgaagacttgccgttctgaaggcccttacttcctgttccactagtagttctgagatgatggaaaagctaaacgaaatcgtgtttgacatcttggaaaaggttggccatccataatttgagtattctttgtacagttacattagtctttaaactacttttctcatcctcactaattatattgtcggcaatatattgtcgacaagaatggttctggatatattgaatgttcaatggtactcctattggataatcctatcagcacgacaagtgcttccatagcttatgatgttgaattttgctgctccatggcagcagcagcagcccctgccagttgaccattctgacgccttctcctagcattatgctttcttgtagcttcatttggaaaaggcagattgctcaaggaatttcatgcttagttgcaccacaccagggtatcatcaatcattcagccccattctactgatgtaaattgtgcaaatcctttttctttgagacttttgagagtggtctgtcgattacttgcaagaaatatgaacctttgtttctgtgcatgggcataaaacaaacagcttctagcctcttttacggtacttgcacttgcaagaaatgtgaactccttttcatttctgtatgtggacataatgccaaagcatccaggatttttcatggttgttgatgtctttacacagttcatctccaccagtatgccctcctcgtactctatataaacacatcaacagcaccgcaattagccacataaacacatctcgcagccacctttttttgttctgttgtaagtatactttcccttaccatctttatttgttagtttaatttgtaattgggaagtattagtggaaagaggatgagacgctatcatctatgtactctgcaaatgcatctgacattatatgggctgcttcatataatttgaattgctccattcttgccgacaatatattgcaaggtacatgtctaggagctatttaaactacgtcgacctcactaattataagcattgaaaaagcaacaattgctacagtgcacttaaacttgcagctcattattatctggctaagatgatgggccaacttagtttatttgatctaaaaattgtgagtcttatgttctgaactcaaacttgtgacaatttattttattttcgcagtctattatacgtggtaatttgcaatatgcttctttaagtgcactcagaaggcatccacttgatctcggtaatcaagcattcctccaccgagctgtggaaggattaaatacaggaacatgacccctgaagcagctttggatcatgtacgatccattaggcctcgagtgcttttggcaccctcgcagtgctaaaagtttgcagaaatggcaccatcaagatcgatctggagaccaacaagatcatggacttcatcaagtttgacgtcggcaatgtggtcatggtgaccggcgggaggaacaccgggcgtgtaggagtgatcaagaacagggagaagcacaagggcagcttcgagaccatccacgtgctgcttggagctttttgctatgtctagttttctcctatttgttgtacaggaaaacatagaatggaattcaaatttggtggccacaaaagtgtggagacttgaattcatataaagttagccttaacattagtgcaaacagttgtatcttagtttagatttagagtacacttatgtatgcgttgtttgacaatgcttatttatgatatattgaatggtacttatttatattatattaattataatgttgttc

SEQ ID NO: 49893 - DNA, 1138 bp, Zea Mays
ctcagatttcctcatccctcatctctcctcccgtgacgtcgcgccacatcgtcctcttcctccgcgtgccgctgctaccgtggcccccttgcctgctcgcctccacggccacacgaaggccccctgtgttgctctcggttctcactcctcctctctatttcctgtgttgtcgccccgccccatgatcttcttcctcgcgctagcactggccctatgccccctccttgctcacctccatggcctcgcggaagcggaccttgccgcgagtggttcccagttctcctcacctcctcctctctcctttcaggatatgcgctgccatcgccggcgtagccggagctggccgtccacgcaaccctgccacgggagggcgacgcgttgatgctggagctcacaaggtgtcgctgctggagcagcttcatgcacgaagacttgccgttctgaaggcccttacttcctgttccactagtagttctgagatgatggaaaagctaaacgaaatcgtgtttgacatcttggaaaagtctattatacgtggtaatttgcaatatgcttctttaagtgcactcagaaggcatccacttgatctcggtaatcaagcattcctccaccgagctgtggaaggattaaatacaggaacatgacccctgaagcagctttggatcatgtacgatccattaggcctcgagtgcttttggcaccctcgcagtgctaaaagtttgcagaaatggcaccatcaagatcgatctggagaccaacaagatcatggacttcatcaagtttgacgtcggcaatgtggtcatggtgaccggcgggaggaacaccgggcgtgtaggagtgatcaagaacagggagaagcacaagggcagcttcgagaccatccacgtgctgcttggagctttttgctatgtctagttttctcctatttgttgtacaggaaaacatagaatggaattcaaatttggtggccacaaaagtgtggagacttgaattcatataaagttagccttaacattagtgcaaacagttgtatcttagtttagatttagagtacacttatgtatgcgttgtttgacaatgcttatttatgatatattgaatggtacttatttatattatattaattataatgttgttc

SEQ ID NO: 49894 - DNA, 1591 bp, Zea Mays
ctcagatttcctcatccctcatctctcctcccgtgacgtcgcgccacatcgtcctcttcctccgcgtgccgctgctaccgtggcccccttgcctgctcgcctccacggccacacgaaggccccctgtgttgctctcggatatgcgctgccatcgccggcgtagccggagctggccgtccacgcaaccctgccacgggagggcgacgcgttgatgctggagctcacaaggtgtcgctgctggagcagcgtacgacgacgaaggcgctgtggcagcacctggtgctagcgctacactactactgaattttgtgatgttgcaatttcatcttttattttgttttttggggtgatgcaaaaaaacaaaactcaaaagtctactaaaggccataaattgagcaatgttgctgcttcaagaaacaaattatcaacttattcccatctaacctttgatgggatttggtttagcattaaggaattctcaaaatcaaaatagcagtttcaagtgccagatgatgcaaggctttcagctagaagtgtagctgttctctgaaatctttgccaaaaggttaatttcattctaccttgcatgctacctgtttagcatgatcgttagtttattcgctaacaaaaaactttgccgaatggatgacttccttctgagaagactgaactgaataattatgtcaaagttgtttcagtagtttggcctaatcagtattgatctatggtgtatagtctacaggttgtactatatggttgattgttctgatttcgagcttggttagtctaatgttcttaattatggatgatgatcctttgaagttcatgcacgaagacttgccgttctgaaggcccttacttcctgttccactagtagttctgagatgatggaaaagctaaacgaaatcgtgtttgacatcttggaaaagtctattatacgtggtaatttgcaatatgcttctttaagtgcactcagaaggcatccacttgatctcggtaatcaagcattcctccaccgagctgtggaaggattaaatacaggaacatgacccctgaagcagctttggatcatgtacgatccattaggcctcgagtgcttttggcaccctcgcagtggtcactcaagtagatctaaagttattctttgagtccatatgtggtgagctaaaagtttgcagaaatggcaccatcaagatcgatctggagaccaacaagatcatggacttcatcaagtttgacgtcggcaatgtggtcatggtgaccggcgggaggaacaccgggcgtgtaggagtgatcaagaacagggagaagcacaagggcagcttcgagaccatccacgtgctgcttggagctttttgctatgtctagttttctcctatttgttgtacaggaaaacatagaatggaattcaaatttggtggccacaaaagtgtggagacttgaattcatataaagttagccttaacattagtgcaaacagttgtatcttagtttagatttagagtacacttatgtatgcgttgtttgacaatgcttatttatgatatattgaatggtacttatttatattatattaattataatgttgttc

SEQ ID NO: 49895 - DNA, 2393 bp, Zea Mays
atccctcatctctcctcccgtgacgtcgcgccacatcgtcctcttcctccgcgtgccgctgctaccgtggcccccttgcctgctcgcctccacggccacacgaaggccccctgtgttgctctcggatatgcgctgccatcgccggcgtagccggagctggccgtccacgcaaccctgccacgggagggcgacgcgttgatgctggagctcacaaggtgtcgctgctggagcagcgtacgacgacgaaggcgctgtggcagcacctggtgctagcgctacactactactgaattttgtgatgttgcaatttcatcttttattttgttttttggggtgatgcaaaaaaacaaaactcaaaagtctactaaaggccataaattgagcaatgttgctgcttcaagaaacaaattatcaacttattcccatctaacctttgatgggatttggtttagcattaaggaattctcaaaatcaaaatagcagtttcaagtgccagatgatgcaaggctttcagctagaagtgtagctgttctctgaaatctttgccaaaagttcatgcacgaagacttgccgttctgaaggcccttacttcctgttccactagtagttctgagatgatggaaaagctaaacgaaatcgtgtttgacatcttggaaaaggttggccatccataatttgagtattctttgtacagttacattagtctttaaactacttttctcatcctcactaattatattgtcggcaatatattgtcgacaagaatggttctggatatattgaatgttcaatggtactcctattggataatcctatcagcacgacaagtgcttccatagcttatgatgttgaattttgctgctccatggcagcagcagcagcccctgccagttgaccattctgacgccttctcctagcattatgctttcttgtagcttcatttggaaaaggcagattgctcaaggaatttcatgcttagttgcaccacaccagggtatcatcaatcattcagccccattctactgatgtaaattgtgcaaatcctttttctttgagacttttgagagtggtctgtcgattacttgcaagaaatatgaacctttgtttctgtgcatgggcataaaacaaacagcttctagcctcttttacggtacttgcacttgcaagaaatgtgaactccttttcatttctgtatgtggacataatgccaaagcatccaggatttttcatggttgttgatgtctttacacagttcatctccaccagtatgccctcctcgtactctatataaacacatcaacagcaccgcaattagccacataaacacatctcgcagccacctttttttgttctgttgtaagtatactttcccttaccatctttatttgttagtttaatttgtaattgggaagtattagtggaaagaggatgagacgctatcatctatgtactctgcaaatgcatctgacattatatgggctgcttcatataatttgaattgctccattcttgccgacaatatattgcaaggtacatgtctaggagctatttaaactacgtcgacctcactaattataagcattgaaaaagcaacaattgctacagtgcacttaaacttgcagctcattattatctggctaagatgatgggccaacttagtttatttgatctaaaaattgtgagtcttatgttctgaactcaaacttgtgacaatttattttattttcgcagtctattatacgtggtaatttgcaatatgcttctttaagtgcactcagaaggcatccacttgatctcggtaatcaagcattcctccaccgagctgtggaaggattaaatacaggaacatgacccctgaagcagctttggatcatgtacgatccattaggcctcgagtgcttttggcaccctcgcagtggtcactcaagtagatctaaagttattctttgagtccatatgtggtgagctaaaagtttgcagaaatggcaccatcaagatcgatctggagaccaacaagatcatggacttcatcaagtttgacgtcggcaatgtggtcatggtgaccggcgggaggaacaccgggcgtgtaggagtgatcaagaacagggagaagcacaagggcagcttcgagaccatccacgtgctgcttggagctttttgctatgtctagttttctcctatttgttgtacaggaaaacatagaatggaattcaaatttggtggccacaaaagtgtggagacttgaattcatataaagttagccttaacattagtgcaaacagttgtatcttagtttagatttagagtacacttatgtatgcgttgtttgacaatgcttatttatgatatattgaatggtacttatttatattatattaattataatgttgttc

SEQ ID NO: 49896 - DNA, 2197 bp, Zea Mays
atccctcatctctcctcccgtgacgtcgcgccacatcgtcctcttcctccgcgtgccgctgctaccgtggcccccttgcctgctcgcctccacggccacacgaaggccccctgtgttgctctcggttctcactcctcctctctatttcctgtgttgtcgccccgccccatgatcttcttcctcgcgctagcactggccctatgccccctccttgctcacctccatggcctcgcggaagcggaccttgccgcgagtggttcccagttctcctcacctcctcctctctcctttcaggatatgcgctgccatcgccggcgtagccggagctggccgtccacgcaaccctgccacgggagggcgacgcgttgatgctggagctcacaaggtgtcgctgctggagcagcttcatgcacgaagacttgccgttctgaaggcccttacttcctgttccactagtagttctgagatgatggaaaagctaaacgaaatcgtgtttgacatcttggaaaaggttggccatccataatttgagtattctttgtacagttacattagtctttaaactacttttctcatcctcactaattatattgtcggcaatatattgtcgacaagaatggttctggatatattgaatgttcaatggtactcctattggataatcctatcagcacgacaagtgcttccatagcttatgatgttgaattttgctgctccatggcagcagcagcagcccctgccagttgaccattctgacgccttctcctagcattatgctttcttgtagcttcatttggaaaaggcagattgctcaaggaatttcatgcttagttgcaccacaccagggtatcatcaatcattcagccccattctactgatgtaaattgtgcaaatcctttttctttgagacttttgagagtggtctgtcgattacttgcaagaaatatgaacctttgtttctgtgcatgggcataaaacaaacagcttctagcctcttttacggtacttgcacttgcaagaaatgtgaactccttttcatttctgtatgtggacataatgccaaagcatccaggatttttcatggttgttgatgtctttacacagttcatctccaccagtatgccctcctcgtactctatataaacacatcaacagcaccgcaattagccacataaacacatctcgcagccacctttttttgttctgttgtaagtatactttcccttaccatctttatttgttagtttaatttgtaattgggaagtattagtggaaagaggatgagacgctatcatctatgtactctgcaaatgcatctgacattatatgggctgcttcatataatttgaattgctccattcttgccgacaatatattgcaaggtacatgtctaggagctatttaaactacgtcgacctcactaattataagcattgaaaaagcaacaattgctacagtgcacttaaacttgcagctcattattatctggctaagatgatgggccaacttagtttatttgatctaaaaattgtgagtcttatgttctgaactcaaacttgtgacaatttattttattttcgcagtctattatacgtggtaatttgcaatatgcttctttaagtgcactcagaaggcatccacttgatctcggtaatcaagcattcctccaccgagctgtggaaggattaaatacaggaacatgacccctgaagcagctttggatcatgtacgatccattaggcctcgagtgcttttggcaccctcgcagtgctaaaagtttgcagaaatggcaccatcaagatcgatctggagaccaacaagatcatggacttcatcaagtttgacgtcggcaatgtggtcatggtgaccggcgggaggaacaccgggcgtgtaggagtgatcaagaacagggagaagcacaagggcagcttcgagaccatccacgtgctgcttggagctttttgctatgtctagttttctcctatttgttgtacaggaaaacatagaatggaattcaaatttggtggccacaaaagtgtggagacttgaattcatataaagttagccttaacattagtgcaaacagttgtatcttagtttagatttagagtacacttatgtatgcgttgtttgacaatgcttatttatgatatattgaatggtacttatttatattatattaattataatgttgttc

SEQ ID NO: 49897 - DNA, 942 bp, Zea Mays
ccctcatctctcctcccgtgacgtcgcgccacatcgtcctcttcctccgcgtgccgctgctaccgtggcccccttgcctgctcgcctccacggccacacgaaggccccctgtgttgctctcggatatgcgctgccatcgccggcgtagccggagctggccgtccacgcaaccctgccacgggagggcgacgcgttgatgctggagctcacaaggtgtcgctgctggagcagcttcatgcacgaagacttgccgttctgaaggcccttacttcctgttccactagtagttctgagatgatggaaaagctaaacgaaatcgtgtttgacatcttggaaaagtctattatacgtggtaatttgcaatatgcttctttaagtgcactcagaaggcatccacttgatctcggtaatcaagcattcctccaccgagctgtggaagggaacatgacccctgaagcagctttggatcatgtacgatccattaggcctcgagtgcttttggcaccctcgcagtgctaaaagtttgcagaaatggcaccatcaagatcgatctggagaccaacaagatcatggacttcatcaagtttgacgtcggcaatgtggtcatggtgaccggcgggaggaacaccgggcgtgtaggagtgatcaagaacagggagaagcacaagggcagcttcgagaccatccacgtgctgcttggagctttttgctatgtctagttttctcctatttgttgtacaggaaaacatagaatggaattcaaatttggtggccacaaaagtgtggagacttgaattcatataaagttagccttaacattagtgcaaacagttgtatcttagtttagatttagagtacacttatgtatgcgttgtttgacaatgcttatttatgatatattgaatggtacttatttatattatattaattataatgttgttc

SEQ ID NO: 49898 - DNA, 2244 bp, Zea Mays
ccctcatctctcctcccgtgacgtcgcgccacatcgtcctcttcctccgcgtgccgctgctaccgtggcccccttgcctgctcgcctccacggccacacgaaggccccctgtgttgctctcggatatgcgctgccatcgccggcgtagccggagctggccgtccacgcaaccctgccacgggagggcgacgcgttgatgctggagctcacaaggtgtcgctgctggagcagcttcatgcacgaagacttgccgttctgaaggcccttacttcctgttccactagtagttctgagatgatggaaaagctaaacgaaatcgtgtttgacatcttggaaaaggttggccatccataatttgagtattctttgtacagttacattagtctttaaactacttttctcatcctcactaattatattgtcggcaatatattgtcgacaagaatggttctggatatattgaatgttcaatggtactcctattggataatcctatcagcacgacaagtgcttccatagcttatgatgttgaattttgctgctccatggcagcagcagcagcccctgccagttgaccattctgacgccttctcctagcattatgctttcttgtagcttcatttggaaaaggcagattgctcaaggaatttcatgcttagttgcaccacaccagggtatcatcaatcattcagccccattctactgatgtaaattgtgcaaatcctttttctttgagacttttgagagtggtctgtcgattacttgcaagaaatatgaacctttgtttctgtgcatgggcataaaacaaacagcttctagcctcttttacggtacttgcacttgcaagaaatgtgaactccttttcatttctgtatgtggacataatgccaaagcatccaggatttttcatggttgttgatgtctttacacagttcatctccaccagtatgccctcctcgtactctatataaacacatcaacagcaccgcaattagccacataaacacatctcgcagccacctttttttgttctgttgtaagtatactttcccttaccatctttatttgttagtttaatttgtaattgggaagtattagtggaaagaggatgagacgctatcatctatgtactctgcaaatgcatctgacattatatgggctgcttcatataatttgaattgctccattcttgccgacaatatattgcaaggtacatgtctaggagctatttaaactacgtcgacctcactaattataagcattgaaaaagcaacaattgctacagtgcacttaaacttgcagctcattattatctggctaagatgatgggccaacttagtttatttgatctaaaaattgtgagtcttatgttctgaactcaaacttgtgacaatttattttattttcgcagtctattatacgtggtaatttgcaatatgcttctttaagtgcactcagaaggcatccacttgatctcggtaatcaagcattcctccaccgagctgtggaaggattaaatacaggaacatgacccctgaagcagctttggatcatgtacgatccattaggcctcgagtgcttttggcaccctcgcagtggtatgtatgcaaccttttgtgattgcattataagttattagtacaatactactgcgttaagacactttatgacaccatgtgctgcatcaggttagtaagctgtcatggttctgttttaatacacgcaggtcactcaagtagatctaaagttattctttgagtccatatgtggtgaggttggtcgttctttactccaaacacaatctcccttctgtatagctaaaagtttgcagaaatggcaccatcaagatcgatctggagaccaacaagatcatggacttcatcaagtttgacgtcggcaatgtggtcatggtgaccggcgggaggaacaccgggcgtgtaggagtgatcaagaacagggagaagcacaagggcagcttcgagaccatccacgtgctgcttggagctttttgctatgtctagttttctcctatttgttgtacaggaaaacatagaatggaattcaaatttggtggccacaaaagtgtggagacttgaattcatataaagttagccttaacattagtgcaaacagttgtatcttagtttagatttagagtacacttatgtatgcgttgtttgacaatgcttatttatgatatattgaatggtacttatttatattatattaattataatgttgttc

SEQ ID NO: 49899 - DNA, 1490 bp, Zea Mays
ccctcatctctcctcccgtgacgtcgcgccacatcgtcctcttcctccgcgtgccgctgctaccgtggcccccttgcctgctcgcctccacggccacacgaaggccccctgtgttgctctcggatatgcgctgccatcgccggcgtagccggagctggccgtccacgcaaccctgccacgggagggcgacgcgttgatgctggagctcacaaggtgtcgctgctggagcagcgtacgacgacgaaggcgctgtggcagcacctggtgctagcgctacactactactgaattttgtgatgttgcaatttcatcttttattttgttttttggggtgatgcaaaaaaacaaaactcaaaagtctactaaaggccataaattgagcaatgttgctgcttcaagaaacaaattatcaacttattcccatctaacctttgatgggatttggtttagcattaaggaattctcaaaatcaaaatagcagtttcaagtgccagatgatgcaaggctttcagctagaagtgtagctgttctctgaaatctttgccaaaagttcatgcacgaagacttgccgttctgaaggcccttacttcctgttccactagtagttctgagatgatggaaaagctaaacgaaatcgtgtttgacatcttggaaaagtctattatacgtggtaatttgcaatatgcttctttaagtgcactcagaaggcatccacttgatctcggtaatcaagcattcctccaccgagctgtggaaggattaaatacaggaacatgacccctgaagcagctttggatcatgtacgatccattaggcctcgagtgcttttggcaccctcgcagtggtatgtatgcaaccttttgtgattgcattataagttattagtacaatactactgcgttaagacactttatgacaccatgtgctgcatcaggttagtaagctgtcatggttctgttttaatacacgcaggtcactcaagtagatctaaagttattctttgagtccatatgtggtgaggttggtcgttctttactccaaacacaatctcccttctgtatagctaaaagtttgcagaaatggcaccatcaagatcgatctggagaccaacaagatcatggacttcatcaagtttgacgtcggcaatgtggtcatggtgaccggcgggaggaacaccgggcgtgtaggagtgatcaagaacagggagaagcacaagggcagcttcgagaccatccacgtgctgcttggagctttttgctatgtctagttttctcctatttgttgtacaggaaaacatagaatggaattcaaatttggtggccacaaaagtgtggagacttgaattcatataaagttagccttaacattagtgcaaacagttgtatcttagtttagatttagagtacacttatgtatgcgttgtttgacaatgcttatttatgatatattgaatggtacttatttatattatattaattataatgttgttc

SEQ ID NO: 49900 - DNA, 1175 bp, Zea Mays
ccctcatctctcctcccgtgacgtcgcgccacatcgtcctcttcctccgcgtgccgctgctaccgtggcccccttgcctgctcgcctccacggccacacgaaggccccctgtgttgctctcggttctcactcctcctctctatttcctgtgttgtcgccccgccccatgatcttcttcctcgcgctagcactggccctatgccccctccttgctcacctccatggcctcgcggaagcggaccttgccgcgagtggttcccagttctcctcacctcctcctctctcctttcaggatatgcgctgccatcgccggcgtagccggagctggccgtccacgcaaccctgccacgggagggcgacgcgttgatgctggagctcacaaggtgtcgctgctggagcagcttcatgcacgaagacttgccgttctgaaggcccttacttcctgttccactagtagttctgagatgatggaaaagctaaacgaaatcgtgtttgacatcttggaaaagtctattatacgtggtaatttgcaatatgcttctttaagtgcactcagaaggcatccacttgatctcggtaatcaagcattcctccaccgagctgtggaaggattaaatacaggaacatgacccctgaagcagctttggatcatgtacgatccattaggcctcgagtgcttttggcaccctcgcagtggtatgtcactcaagtagatctaaagttattctttgagtccatatgtggtgagctaaaagtttgcagaaatggcaccatcaagatcgatctggagaccaacaagatcatggacttcatcaagtttgacgtcggcaatgtggtcatggtgaccggcgggaggaacaccgggcgtgtaggagtgatcaagaacagggagaagcacaagggcagcttcgagaccatccacgtgctgcttggagctttttgctatgtctagttttctcctatttgttgtacaggaaaacatagaatggaattcaaatttggtggccacaaaagtgtggagacttgaattcatataaagttagccttaacattagtgcaaacagttgtatcttagtttagatttagagtacacttatgtatgcgttgtttgacaatgcttatttatgatatattgaatggtacttatttatattatattaattataatgttgttc

SEQ ID NO: 49901 - DNA, 3364 bp, Zea Mays
agtcggttaccgtacgtggacgccagagcttttgttccttatcccgtcggccgtcgctatctctctttccccttgatttttcctgccgccgctcagttcctggaagcaaatcccgccgccgaagacttgcttcttcccagccgagccctttccccacccgttcctccatctcactgtgtcggcgctctccactccacacctcgttcctgtgctggccatcttcttcctctgcgtggtggcctacccctgtcggtgcccagtccgagtgccgcgtcgcgccccccgtctcctctgctcgctcagcgcccatctcctacggtgcctggcagccgcttcctctctgctcgccgccgcacgccctggagctccaatcgtcgcgccctcggctccctcttgccgtgcgcgtcgtggcagctatccggccgcggagcagtccacgccatggagctccctacctgaccgcgacctcgccggaaagctctcgcggcgctcctcctctgctggcgctcgccctgccctctgccatggacgccgtcggccttgactccctctggccgcggcatccgtcttactccctgctcgaccctgtttctctcccaagcacctccgatggccttgctcgtctcgcccccaccagaaaaggccatcgggacatcgtgctggtcgcgagtctcctctgtgctccataatcacctggacgagcctcaactcatttacgacctccccctctcagcacgtcagtgcagatgtcatatttggccgcgctctgtgctactctagctcgcgttcattcctaggtttgagtttgtgtaccacttgttcgacaaaatgtgtgaaccagttgtcgacctcgccatggatagccgatgcgccatctatcgctcctcgccgatgtctccctctgccattcctacaacaggtgaggcacctaggatgtttgtgataaaaaaagggtttcagcacattgcacatcaggtacgataattaatcacgtgatgcggaggaccagaaatgagtcgaccacaagatgaggaccagaaatgagtcgaccacaagatgctggaaagcgtgagcttctccgcaagatgaagttgatggattaacctgaagatggacagatgaaacaagtataagaacaaaagatggtcgtcaagcgggcgtcgtctaacaaacactaacgtagtgtttgtcccaggtgaagagcctacagagttttgctacttttgtgcaaaggtggttcccaagcaggaggaagaatcgaaaatagaagtctgttgctaaggatgatgctaagtgctggtgggctcggccttcttataagtctaagtacctcttctatacttcttattaaggatggtcacttaatctagcatatattttaaacatataaatgtttatacattcaaaacttagtgcaattactccgatcatgtacaatgtaaacttgatgtaacttgtaaaatttggtaataagatttccgctgcaaaatgttggtgtatgtgatttgtgtttacttaatcttgcggtcctggttgtgagtggtttatccggggtccttgggacactcggacggatcctgttaagttatttggtgcacatgcatagccgtctgaggtctttgagacaatgacaggtgcatgtgggcccaataacttgggaggttctgccgtagatccggtatcaaatacccaagaattaatataagaatcaacaagaaaaatttctgtaatgtgaatagcaagtgtacctgatgccggctgttgtggcggaaacgtccgaattattccaacttaagtgcccaagtcccgccttagaggcaaggccgcacttaaatcggaataaaccgttagttcctcggatctagtccgataaagccactaacaggatcaagtaccacatactcactcgaagatgaggcacaaagaaaatacaataaagcataaaatcataaattaaagaagtacttaatgttattacatcatcatcggagttttgcaaaagtagtaaccatttttctcgatgcagcggaaattaactaacagtaaagaaagggaggatggggaagcctggcatatcactcctcatgctcctctcccgctgaggtagggtcccactcaactgtccaacccggtggcaaggtggacaaccaagtcactccagcaaccatatccttcagagtacctgtaaaattgtgccacaagcaagggtgagtatactaatactcagctagacttacccggtgtgaggagtctactcctctacctctagaccatgcagctgtttggctgaggggtttggtttgccaaaagcactagctgagtctaaaaacaagttttaacttttcaagttttagtgtaatcctttagactagatgaatacctagctattcatacatggtgtcaaacattatttcaatcaatatcttttgactgtcacctcattccacttcttactcaatgcagtatccataccaataagatgcatcttctttttcggaagcctatctcaaaagaacttccaagttaagcgtgcttggcttggagcaatttgggatgagtgaccgactgggaagttttctcgggtgcgcatgagtgaggacaaagtgcgcacaaaagactcgtgttggtctgtggggatgatatatgatcctagagagctacgaggagtaagtatcgtcggtccagggattggacggggtgttacaagtggtatcagagccgaccctcgaggtttcacgggtgtgtgtgggctagggggttcgggtatatggcgcatggtgcatgtgagcccggagtggtcacatggcatggcatatgacgacactagacatagacgtggctaagaggggaggttcctggattggggttgaccgacgaggacgttggtcttctaacggggtggattgtgatgttgggggccttcgtcctctgaaggtcctcaaaaacataatttaacaatgtcttccaagcatggtttatggacaggtaccttcggactcaggttaaaagcatacacgatgagaagagcatgatcgtgacgaaggttgtcgttgctccgaagctacgcgcaagggagcttcggctcaatcgcagaaaaaggaaccgacttaaaggggaaaaggatatctagtcctcataggtttttctataagtcaatagtaaatgtaaagggcatgactgtaatttctcacaggctgcgtcctgtgcttataaatagatgaacagtaccaccgtactgttcacgctgacttgtacttgctcgtgtgtcacgcttgtacttttatcttctgtcaaaccaaaggtacatttgtaattcaatattgttttatatttttccatgataatataatgaggataaattgac

SEQ ID NO: 49902 - DNA, 3287 bp, Zea Mays
gccagagcttttgttccttatcccgtcggccgtcgctatctctctttccccttgatttttcctgccgccgctcagttcctggaagcaaatcccgccgccgaagacttgcttcttcccagccgagccctttccccacccgttcctccatctcactgtgtcggcgctctccactccacacctcgttcctgtgctggccatcttcttcctctgcgtggtggcctacccctgtcggtgcccagtccgagtgccgcgtcgcgccccccgtctcctctgctcgctcagcgcccatctcctacggtgcctggcagccgcttcctctctgctcgccgccgcacgccctggagctccaatcgtcgcgccctcggctccctcttgccgtgcgcgtcgtggcagctatccggccgcggagcagtccacgccatggagctccctacctgaccgcgacctcgccggaaagctctcgcggcgctcctcctctgctggcgctcgccctgccctctgccatggacgccgtcggccttgactccctctggccgcggcatccgtcttactccctgctcgaccctgtttctctcccaagcacctccgatggccttgctcgtctcgcccccaccagaaaaggccatcgggacatcgtgctggtcgcgagtctcctctgtgctccataatcacctggacgagcctcaactcatttacgacctccccctctcagcacgtcagtgcagatgtcatatttggccgcgctctgtgctactctagctcgcgttcattcctaggtttgagtttgtgtaccacttgttcgacaaaatgtgtgaaccagttgtcgacctcgccatggatagccgatgcgccatctatcgctcctcgccgatgtctccctctgccattcctacaacaggtacgataattaatcacgtgatgcggaggaccagaaatgagtcgaccacaagatgaggaccagaaatgagtcgaccacaagatgctggaaagcgtgagcttctccgcaagatgaagttgatggattaacctgaagatggacagatgaaacaagtataagaacaaaagatggtcgtcaagcgggcgtcgtctaacaaacactaacgtagtgtttgtcccaggtgaagagcctacagagttttgctacttttgtgcaaaggtggttcccaagcaggaggaagaatcgaaaatagaagtctgttgctaaggatgatgctaagtgctggtgggctcggccttcttataagtctaagtacctcttctatacttcttattaaggatggtcacttaatctagcatatattttaaacatataaatgtttatacattcaaaacttagtgcaattactccgatcatgtacaatgtaaacttgatgtaacttgtaaaatttggtaataagatttccgctgcaaaatgttggtgtatgtgatttgtgtttacttaatcttgcggtcctggttgtgagtggtttatccggggtccttgggacactcggacggatcctgttaagttatttggtgcacatgcatagccgtctgaggtctttgagacaatgacaggtgcatgtgggcccaataacttgggaggttctgccgtagatccggtatcaaatacccaagaattaatataagaatcaacaagaaaaatttctgtaatgtgaatagcaagtgtacctgatgccggctgttgtggcggaaacgtccgaattattccaacttaagtgcccaagtcccgccttagaggcaaggccgcacttaaatcggaataaaccgttagttcctcggatctagtccgataaagccactaacaggatcaagtaccacatactcactcgaagatgaggcacaaagaaaatacaataaagcataaaatcataaattaaagaagtacttaatgttattacatcatcatcggagttttgcaaaagtagtaaccatttttctcgatgcagcggaaattaactaacagtaaagaaagggaggatggggaagcctggcatatcactcctcatgctcctctcccgctgaggtagggtcccactcaactgtccaacccggtggcaaggtggacaaccaagtcactccagcaaccatatccttcagagtacctgtaaaattgtgccacaagcaagggtgagtatactaatactcagctagacttacccggtgtgaggagtctactcctctacctctagaccatgcagctgtttggctgaggggtttggtttgccaaaagcactagctgagtctaaaaacaagttttaacttttcaagttttagtgtaatcctttagactagatgaatacctagctattcatacatggtgtcaaacattatttcaatcaatatcttttgactgtcacctcattccacttcttactcaatgcagtatccataccaataagatgcatcttctttttcggaagcctatctcaaaagaacttccaagttaagcgtgcttggcttggagcaatttgggatgagtgaccgactgggaagttttctcgggtgcgcatgagtgaggacaaagtgcgcacaaaagactcgtgttggtctgtggggatgatatatgatcctagagagctacgaggagtaagtatcgtcggtccagggattggacggggtgttacaagtggtatcagagccgaccctcgaggtttcacgggtgtgtgtgggctagggggttcgggtatatggcgcatggtgcatgtgagcccggagtggtcacatggcatggcatatgacgacactagacatagacgtggctaagaggggaggttcctggattggggttgaccgacgaggacgttggtcttctaacggggtggattgtgatgttgggggccttcgtcctctgaaggtcctcaaaaacataatttaacaatgtcttccaagcatggtttatggacaggtaccttcggactcaggttaaaagcatacacgatgagaagagcatgatcgtgacgaaggttgtcgttgctccgaagctacgcgcaagggagcttcggctcaatcgcagaaaaaggaaccgacttaaaggggaaaaggatatctagtcctcataggtttttctataagtcaatagtaaatgtaaagggcatgactgtaatttctcacaggctgcgtcctgtgcttataaatagatgaacagtaccaccgtactgttcacgctgacttgtacttgctcgtgtgtcacgcttgtacttttatcttctgtcaaaccaaaggtacatttgtaattcaatattgttttatatttttccatgataatataatgaggataaattgac

SEQ ID NO: 49903 - DNA, 4347 bp, Zea Mays
gccagagcttttgttccttatcccgtcggccgtcgctatctctctttccccttgatttttcctgccgccgctcagttcctggaagcaaatcccgccgccgaagacttgcttcttcccagccgagccctttccccacccgttcctccatctcactgtgtcggcgctctccactccacacctcgttcctgtgctggccatcttcttcctctgcgtggtggcctacccctgtcggtgcccagtccgagtgccgcgtcgcgccccccgtctcctctgctcgctcagcgcccatctcctacggtgcctggcagccgcttcctctctgctcgccgccgcacgccctggagctccaatcgtcgcgccctcggctccctcttgccgtgcgcgtcgtggcagctatccggccgcggagcagtccacgccatggagctccctacctgaccgcgacctcgccggaaagctctcgcggcgctcctcctctgctggcgctcgccctgccctctgccatggacgccgtcggccttgactccctctggccgcggcatccgtcttactccctgctcgaccctgtttctctcccaagcacctccgatggccttgctcgtctcgcccccaccagaaaaggccatcgggacatcgtgctggtcgcgagtctcctctgtgctccataatcacctggacgagcctcaactcatttacgacctccccctctcagcacgtcagtgcagatgtcatatttggccgcgctctgtgctactctagctcgcgttcattcctaggtttgagtttgtgtaccacttgttcgacaaaatgtgtgaaccagttgtcgacctcgccatggatagccgatgcgccatctatcgctcctcgccgatgtctccctctgccattcctacaacaggtacgataattaatcacgtgatgcggaggaccagaaatgagtcgaccacaagatgaggaccagaaatgagtcgaccacaagatgctggaaagcgtgagcttctccgcaagatgaagttgatggattaacctgaagatggacagatgaaacaagtataagaacaaaagatggtcgtcaagcgggcgtcgtctaacaaacactaacgtagtgtttgtcccaggcaagccccggtgcatgcaaccccttccttgtgtttttaaattatttgtacacactttaagtctagtgaatgttcattaggtttaagtgagttgcttggaaaccttttgatgcattggctaccttgaaatccattccttttatagatacttcttgtgaagtatcaaaatataatttacaaaaaaatgcttagtcctacttataagcagatagagtttgtcctttgcacttatgcctagctaaggtttatcctgaggaaggatggcctctacctgcaagattattttcattgggagcatggtcggattttactgcaaagttccctataatgctcttttcatccttaggaacacaaaacaatcataagggtggaagtacttaactcgagacttgggttaggaacaggtgatgctctacccaggttaattaagtattggatgcgtatgtaggtctgtatgatcaaggactatcttaactggtcacatgccctggatatggggcagggtaagcttgaactcggctattccatatgtgaaaagacaaccgcgcactgggcgtgggagatggtgggagtagctagagactggatgggggagtactgtgctcccgggtagcgcggaccggttcacgttgtggaggatctgtgggaacggttgacatatgcaagggttaagtgctacatatgtcgtgtggttagagatcctcagctgagtaaatcgattcggatcgccgttatatccccggacagtggagacttggtcactaacctgcaacctaagtcaggatgtaaacattatgaataaaaatgatgttgtactgatgagatggtgaaattagactaggtgcaaccagagtctattaatatttaatctggcgttaaaatattgaaagtaaagactcaatttagtaagctttttctgcaaaagtacctaagttgattcttgctaagagcctctccttgattcctaaatccagcatatccttgagagtctttttccttagtcgggtaagacttgcgaaagtacacttcatactcaaggctttgtcccatgttgttttaggtgaagagcctacagagttttgctacttttgtgcaaaggtggttcccaagcaggaggaagaatcgaaaatagaagtctgttgctaaggatgatgctaagtgctggtgggctcggccttcttataagtctaagtacctcttctatacttcttattaaggatggtcacttaatctagcatatattttaaacatataaatgtttatacattcaaaacttagtgcaattactccgatcatgtacaatgtaaacttgatgtaacttgtaaaatttggtaataagatttccgctgcaaaatgttggtgtatgtgatttgtgtttacttaatcttgcggtcctggttgtgagtggtttatccggggtccttgggacactcggacggatcctgttaagttatttggtgcacatgcatagccgtctgaggtctttgagacaatgacaggtgcatgtgggcccaataacttgggaggttctgccgtagatccggtatcaaatacccaagaattaatataagaatcaacaagaaaaatttctgtaatgtgaatagcaagtgtacctgatgccggctgttgtggcggaaacgtccgaattattccaacttaagtgcccaagtcccgccttagaggcaaggccgcacttaaatcggaataaaccgttagttcctcggatctagtccgataaagccactaacaggatcaagtaccacatactcactcgaagatgaggcacaaagaaaatacaataaagcataaaatcataaattaaagaagtacttaatgttattacatcatcatcggagttttgcaaaagtagtaaccatttttctcgatgcagcggaaattaactaacagtaaagaaagggaggatggggaagcctggcatatcactcctcatgctcctctcccgctgaggtagggtcccactcaactgtccaacccggtggcaaggtggacaaccaagtcactccagcaaccatatccttcagagtacctgtaaaattgtgccacaagcaagggtgagtatactaatactcagctagacttacccggtgtgaggagtctactcctctacctctagaccatgcagctgtttggctgaggggtttggtttgccaaaagcactagctgagtctaaaaacaagttttaacttttcaagttttagtgtaatcctttagactagatgaatacctagctattcatacatggtgtcaaacattatttcaatcaatatcttttgactgtcacctcattccacttcttactcaatgcagtatccataccaataagatgcatcttctttttcggaagcctatctcaaaagaacttccaagttaagcgtgcttggcttggagcaatttgggatgagtgaccgactgggaagttttctcgggtgcgcatgagtgaggacaaagtgcgcacaaaagactcgtgttggtctgtggggatgatatatgatcctagagagctacgaggagtaagtatcgtcggtccagggattggacggggtgttacaagtggtatcagagccgaccctcgaggtttcacgggtgtgtgtgggctagggggttcgggtatatggcgcatggtgcatgtgagcccggagtggtcacatggcatggcatatgacgacactagacatagacgtggctaagaggggaggttcctggattggggttgaccgacgaggacgttggtcttctaacggggtggattgtgatgttgggggccttcgtcctctgaaggtcctcaaaaacataatttaacaatgtcttccaagcatggtttatggacaggtaccttcggactcaggttaaaagcatacacgatgagaagagcatgatcgtgacgaaggttgtcgttgctccgaagctacgcgcaagggagcttcggctcaatcgcagaaaaaggaaccgacttaaaggggaaaaggatatctagtcctcataggtttttctataagtcaatagtaaatgtaaagggcatgactgtaatttctcacaggctgcgtcctgtgcttataaatagatgaacagtaccaccgtactgttcacgctgacttgtacttgctcgtgtgtcacgcttgtacttttatcttctgtcaaaccaaaggtacatttgtaattcaatattgttttatatttttccatgataatataatgaggataaattgac

SEQ ID NO: 49904 - DNA, 4396 bp, Zea Mays
cttttgttccttatcccgtcggccgtcgctatctctctttccccttgatttttcctgccgccgctcagttcctggaagcaaatcccgccgccgaagacttgcttcttcccagccgagccctttccccacccgttcctccatctcactgtgtcggcgctctccactccacacctcgttcctgtgctggccatcttcttcctctgcgtggtggcctacccctgtcggtgcccagtccgagtgccgcgtcgcgccccccgtctcctctgctcgctcagcgcccatctcctacggtgcctggcagccgcttcctctctgctcgccgccgcacgccctggagctccaatcgtcgcgccctcggctccctcttgccgtgcgcgtcgtggcagctatccggccgcggagcagtccacgccatggagctccctacctgaccgcgacctcgccggaaagctctcgcggcgctcctcctctgctggcgctcgccctgccctctgccatggacgccgtcggccttgactccctctggccgcggcatccgtcttactccctgctcgaccctgtttctctcccaagcacctccgatggccttgctcgtctcgcccccaccagaaaaggccatcgggacatcgtgctggtcgcgagtctcctctgtgctccataatcacctggacgagcctcaactcatttacgacctccccctctcagcacgtcagtgcagatgtcatatttggccgcgctctgtgctactctagctcgcgttcattcctaggtttgagtttgtgtaccacttgttcgacaaaatgtgtgaaccagttgtcgacctcgccatggatagccgatgcgccatctatcgctcctcgccgatgtctccctctgccattcctacaacaggtgaggcacctaggatgtttgtgataaaaaaagggtttcagcacattgcacatcaggtacgataattaatcacgtgatgcggaggaccagaaatgagtcgaccacaagatgaggaccagaaatgagtcgaccacaagatgctggaaagcgtgagcttctccgcaagatgaagttgatggattaacctgaagatggacagatgaaacaagtataagaacaaaagatggtcgtcaagcgggcgtcgtctaacaaacactaacgtagtgtttgtcccaggcaagccccggtgcatgcaaccccttccttgtgtttttaaattatttgtacacactttaagtctagtgaatgttcattaggtttaagtgagttgcttggaaaccttttgatgcattggctaccttgaaatccattccttttatagatacttcttgtgaagtatcaaaatataatttacaaaaaaatgcttagtcctacttataagcagatagagtttgtcctttgcacttatgcctagctaaggtttatcctgaggaaggatggcctctacctgcaagattattttcattgggagcatggtcggattttactgcaaagttccctataatgctcttttcatccttaggaacacaaaacaatcataagggtggaagtacttaactcgagacttgggttaggaacaggtgatgctctacccaggttaattaagtattggatgcgtatgtaggtctgtatgatcaaggactatcttaactggtcacatgccctggatatggggcagggtaagcttgaactcggctattccatatgtgaaaagacaaccgcgcactgggcgtgggagatggtgggagtagctagagactggatgggggagtactgtgctcccgggtagcgcggaccggttcacgttgtggaggatctgtgggaacggttgacatatgcaagggttaagtgctacatatgtcgtgtggttagagatcctcagctgagtaaatcgattcggatcgccgttatatccccggacagtggagacttggtcactaacctgcaacctaagtcaggatgtaaacattatgaataaaaatgatgttgtactgatgagatggtgaaattagactaggtgcaaccagagtctattaatatttaatctggcgttaaaatattgaaagtaaagactcaatttagtaagctttttctgcaaaagtacctaagttgattcttgctaagagcctctccttgattcctaaatccagcatatccttgagagtctttttccttagtcgggtaagacttgcgaaagtacacttcatactcaaggctttgtcccatgttgttttaggtgaagagcctacagagttttgctacttttgtgcaaaggtggttcccaagcaggaggaagaatcgaaaatagaagtctgttgctaaggatgatgctaagtgctggtgggctcggccttcttataagtctaagtacctcttctatacttcttattaaggatggtcacttaatctagcatatattttaaacatataaatgtttatacattcaaaacttagtgcaattactccgatcatgtacaatgtaaacttgatgtaacttgtaaaatttggtaataagatttccgctgcaaaatgttggtgtatgtgatttgtgtttacttaatcttgcggtcctggttgtgagtggtttatccggggtccttgggacactcggacggatcctgttaagttatttggtgcacatgcatagccgtctgaggtctttgagacaatgacaggtgcatgtgggcccaataacttgggaggttctgccgtagatccggtatcaaatacccaagaattaatataagaatcaacaagaaaaatttctgtaatgtgaatagcaagtgtacctgatgccggctgttgtggcggaaacgtccgaattattccaacttaagtgcccaagtcccgccttagaggcaaggccgcacttaaatcggaataaaccgttagttcctcggatctagtccgataaagccactaacaggatcaagtaccacatactcactcgaagatgaggcacaaagaaaatacaataaagcataaaatcataaattaaagaagtacttaatgttattacatcatcatcggagttttgcaaaagtagtaaccatttttctcgatgcagcggaaattaactaacagtaaagaaagggaggatggggaagcctggcatatcactcctcatgctcctctcccgctgaggtagggtcccactcaactgtccaacccggtggcaaggtggacaaccaagtcactccagcaaccatatccttcagagtacctgtaaaattgtgccacaagcaagggtgagtatactaatactcagctagacttacccggtgtgaggagtctactcctctacctctagaccatgcagctgtttggctgaggggtttggtttgccaaaagcactagctgagtctaaaaacaagttttaacttttcaagttttagtgtaatcctttagactagatgaatacctagctattcatacatggtgtcaaacattatttcaatcaatatcttttgactgtcacctcattccacttcttactcaatgcagtatccataccaataagatgcatcttctttttcggaagcctatctcaaaagaacttccaagttaagcgtgcttggcttggagcaatttgggatgagtgaccgactgggaagttttctcgggtgcgcatgagtgaggacaaagtgcgcacaaaagactcgtgttggtctgtggggatgatatatgatcctagagagctacgaggagtaagtatcgtcggtccagggattggacggggtgttacaagtggtatcagagccgaccctcgaggtttcacgggtgtgtgtgggctagggggttcgggtatatggcgcatggtgcatgtgagcccggagtggtcacatggcatggcatatgacgacactagacatagacgtggctaagaggggaggttcctggattggggttgaccgacgaggacgttggtcttctaacggggtggattgtgatgttgggggccttcgtcctctgaaggtcctcaaaaacataatttaacaatgtcttccaagcatggtttatggacaggtaccttcggactcaggttaaaagcatacacgatgagaagagcatgatcgtgacgaaggttgtcgttgctccgaagctacgcgcaagggagcttcggctcaatcgcagaaaaaggaaccgacttaaaggggaaaaggatatctagtcctcataggtttttctataagtcaatagtaaatgtaaagggcatgactgtaatttctcacaggctgcgtcctgtgcttataaatagatgaacagtaccaccgtactgttcacgctgacttgtacttgctcgtgtgtcacgcttgtacttttatcttctgtcaaaccaaaggtacatttgtaattcaatattgttttatatttttccatgataatataatgaggataaattgac

SEQ ID NO: 49905 - DNA, 1548 bp, Zea Mays
gaacgccgccttgacagacggtgaacacccccatggacagggccaacatcgtctgacccaactgtagttcattcaagacggttttgagcaccttgaagaagaatttaaagtggaagttggaaggggagcctgttcctccatctgaaacttctccaactgaggttatcactgaaggtcatccggaaggtgccccatttggatttgctgctaattataatatcctggtagaagaacccaactctcctcctcaccaaggcaagccccggtgcatttgccccttccttgtatttttaaaagatttttatacactttaaatctagtgaaatgtgcattaagtttataggagttgcttggaaactattggatgcattgactaccttgatatccattcctgttataggtacttctttggaagtatcaaatattgtttaccaaaatgcttagacctgcttagatcttgtggatagaggttgtcttttgcaataatgcctagctcaggggttatcctgaggaaggatgacttctacctgcaagaatattttcattgggagcatggtgggatcttactgcaaagttccctataatgctcttttcatcctaaggaacacaaaacaatcctaaggatggaagtacttaaatcgtgacttgggctaggaacaggtgatcctccacccaggttaattaaggattggatgcgtatgtaggcttgtatgctatcttaactggccacatgccctggatatgggacagggtaagcttgaacccggctattccatacatgaaaagacaattgcgcactcggagtggagagatggcgagagtggcacgtaccctcctggcaaaggaccgcctaaaaggggtggtgtgctctcgggtggcgcggacctgttcatgcagtggaggatccgtgggaatggtagacatatgcaagagtcacgagaaacatatgtcgtgtggttagagatcctcagctgagtaaatcgattcagatcgccattatatccccagatagtggagacttgatctccgacctacaacctaagtcaggatgtaaacattatgagtaaaaatgatgttgtattgatgagatggtgaaattagactagatgcaaccagattctattaatatttaatctggcgttaaagtattgaaagtaaggactcactttagtaagctatttctgcaaaagtatctaagttgattcttgctaaagccttttccttgattcctatttaaccagcatatccttgagagtcattttccttagtcgggtaagacttgcgaaagtatactccgtactcagggttttcgaacccatgttgttgtacgtgatgaggagtactctaagtgttcctgtggctagagggcgtttccagttctggaggaggatttgttaggcttgtgtataagctttggagggttcctaccttcctgctatggtaataagatatgcactttaagtatatcaggacttgtaataaatgtaactcttcctatgtaataaccttcagttttagaaatgaaaagaatgttttgtaaagtcttcc

SEQ ID NO: 49906 - DNA, 2702 bp, Zea Mays
gttgcccagcaggcctatatgagtctccacgcaccactatcttcgccatacctcgtgccaccgcctcgctgcaaccaccgagataccgggcgaccgcagagggccatacgacgagcgccgcgagaggaacagcgagacactgtcgtctacaagtgagaaggaccaccctctctgcgcggtgtgtgcattgggtaatccccggagtgccctgagcgtggacgtcaccgattgtggtggaaagcgggaccgggtcgggtggaattcctcgacggagttgtctcagcgccaagctgccccttacgccaaccagatccttgcatccccctccaccggtatgcttatccatggtggaaagaaaaagtgattgactcagacttgaaaagaaaagatggtctttgcccattggcacctgaggctaaatgcatacagcttgtttgaggtgagagtatctggtgatggaaattgtcagctcaaggaatgtaactccttatatgaaggttacgttccaatgaaatataaacattattgcaagaaaatgaagaagtatggtgaatggggtgaccatgtcacgctacaagcagctgctgacaagattaattcactttttatgctatgtttctaacatcattttctctactgaagtttcatgcagcctatgtttctttcgtcatttctttttctgcatcgttgaaactgatcgacggtagtgcgtctttctgatggtcagagacttaggatcagttctccaagtactcctgcacttggaaccatcaacaaagagtcaaagagtaaagatgttattccacgatggcatgtttcatacattatttatctttacgttatgttttgttgtagatttttaattgttattttctattttagtattgcattgtatggttgtttccttgaaaccactttcacactcatctctatagcaatgaacagacactttgttatatcttttaagtatgtaaacatccaatatgagtgatgctagcaagaatatagaataacaattagtgtttttacatatctatggattttatcatattgattccgtagcaatgcacggggcatatacctagtctaatattaatatagtatcatgatcttagggttatctttggcctaaaagatgatttataataaagtaatgacttagattaaagttgagttaactatttataaaatattctctcatatggtgtaccctaatcaattcataatatagtttaatatttaaatcacgtagatcttccataaaccataactttataaccgtaactccgaatttagtgattctcattcccacgatctcgtagcatcgcgtagatcattattattcagtttgtacttatgtttgatgtgatgttacttttgcctataccatgtttgtctgtattgctacgactagcagtgaggtcacgagaatctgaggatcatcctggtacatggaatctcaagtcccaggcaagttgtgcccttgaccacttctatttacccaataatgttctttattatcacttattcatgcataggcttaattttgatgggacccaataggtcacgctagtttggatatcttgttaccttgtttacccctgaactatttgggtacttttgatattgctttatatgattttgggtttaatattacattatgtccatgttccaattattcttttattttatttataattgatgtcaagatcattatttttaattggaacatggagcttaacttgagaaacacgtgccaccacaagggtgaaatgggacacccttggctgactaattaggaaagctagtgcaagactaccttacctgaaaggggcaagggcagtaggggagtaggcttgtagggaggttgtctatgatggcggtcagatgagggattcctacattgttcttcttagaaactgtagcgggttttcggaagctagtggaactttgtaaaggccttgtagtggatccctagccattcacctcggaagtgtctaagggccttgcaaaccgtggtgacatgggatacaggacttgtgggtacagggtacaacctctgcagagtgtaaaactggtatactagccgtgctcacggtcatgagcaggtcaagactctcgcatgattaaattatggaactaaattcaatttttcatttgcattgcatgggattcattattaattttgttctattattattatggtttggtatttacttacatttagtaattgctaataaaattttgaccaactttaaaagcaatgctcagctttaaccattctctttggtaagccttacacttcacatgagctcccacctttggcgagttcatgcacattattccccacaacttgttgagctatgaacgtatgtgagctcacccttgctgtctcacacccccccacaggtcaagaacaggtaccgcaggatgaggtgcatgaagtgttgggggccttcttcttcgccgaaggtcctccaagcaaaaacaccttcggtagggtgatatgcaagcagacacaacatgaaggtataagccgaagctacaattcagggagcttcggcatgacgacgtgccttaagacaaagggcagcaccgacttaaagattaaaagaccatttagtccatgataacttgtgtcatggtttgtgattagttatcaaggacacaaatgtaattttgttcgggctgcatcccatgcc

SEQ ID NO: 49907 - DNA, 1644 bp, Zea Mays
agacttgcgcgcagtctttcttgtgcgcgacggcatatctccatgaggggaaaatcttattagcatagtttttagcatgatgtatgtgtaattacagaatcaaccttagttgattcacaccttctatacattgcactctactatctagtcttttaaagtaagtacttctgaagatggttagataagaaggaaataaattttctagataagtctttgaaaattctttttgaaaatgcctcataatatatgtagagatgggcttcgctccgataccagctgtgacgaaacctcccaagtcattaggcccacctacagttgtccttgttcaacggaccttagacaaccctacaggtgcacccgatcacttgacaagttcggtatctgaactccttacctttcccaagagcgtttcacccgtcacgcagacattacaatacatcggagatacagaaatgcggaagcagttacaataacttactttattgaaaagtaagacagagttatatagttacagaccagaacaaaatataagagtgcagagtattattattacataacatgggaggcaaaaacccctcccaaataaacagtaaaagttttcttaacagaggacctttcctcccgtagctttagtcttgattctcttcttttggtaccaccttggaacagaagcaataaaagtttgctgcttcttcacctaaaacaacatgggacaaagccctgagtacgaagtgtactttcgcaagacttacccgtcaaagtaaaagactctcaaggatatgctggctttaagggagtcaaggtaaggcttatcaataatcaatgactctgtttgcagaaatgcttactaatagtggatccttaaaatccagttttatttgtcaggttaagtaaaattacctgcagctagggttctttctaccctaattcaatcacttgacctatactagccaatttcttatcaacccttaatcttcactagattgctacgtgtagggtagtgaccaagtcttcatatccgtgaagttacggcgatccgaatcgattatactcagctgaggatctccaatcgcacgacatatgtagcacttaacccttgcatatgtcaactcgccaccggggttcttaagaccagatcaggttcacgccaaccgagagcacagatacaccaccgtccagcatcttgccacggagggtacacgctactctcgccatctctccactccattgtgtgttatcttattctggtattagtctgcccgaggcaaagcttacccatgatgaggcatgtgaccagttaaagggtcctcgatcagcaagcctacatcgagacggtccttaatcgactgagacggagacactacaccgagactctcttctcgtgcaagtcacccacctggtctcagcttaatcatttcaaacccaaagtttggtacctggcagaggtacatcttttccgatgttgaacccatcatggccatgatggatccaccatcaagttttgtttttgaaaaacatcccacccactttgcaacatcatcttttgtgaaaacaaaacattttgtttttctaaagcaaagctaagcataagaaaaaccttttgtaaaacagggacttagggagaagtaatcaaatccaaggaag

SEQ ID NO: 49908 - DNA, 452 bp, Zea Mays
ctaaattacagtgagtttttgaagaatgggaatttggttctaatgaggttcatggtttacctatgtagattcagaagtgtatctagctgaaaagatagacagatacctgggaaagaactggaagagctttaccagtaggaattgtttgattgttctatagttttcatctatcatctgggctgggccccttatcatcatatctattgttagtgtggttggtaaaaaatatggattaacatgatcagggataaccaaatgtgttacttttcagcctataaccctagattgtttcctatggtaagtttgttaaaacccagttgtttgtttcaatatatttggaattgtgcctttaacctagagtgaaatttcctctacttatttcttttgttgaagtgacatgctctgaactgctcttggcttcaggtatgcttatccatggtggaaagaaaaag

SEQ ID NO: 49909 - DNA, 1363 bp, Zea Mays
cttcgccttggcagaaaacaataattccagagtgatgcgttagcagttaccagattgcgtgaacagtaaaggagtattgttcatctatttataggcacaggacgcagcctgtaagaaattataatcatgccccttacagaagattacaattatgactcagacccttatgggactaaaaagtcattccatctttatgtcggttcaatccttcgtctttggatacgttatagtatcgaagcttcatgagcggtagcttcggtatcacgtctaaacagatttgtcgaaggtgtttgtttctgcaggaccttcggcgacgaagcatggtcccaacaagcactgtgtgatgatgtccatgttatgtaactgctgtgtacgtgaattgctgatcctggcacgtacatggttcgcattcggtttgccttctaaaaaccgggtgtgacacatatagacaggaatatcacaaacctaaatagtgctacgcgatagcgaattaaacacctagcggcgaggcgttgtagaattttatacggaaacactagttactgatatacgactatgcccaattatcacacttttctagcgtgatcgcatctacttcaaaaatcaagtgataataaactaaacacaagtcctatatcaaaacatgcatcgaggcaccattcacatcacctaccaattgacgatcattatacaatgtgattaattcaccattgaacgcaagtaatcacaagcatcagatcaattcgattacactagacatatgtttccattttgtaaattaagatatataagatacatgtcgacgatgctaaccacaatcgaccataatcatacttaaaactaacttaactagttttctaaactattttccatattcatttgtatagcacattaattgattacaacatttaccgatcataaacatagaccgattatactaattattgatatagaatattattgatatagaatattgactccctcaaataattaaaataggaataaatacattgcaaattcctgctagctagctgattaaaatattaaacttatctgtctcgtcattaactagatcatacatcgcatccatgtctacctctatattttgcataattatgcatctaaaatttaaacctcaatctctgactcaactacttcattattctaaaaacaattatattgtcacgtaacagcacacggacacaacaacggagctagccataattactaagcgtacctatactaaataaaaaaaatcatcgcaacctacatatctatcaatctattcattaaaacaaaataatagtagtagcaaatcagctcatccaaaattaaattcgacgcgaactctgcaagaaccacg

SEQ ID NO: 49910 - DNA, 468 bp, Zea Mays
atgggcgcgcgccggaagctcgacggcggccatgagaacgagcagaggaactccggcatccatggtaaggagggtttcaccatggccgagcagacagggagtgccgtgagcagagaagtttcgcgcgctcggctggacgcaggagaacacgcgcgcagggacgagctcggctgggctagagcagggaagaccgcggctggggaaaggaggagcagggaggtcgcggccagagagatgggcgccatgggcgagttgcacagccggcgagctggaactgagcgccgtggaggagcaggaggtgggacagcgctagggagggagatggacttggcaagcaggaagccaagcgctggcgagttggaggacgggagggcgctcggccatggggagcaagatggagggagctcggtgggctggggatggacaccagagagatgagcgagcagagagataagcacgagagacaga

SEQ ID NO: 49911 - DNA, 996 bp, Zea Mays
cttaagaaagttttgttttctgctgcacaaaaattgacaacgtcgtcagccagggtgtcgagctcccaggcgcttgctcctggtgttcccagctcgtggctgcctcctctttgcatcgcagttctcccagccgtcgtctatctcacgcaagcatgaaaccgttcagccgtcaccctcctcgccctgagctccacccacctcggtgaaggccaccgtccccttcttcactgtgcactcggcatcagcttcctggtgcacaccgacacaacgctctggtcacgcgccctccatcgcacgctcggacacttgcccctgttcatcacctcgggactttgccgtcacccgtacttcgctggttgtcaactttgctggctgtgttcaacctccagccacgtcaccatcgtgcccttcatccgttccaagaacacctagaagaagtgatgtttgaagaaggagttcacttcagtgcctgttgatccagtggtggagtttcatctaactacttaccagagtagaataattttgggattttctcctgcaataaggcaagccccggtgcatttgccaccttccttatgtttacaaaattttatcacttatatgctgcattaggtgataggagttgattgattaaacaattgatgcattgccatccttgaaagattgattaccataccttgtcacctgttttataaaagctagagatgcttagtcatgctaatagactaagaaaaatgtttttcatctatgactcatgtttttacaaaaagaaaatgggcttgggataatgaaggcatcaagacgttgataaattcattatccaggcatggcccctctgtcaggcgccaaaattttgaaatagtttaaaatgggaccagacgctgagcaggaaaggtcgtccgtctgtgtcgattaaggaccgtaccgattgttggcctgatgatctaggaccttttaactggccacatacctcgtcatgggtaagcctgaacccgg

SEQ ID NO: 49912 - DNA, 670 bp, Zea Mays
ggactttgccgtcacccgtacttcgctggttgtcaactttgctggctgtgttcaacctccagccacgtcaccatcgtgcccttcatccgttccaaggaacacctagaagaagtgatgtttgaagaaggagttcacttcagtgcctgttgatccagtggtggagtttcatctaactacttaccagagtagaataattttgggattttctcctgcaataaggcaagccccggtgcatttgccaccttccttatgtttacaaaattttatcacttatatgctgcattaggtgataggagttgattgattaaacaattgatgcattgccatccttgaaagattgattaccataccttgtcacctgttttataaaagctagagatgcttagtcatgctaatagactaagaaaaatgtttttcatctatgactcatgtttttacaaaaagaaaatgggcttgggataatgaaggcatcaagacgttgataaattcattatccaggcatggcccctctgtcaggcgccaaaattttgaaatagtttaaaatgggaccagacgctgagcaggaaaggtcgtccgtctgtgtcgattaaggaccgtaccgattgttggcctgatgatctaggaccttttaactggccacatacctcgtcatgggtaagcctgaacccgg

SEQ ID NO: 49913 - DNA, 1696 bp, Zea Mays
gttttatcccttgttgtttttgtaggagaagttttattcccttatctttaggttagttacttcatgtggagaacttgaagcttagaaggtttttatatatcttttatggaaaggcttcacccttccaattattgtgataagttatgcacttcgagtactatcaggacttgtaataaatacatctctttctaccatgtaaaacttgagttctggaatgtaaagtgtactttgtagaagtcttccgctctatctccaatgtgtgtgtatcaaatgtgattactgtaatatacctgttatgtgggagatccttgggacgatgagttccagttggcgaactcgatagccttgttaagttatccggtacacgtgcacagccatctgaggccattaaggcaaggattggtgcatgtgggcctgataacttgggagggctgtcacagcgtggtatcggagcgatcccccattatcatggatattaaagtaatcctttgatatacttcaaaaggattttgagtccaaactattttggaaaaacttaagaatatgatcaaatcctgatagtcaaagtgcaaatagtatatagttaagttaagaactataaggtggcttagtttaagatgctaatcactaacccacaacctgggaagggtaatgcatacatgtgtaatgttatttttagtgtcattcagttttgaatggatcaacgctcaggtaaggtgagatgcgagagcatgaccgaaaaaacgtcggtctaggggagtgcttaattgtggcgcttgattatatacatcttccacatatgtatatatgaaggctgcgatgtggagtaattacttttccgggatttagtaccccatggatgtgtatggctatacagacatgggaatactaaaaagtgtaatgtactcgcaacgacgcacctacgcgcaggtaaggaagtaagttaccacaatgggctgccctgtagttaaaagtgtggcagcggcgcctatgcgtggctcggcgcttaatgaggagctggcctccatatagtaatatatggagtataaactatgaccaaatgagtgtttgcatcatggttttgggctgtaatggaattttttttgcaggtacactgactaaactctaggaaattacgactagttaactccggagtgagtaggtatgccaccgccatagagcgtgcaagccactatatgctggcaagattgtgaggacgaataggacgagcatgcatcatgacatataactttaagttaaaccccctatgtagtagctttagtacgtgtttcgtctaccttgttcatgttgtctgtctttgcctttctatgctacctttacttgtttttgaagactagaagccaagtttagttggtgggcagaataccttgcgctgcagctagaaggacgttaagttctcgggttgagttctgggaggtatttcgggcacgccatgttccagaagcccctacgtaaataaagttcaaagcgtttttggatctaaagcaaggtgaagaagcgagtgtaatggactatttgagaggtttactcgcctatcctagtatgttttggattatgtggatgccagtgaaaaaaaaagtaatacatcctacgtgatcttaatatgaaactttagctcctgatggcaattagtttggttgaaggatataaggagatggtcagtgaggctattcta

SEQ ID NO: 49914 - DNA, 4943 bp, Zea Mays
tggctagttaaaaggtcctagatcatcaggccaacaatcggtacggtccttaatcgacacagacgggcgacctttcctgctcagcgtctggtcccattttaaactatttcaaaattttggcgcctgacagaggggccatgcctggataatgaatttatcaacgtcttgatgccttcattatcccaagcccattttctttttgtaaaaacatgagtcatagatgaaaaacatttttcttagtctatcagcatgactaagcatctctagcttttataaaacaggtgacaaggtatggtaatcaatctttcaaggatggcaatgcatcaattgtttaatcaatcaactcctatcacctaatgcagcatataagtgataaaattttgtaaacacaaggaaggtggcaaatgcaccggggcttgccttattgcaggagaaaatcccaaaattattctactctggtaagtagttagatgaaactccaccactagatcaacaggcactgaagtgaactccttcttcaaacatcacttcttctaggtgttctacatgaaatgatatgaatatgaatgcttgcttatgtcaaagagaatgcaactcgtaaaagagacaacatagattactactagactaaatctataatccaacatcttaggctacaattaccagggagctacttaaccctagacctcacctatcactccaaaacttgttaagccacctcatcacttcattaagacactaggtgcccaagtactcaaggttaaaatcctttttctattatgagcaacaattagtttgctaagcaaaccatgtccaaacaacttcaaactttacccaggagctaattgttcaagataaacttacacaaaatttcccgcaatttttattgctctattttcattgagtgatttatttcactaatggcaaaagtatttataattaagtggatatttgacgaccaaatgaatatgccccaaaatgaaccaaaccttacagcgactgaatctaagcttacataataccgaagtcgagtggaggttcgccaaaatggtgacgaatcaaatccgggcaatatacagagaacccgacgatcgacgttctgcactccactattctatatgatctagttcccttcattttcaactagttgcagcgctgcgattcacacgtatagccacatgattgacgccgatggtgcaagccgctagtcgacttccaagttccgaccagagacacaatacaccggcgtgactccaaatacgaagtgcacaaaacaattatacttgatctagaatatacacaaccatttcgtgctctagagatcacaaccactgaatgacattgaccactaataaaagttgctgcactcactgaagatcgaagctgggaggcctcaccttggaacggatgaagggcacgatggtgacatggctggaggttgaacacagccatcaaagttgacaaccagcgaagtacgggtgacggcaaagtcccgaggtgatgaacaggggcaagtgtccgagcgtgcgatggagggcgcgcgaccagagcgttgtgtcggtgtgcaccaggaagctgatgccgagtgcacagtgaagaaggggacggtggccttcaccgaggtgggtggagctcagggcgaggagggtgacggctgaacggtttcatgcttgcgtgagatagacgacggctgggagaactgcgatgcaaagaggaggcagccacgagctgggaacaccaggagcaagcgcctgggagctcgacaccctggctgacgacgttgctagacaaaaaaaagaacacgctgaaccgagcttatcccgatgaagatattagtatatttcccagctcacgacacgccacatgccatcgcaagaggcaagcagctgcgtggccttgcatggaaaatacaccgagctcgtgcattggcgttcttatcagaatagagcagagactccacctcttaactctatccattttgcctcaactttgcccatttctattgcctacgccgggcctttcttttgccaacgttggctcactgtcacacggccccaaccaggtctcggctgaaacaaagggaatgaggagtttaaacaccaacactccgctctccaaattaaatcaagcaggctgaaccaaagtttcagccacctgaactgaacttgccacccaagtgaacccccatcttctccccactttcatcacatgattccaatggaaacaggtcaacctcggttaacaaaacttgttcgttatacatagctctacaattttcctgcagcaaaccttggtcgaaaacacacagaccaaaagttataatgctacaaaacgagatgaaacactgaatttcagcaccactaactgaataatgctcagtgcacaatttgcctgacagctcatcttggaacaacattttctcccgattctaaccaacaacaggacacaatttcttaataaaaattacgtaagattacctggtctctaacttttctatagagaatatgtctaataactccgtggatgagtggcaaaaggctccaaagttgagcaaaactcactaaaattcagtttctgccaagtgaactaagtctgaaatctggagcctgatagcatgtttttagacactattttctcctatttctaggctaggtcaaggggattcaccttaatgaaaattactcaacacactaccctctaacagttttatatagagagcgcaggctataacttcatggatcaaaagttatagtaacctgaagttgggtaaaaacactagaattcagctgcagctaactgaacaagaaactgaacacacatgcctgacaaagaatggttgggcacagcttactcaatttttgtgcagcagaaaacaaaactttcttaagaagatttgatcaccattatatggtcttcaactttcctgcagagatataccccataactccatggatcaggcacaaagaagctccaaagaagctccaaagttgcaccaaaaacactaaaattcagatttagtaagctgcactaagtctcaaatccaaatgtgtcagctccacttgtgaccacctttgctcctaattgcatatggttttaggggcatcccacctaatagagtttgtcctccaatacctactctacaagttttctataacaatctttctcaaaacactcatggattccaaagtaccaaagtccaaaggttgcatcaaatacccaaattcagactaggttttcttacaaagtctgaaacccagaagcaaacattacatttctgaaccactctttctaccagttccaaatagtttcaggggtatgaccattaaccaaacttataccccaacatgtggtcttccactttggtacataaactttaacccatagatgtatggatcagccaccaacaggctttcaaagttgcttcagaatataaaatcttcagtttcagatattgcagtctgaaattcagattctgatattcccactttgcactagttttacgcctagttttatacggttttagggctaccacatctcataaacattgttctcctatagttattctacaggtttgttatagcaactgttttcaaaatactcatggattaaaagttataggaatccaaaaacagataaacaaaactgttttgggctgattccaaaccgacccaaatctgaacttttgcaatttacttcaaattcttccacaccacttggagagctccaaatatgaaaattgttcacttttccaagctccataactttggtatatggacttttagcaaaacataactagatcttaaaatccacttttgggctagtttaaggtttcaattgggattgcttttctccaacaatctcaccactttgggttcatcacttaagagtagagttactccttaacctaagatcccactttggtgtatatatctcatgtccaaatttccattggtttaaaagtggtgcacttaaacttgattgcaaaccgggtttttaatcttccctggctcccaacaacataacacaccatatttgagttgaatttttgacctagtaaaatgcattctagggatatcaagcaagatgatgcggatgcgtatgatgtcatgccaaagttttagttcttgtaacaccaggggtgttacattcttcccccctaaaaaggaatctcgtcccgagattaaataggtcaaggaatggaaaaggaaatgtgtcaccggtttatttcctaattactcctacaaggcagggggtgtgaccccatcaaaagacaacttatacaaacctacggtttccaagacactaggaactcaggaatatacttttccaaatacttctctgactactacgtgactttatcttccgggtgttagttccattgtatctcgtaaaactcaataacttttcttcgagtgacctgatccttttgatctaacacatttatgggatattccgaggaggttaaacctggtttatggttaacatctaaaatttcaataacatatttggggactcgaagacatttattccattgggacacgtggaacacgtcgtgcactgttgaaggtccttttggcaactgtaccttataagctataggtccaccaaaatctctgtttcaaatcttggtacctattgctacctttagggtgaatggagtcccggactgcaacccaatcgcaattccacatccctttttggaggcaactagtcaaatcttcgaggaacacatccgagaactccctcacatcaggtatatcctttacttctttcacttaaactcctaatgtagacgaatcttattatttcctagaatagcctcactgaccatctccttatatccttcaaccaaactaattgccatcaggagctaaagtttcatattaagatcacgtaggatgtattactttttttttcactggcatccacataatccaaaacat

SEQ ID NO: 49915 - DNA, 1976 bp, Zea Mays
attggcacgtatgaatgctcagccacatgcgtatgtatacatcacggccacgttcacgcttcccccttctgcaagcaaacctaaccaagcctctgcggctcttcttcgaatccaactcctccccgatccccaaaatcgaacccaagtcgaaaccctaacctcggccttctcgatgtcggccgccacaaccgccccaacccctgcggtggccaccccgatggcgccgcctccgtcgtacccggcctcctccacgatctccgcctccgtggccgcgtcggtcgaggaagaggacgacctctatggccgcctcaagtcgctccagcgccacatggagttcgtcgagatccaggaggagtacgttaaagacgaacagaagaacctcaagcgcgaactcctccgtgcgcaggaggaggtcaagcggatccagtccgtaccgctcgtcatcggccagtttatggagatggtcgacggcaacaacggcatcgtgggttctactacgggcagcaactactatgtgcggatcctcagcaccatcaaccgcgagctgctcaagccgtcagcatctgtcgcgttgcatcgtcactccaacgctttagtcgacgtgctgccgcccgaggccgactccagcatctccttgctgggatcgtcggagaagcccaacgtcacctacaacggccctagaatggtgcgtgatgtgttccgtttggctaaggagaatgctccagcaatcattttcattgatgaggttgatgctatagccactgctcgctttgatgctcagactggtgctgaccgagaagttcaacgcattcttatggagctactcaatcagatggatgggtttgatcaaacagtgaatgtgaaggttataatggcaactaatcgggcagacactctagatcctgctctgttgcgtcctggtagacttgacaggaaaattgagttccctttgccagaccggcgtcagaagaggcttgttttccaagtctgcactgccaaaatgaacctgagtgacgaggttgatttggaagactatgtttccagaccggataagatcagtgctgctgatattgctgctatctgtcaagaagctggcatgcatgctgtccgcaaaaaccgatatgtcatcctccccaaggactttgagaagggctaccgaaccaactgttgagctcgtttcttgtttatcaattgaatatgttttagcataaagatgagtttcaggatagttgccaatatcaaatgtcgaagttgatggctgtaatgcttgagtcaatctttttacttgaaggtacagcggtgttatggaagttatgattatgtagggtggattaaccttttaccgacacggtggggcttggatttggcattaagccaatcttaccaatcaatcaccagatgtgatgtctcattggtgatactaatacctgcagatctggtctgtctcaaccaaattatgccgaagacaatagaaaaactacgtttgcgcagatcttgtattctaagcttgcctgttcatttattactgagagcaagtgtaatagtgatatagttgatgctaaggtagaggtgagaagagagttatgctgttgtagaggttagaagagaagagtgcaatcaacgagctcagcattttttgtgtgtgtgtagctttctgaactagataacaaagactatgtatgttttttttgtttagatttctgaactaggttcgctctaaaaatctacaatctgaaccaagtacaatggcaggatagattgtatagaaaatctatagatttttatagttcaattcagaatcactttctactcccaaggtttctagatttttgttatctatgttaccaaagtatcaatattttacagaatctatatttaacagctgtttgaacctaacatattacctaatatatattttagcttttcatcactgctaagattaaaattttaagaatctacagctgagccaagccaaa

SEQ ID NO: 49916 - DNA, 1574 bp, Zea Mays
gtcgatgttattgattgcactgaacgtcttccttattatggatattggaggatgcgacatccaaaagcaagaaatacgggaggcggttgagttacccttgactcatcatgagttgtacaagcagattggtattgatcctccaagaggggtgcttctgtatggtcctccgggtactggcaagaccatgcttgccaaagcagtcgcacatcataccaccgctgcttttatcagagtcgttggttcggagtttgtacagaagtacttgggcgagggccctagaatggtgcgtgatgtgttccgtttggctaaggagaatgctccagcaatcattttcattgatgaggttgatgctatagccactgctcgctttgatgctcagactggtgctgaccgagaagttcaacgcattcttatggagctactcaatcagatggatgggtttgatcaaacagtgaatgtgaaggttataatggcaactaatcgggcagacactctagatcctgctctgttgcgtcctggtagacttgacaggaaaattgagttccctttgccagaccggcgtcagaagaggcttgttttccaagtctgcactgccaaaatgaacctgagtgacgaggttgatttggaagactatgtttccagaccggataagatcagtgctgctgatattgctgctatctgtcaagaagctggcatgcatgctgtccgcaaaaaccgatatgtcatcctccccaaggactttgagaagggctaccgaaccaactgttgagctcgtttcttgtttatcaattgaatatgttttagcataaagatgagtttcaggatagttgccaatatcaaatgtcgaagttgatggctgtaatgcttgagtcaatctttttacttgaaggtacagcggtgttatggaagttatgattatgtagggtggattaaccttttaccgacacggtggggcttggatttggcattaagccaatcttaccaatcaatcaccagatgtgatgtctcattggtgatactaatacctgcagatctggtctgtctcaaccaaattatgccgaagacaatagaaaaactacgtttgcgcagatcttgtattctaagcttgcctgttcatttattactgagagcaagtgtaatagtgatatagttgatgctaaggtagaggtgagaagagagttatgctgttgtagaggttagaagagaagagtgcaatcaacgagctcagcattttttgtgtgtgtgtagctttctgaactagataacaaagactatgtatgttttttttgtttagatttctgaactaggttcgctctaaaaatctacaatctgaaccaagtacaatggcaggatagattgtatagaaaatctatagatttttatagttcaattcagaatcactttctactcccaaggtttctagatttttgttatctatgttaccaaagtatcaatattttacagaatctatatttaacagctgtttgaacctaacatattacctaatatatattttagcttttcatcactgctaagattaaaattttaagaatctacagctgagccaagccaaa

SEQ ID NO: 49917 - DNA, 1559 bp, Zea Mays
gaattgggaacttttctaatggtttgatattggaggatgcgacatccaaaagcaagaaatacgggaggcggttgagttacccttgactcatcatgagttgtacaagcagattggtattgatcctccaagaggggtgcttctgtatggtcctccgggtactggcaagaccatgcttgccaaagcagtcgcacatcataccaccgctgcttttatcagagtcgttggttcggagtttgtacagaagtacttgggcgagggccctagaatggtgcgtgatgtgttccgtttggctaaggagaatgctccagcaatcattttcattgatgaggttgatgctatagccactgctcgctttgatgctcagactggtgctgaccgagaagttcaacgcattcttatggagctactcaatcagatggatgggtttgatcaaacagtgaatgtgaaggttataatggcaactaatcgggcagacactctagatcctgctctgttgcgtcctggtagacttgacaggaaaattgagttccctttgccagaccggcgtcagaagaggcttgttttccaagtctgcactgccaaaatgaacctgagtgacgaggttgatttggaagactatgtttccagaccggataagatcagtgctgctgatattgctgctatctgtcaagaagctggcatgcatgctgtccgcaaaaaccgatatgtcatcctccccaaggactttgagaagggctaccgaaccaactgttgagctcgtttcttgtttatcaattgaatatgttttagcataaagatgagtttcaggatagttgccaatatcaaatgtcgaagttgatggctgtaatgcttgagtcaatctttttacttgaaggtacagcggtgttatggaagttatgattatgtagggtggattaaccttttaccgacacggtggggcttggatttggcattaagccaatcttaccaatcaatcaccagatgtgatgtctcattggtgatactaatacctgcagatctggtctgtctcaaccaaattatgccgaagacaatagaaaaactacgtttgcgcagatcttgtattctaagcttgcctgttcatttattactgagagcaagtgtaatagtgatatagttgatgctaaggtagaggtgagaagagagttatgctgttgtagaggttagaagagaagagtgcaatcaacgagctcagcattttttgtgtgtgtgtagctttctgaactagataacaaagactatgtatgttttttttgtttagatttctgaactaggttcgctctaaaaatctacaatctgaaccaagtacaatggcaggatagattgtatagaaaatctatagatttttatagttcaattcagaatcactttctactcccaaggtttctagatttttgttatctatgttaccaaagtatcaatattttacagaatctatatttaacagctgtttgaacctaacatattacctaatatatattttagcttttcatcactgctaagattaaaattttaagaatctacagctgagccaagccaaa

SEQ ID NO: 49918 - DNA, 1359 bp, Zea Mays
ccacacccagccattgatgcttgctacttgctggacctacttctccgttccaaattggccctagaatggtgcgtgatgtgttccgtttggctaaggagaatgctccagcaatcattttcattgatgaggttgatgctatagccactgctcgctttgatgctcagactggtgctgaccgagaagttcaacgcattcttatggagctactcaatcagatggatgggtttgatcaaacagtgaatgtgaaggttataatggcaactaatcgggcagacactctagatcctgctctgttgcgtcctggtagacttgacaggaaaattgagttccctttgccagaccggcgtcagaagaggcttgttttccaagtctgcactgccaaaatgaacctgagtgacgaggttgatttggaagactatgtttccagaccggataagatcagtgctgctgatattgctgctatctgtcaagaagctggcatgcatgctgtccgcaaaaaccgatatgtcatcctccccaaggactttgagaagggctaccgaaccaactgttgagctcgtttcttgtttatcaattgaatatgttttagcataaagatgagtttcaggatagttgccaatatcaaatgtcgaagttgatggctgtaatgcttgagtcaatctttttacttgaaggtacagcggtgttatggaagttatgattatgtagggtggattaaccttttaccgacacggtggggcttggatttggcattaagccaatcttaccaatcaatcaccagatgtgatgtctcattggtgatactaatacctgcagatctggtctgtctcaaccaaattatgccgaagacaatagaaaaactacgtttgcgcagatcttgtattctaagcttgcctgttcatttattactgagagcaagtgtaatagtgatatagttgatgctaaggtagaggtgagaagagagttatgctgttgtagaggttagaagagaagagtgcaatcaacgagctcagcattttttgtgtgtgtgtagctttctgaactagataacaaagactatgtatgttttttttgtttagatttctgaactaggttcgctctaaaaatctacaatctgaaccaagtacaatggcaggatagattgtatagaaaatctatagatttttatagttcaattcagaatcactttctactcccaaggtttctagatttttgttatctatgttaccaaagtatcaatattttacagaatctatatttaacagctgtttgaacctaacatattacctaatatatattttagcttttcatcactgctaagattaaaattttaagaatctacagctgagccaagccaaa

SEQ ID NO: 49919 - DNA, 835 bp, Zea Mays
gcaccaccctcagccatggcgccagcggcggcggaggctggtcccggcgatgacgggcttaggaagctcgaatacctttccctggtctccaaagtttgctccgagctcgagacccacatcggcgtcggcgacaaggtgctggccgagttcatcaccgagctcggccgcgactccacaaccgtccccgagttcgacgccaagctcaaggagaagggcgccgacttccccgactacttcgtccatacaaacttgatgttgtctccgctgggaaaaacttcacaaagataaggaaagctatcactgcaggcttctttttccacgccgccaggaaggatccccaggaaggatacaggaccttggtcgaaaaccagccagtgtacatccaccctagcagcgcattgttccagcgccagccagactgggtcatctatcacgagctggtgatgacgacaaaggagtacatgagggaggtgactgtgatcgatccaaaatggcttgttgagctggcgccaaggttttacaagggtgctgaccccaccaagatgagcaaaaggaaaaggcaggagaggatcgagcctctatatgatagataccacgagcccaactcttggcgtcttagcaagcgccgagcttgattgtaactcactgtaactgtgcactgcatgctcttcatggccagttgatactccataatgtaaatgtttgtgagttgtcacatgtagatgtagctgcagatagttttcccgtttcatttcagcatcaccaaaagctaccatttctgctcagtacaaacctctgaatgtccaacgaactcaatacttgtgcctgaatctcc

SEQ ID NO: 49920 - DNA, 1055 bp, Zea Mays
gcaccaccctcagccatggcgccagcggcggcggaggctggtcccggcgatgacgggcttaggaagctcgaatacctttccctggtctccaaagtttgctccgagctcgagacccacatcggcgtcggcgacaaggtgctggccgagttcatcaccgagctcggccgcgactccacaaccgtccccgagttcgacgccaagctcaaggagaagggcgccgacttccccgactacttcgtccggaatatattctacaggccacgagaaaaacaagctcaagctgatcaaaagagggctaaattttttcagccagagggagaccaccttactctacttgctgtatatgaggcctggaaggctaagaacttttcagggccctggtgttttgagaactttgttcaatcaagatcattgaggagagcccaggatgtgaggaaacaacttctcactatcatggacagatacaaacttgatgttgtctccgctgggaaaaacttcacaaagataaggaaagctatcactgcaggcttctttttccacgccgccaggaaggatccccaggaaggatacaggaccttggtcgaaaaccagccagtgtacatccaccctagcagcgcattgttccagcgccagccagactgggtcatctatcacgagctggtgatgacgacaaaggagtacatgagggaggtgactgtgatcgatccaaaatggcttgttgagctggcgccaaggttttacaagggtgctgaccccaccaagatgagcaaaaggaaaaggcaggagaggatcgagcctctatatgatagataccacgagcccaactcttggcgtcttagcaagcgccgagcttgattgtaactcactgtaactgtgcactgcatgctcttcatggccagttgatactccataatgtaaatgtttgtgagttgtcacatgtagatgtagctgcagatagttttcccgtttcatttcagcatcaccaaaagctaccatttctgctcagtacaaacctctgaatgtccaacgaactcaatacttgtgcctgaatctcc

SEQ ID NO: 49921 - DNA, 733 bp, Zea Mays
gtcgaaaacagctatccatatgcccgaaccttaacttgaagtggattgtataaaaggtggtatgcccaaggagcctactactaaagtgcagaaactctaaaaaaacaacttcgttttgtgttgtaagatgagtagctagcagcgtatgtatggagaagtatgttacatttttgtggagccttgaattgaaaggtggtcatctctgctttgtcggcggcccaagtgtaagccctgcaccgagcgccattcatctgggacttctggaggccgggccgcgaacggtcgctgttttgttccgccgttcaggatctactgtaatcctctaaggttatgtcaaagcacagaatcagtctaatctgcatgttgggcgttgtttactatcacgcccttgtgttttcatggctacattagctacgaccataacgtgatgtgcagacgatgttacgaacggcgtaaaaatctcaatcatcaactatccgccggacctggcccagggttgtaaatcggaggcgttccctttgaggtcgtaaaagccgaagcgttcatgaattacgattgtacactgcgttccgaccggccttagcatatgctgaattgcgtggactaaaacagcagaaatccagcgtcggtgttagtgcattgcatgtagccacgtactagtctgcatctaggtctattcatgtttggttgtcccagaactaatgctattttaagatacgagggtgtttgatct

SEQ ID NO: 49922 - DNA, 1157 bp, Zea Mays
acagccgcactctcctccctgcagctcgctccatcttcctccctcccatggtcgtgccctcggctccctctgttcaagcccccatcagccgctccagttcgccatgggccaccgtcgcacatggccatgccaagctggccgtccctgctccatccgatagcgctgctctctgcatctcccatggtcgagctcaccgcgtccctgtgtttgagtccgtcgacctccagctcgccagccgcgccctccctgctcgcccagcccctctgctcactggtttctccccacgccagcagcagcaagcagccatggcacctccttcccctgctcgccctccctctgtgcccagcctcctctctgttcttccgtggagcaatagccctcctctaattctgcagcagcagctctcccttttttcatttgttctccatgaatgaaagcccaagcgccagcccccctccctttcgtcaagtgattggaagagagttctagggaaatcgatggagacgaaaccgtgtttcagttcgacgcggtctaggtgtttgatggaatggatgaaccggagatccttgttgctcttgcgaaatccgagtctatttagtgttggtacgttaattgatcacgtgatgtgaaaggcaaggtttggattgatctcaagataatgctgatggacgaagctaaagtgggtgaatcaaacaaatgccaggatgagagatgctcaccaagtggtcttcatctaacaacactaacttagtgttatcccaggcaagccccggtgcatttgccacctccttgctgtttttaaacttttatcacttatgatgcattaggtggtaggagttgaatgattaaaccttcgtttgcataacttccttgaactattgattaccatccttgatacatgttttaaaaagctagatgtgcttagtatgctcatagactaagaacaaaatgttttgatctatgaatcatgtttttacaaagaaaagaggctggagtgatgaaggtatcaaaggccttgatgacttcatcatttcagtagggtacctcttacaggtaccaggttttcagaaataacttaatatgagaccagacgttgagcaggaaaggtcgcccgtctgtgtcgcttaaggaccgttccgattgttggcctgctgatc

SEQ ID NO: 49923 - DNA, 550 bp, Zea Mays
caaacatatgagttacatcacttcgtcaaagaaagatgtgaagcactttatagagttctcgaagaaggttccttcgagtaagccatatcgcattatactcgatgatgtgagagacaagctttacaatacacatgagcgggcatgccaattgttatccagtggatatgctgacattctttaagaatctactgtcacaaacattgagaagtctaacagagttctagaagaaggttccttcgagtgagccatattgagttacactcggtgatgtgagggacaagctttacactacacgtgagcaggcatgccaattgttatccagtggatacgctgccattctttaagaatctactcccacaaacgttaaggaggtcatgatggatgaggtgcactgtttaagaaaccgtttctaaaattgattctatgggtaacatgattcgtggtgaggaatcttcaatcggattggaggtaagatcatccctgctcctggatcagtagtagaattgtttttttggtgttgttgtcaatacgtattgacttcaagtatctt

SEQ ID NO: 49924 - DNA, 1235 bp, Zea Mays
tgtacctcctgtatagaacaaagaaaatttgtaaaatatgttacccacatagtcttatttatttgaggatcatttgtataataagaagataccttctattttcatgtagtgacgccttctgttatccaaatggttatccatatagtttcatttagtcgaggatctcacatatagctatcaaaatggaaaacaagaagatgccttatgttctcatgtagtgatgtatcggcactttgtgtgtgctactatgcttgatgcacataactaccttttttagtgtttagtggttctatatcatacctactcaaccaaagatatcatatagaacctcttatctattacttgtctcaccaccatctcagtataaattagaactggaagctaactacagttccttttccttttttggtttcaagttgactgatgatgctatttatatcaaagttcgatggtacttttggtcttgtgggctatggcatacactaaaacttggttaccttccaatggaggtaaccttagtggatataactgttacccttgctcttttctagcaaagctccacactatgacttatccatgtctaacctttgatagcagaacctatgtttctaatgcgcgcttaaaaatctgagtttgcttaggcctgcaaaatagtgaagggacataggtaaagagattaaaccagagtcagataagagctcttttagaggagacatgctagcgcccacatgattgatagtgtgacattattcagatggtgaatcataactcttaccatgaagatccatattctaaagagtttggcattaatatcagtgagtgtttggcttcaatctaggcaagaattttacctgctcctcgggtaggttgaaacccactcatgtttcttttagcgaaaacagtggggggaaaatcctatcgagtatgaagataaattatagagaaaagaacaatataaagggtaagaggtccaatgtcgccccactcttattgcagtagtggcttttgaagtattttttattgttcatattacccttctttgtcatagttaatatactcctgttttataaactggggcaactctttgtgggcttgataactaacaccagtcgtattttcttgcaacatatttagtattttatattttacttatgatgaagctcaagtataataaaactggcagagagaatgattgcttgcctagagttgggcattggaatatgatgaacaaggtg

SEQ ID NO: 49925 - DNA, 333 bp, Zea Mays
tcgcgagttgtagaataacacgaaagcttttgagaagagtgttgactactaaaggatcagaaatgcaatgatcaagtgcatccagcagtgccgagcattatggggaagataaccttagaccagatgtaatagaactttgtcacatactcagtcagcaggacacatggtttaagctcatgaccccatggttcattgaagtgaagggactcctttcgtgtactgacaattaaggatcagtagttttcctatcaagggtgatggcaaagtacatctcaccagtaagagatattttctcacataagtagagttgccgagaagaatggagagtatcta

SEQ ID NO: 49926 - DNA, 2393 bp, Zea Mays
aagaggaaaagcgagatcaaaaggtagctagcgagcggtccacatttcgtccctgggctgggtccagcacgttagcgatatatagagaggtcagttacagaggaggagacgccacagctacagagtcagaaagaaatgcctgtggctgtggacttgtggtggacgcggacggacctggtggtgtcatgtgttgtgtgcagcgactcgacagagagaggcggcgctgtagaaagaaagggtcttgtgtgctgcgtcctccctctatttaagggggcccttgggcgccctgttttcttcctcccgcccgatacatttctcgtacatcgctctcgctctcgctctctctcctgctgtccacgaccgaccaaaggcgccgggcacagactcttcgtcggatccaagagaagctcgcgccctccccgaccatggtctcggcggataccatccgtacggctatcggcgtcatcggcaatggcaccgcccttgtgctcttcctctccccggtgtaagaatttatcgattctgcttctgcttgttattttttatctacaaatcaaaataataaaaaaataataaaaactagtactacgcaatccagctttctccttataaagaaatcaatggataaatttaaaaaaagcagagcatcaaaccaagaagaaaaactgatgtcacgaacttgacagttgacttttcgcgcaaacaaacaaacaaacactacgtactgtgctctgcttatggatacatacatgcatactagtagctcatatatgcgtacaaatgcgccccgcaggcccaccttcgtgggcatctggaagaagcgtgcggtggagcagtactcgccgatcccgtacgtggcgacgctgctgaactgcatgatgtgggtgctgtacgggctgccgctggtgcacccgcacagcatgctggtggtgaccatcaacggcaccggcatgctcatccagctgacctacgtggcgctcttcatcctctgctccgcgggggcggtgcgccgcagggtcgtgctcctgttcgccgccgaggtcgccttcgtcgtcgccttggccgcgctggtgctcaccctggcgcacacgcacgagcgcaggtccatgctcgtcggcatcgtctccgtcttcttcggcaccggcatgtacgctgcgccgctctcggtcatgaaattggtgatccagacaaagagcgtggaatacatgcccctgttcctgtccctggcctccctcgccaacagcatctgctggaccgcctacgcgctcatccgcttcgacctctacatcaccatccccaacgggctgggcgtgctgttcgcgctgggtcagctgggcctgtacgccatgttctacaagaacaccaagcagatcatggaggcacgcaggcgcaaggccgaccagcagtcaaccatgatggaggtggtcaccgacgcctccgccacgccgcccccgccacccaacaacaacaacggcggcggcggcggcaacggctactgatcgcatgcaacaggaaggacgacgacgatcgaccagcaagcaaaagccacatacatagcgtcgtcgtagcgccccgccgcccaccgaatgcttgttgttccgattccgatctccccaaggggacgatgctccgttgcattctctgcatatcctactaatataacgaaacgaaacaaaacaaaagacagcacaaaagggcttgctgggtttcacatttaccatatataatcgtctgctgctgtcttgttgctggtatcactgctattggaaacccttcttgcttgttctctcttcattccgcccgccgcgtaggcgtagctagctgatcgatcgattttcacgtcatttattgctcggccttcttttaattttccagtttctgtatatactccctttcattttcaggatgctcagttgtaggtgaggtagtagtaagcgtttggatttttttctagtagatgaatagaaggaaacaatacccctcatctctatgctcctcgtcaccaacagcaaaaatgctatttccagttagcaacatctaaacttgtatctacaacacttgaattagttcctagactgtctcatctgaagtaacttcacaaatttcgattattttgttactctccaaaattagaacatgatagccacgtgaatgtacagggaaaagaattccaaaaacaataccatcagttgatctagattcaaatttatctttctagattttagcacagatcagtatttgcatccaaacgcacatggatgaaaaatggactatgtcttatttcattataatagtggctttagtatttgataaactttgggcttactttggtcctccaatatctcccccgttgaaatcaaatgacaaaaagaaaaaaaaaagattttaagcac

SEQ ID NO: 49927 - DNA, 1988 bp, Zea Mays
gtggacttgtggtggacgcggacggacctggtggtgtcatgtgttgtgtgcagcgactcgacagagagaggcggcgctgtagaaagaaagggtcttgtgtgctgcgtcctccctctatttaagggggcccttgggcgccctgttttcttcctcccgcccgatacatttctcgtacatcgctctcgctctcgctctctctcctgctgtccacgaccgaccaaaggcgccgggcacagactcttcgtcggatccaagagaagctcgcgccctccccgaccatggtctcggcggataccatccgtacggctatcggcgtcatcggcaatggcaccgcccttgtgctcttcctctccccggtctcatatatgcgtacaaatgcgccccgcaggcccaccttcgtgggcatctggaagaagcgtgcggtggagcagtactcgccgatcccgtacgtggcgacgctgctgaactgcatgatgtgggtgctgtacgggctgccgctggtgcacccgcacagcatgctggtggtgaccatcaacggcaccggcatgctcatccagctgacctacgtggcgctcttcatcctctgctccgcgggggcggtgcgccgcagggtcgtgctcctgttcgccgccgaggtcgccttcgtcgtcgccttggccgcgctggtgctcaccctggcgcacacgcacgagcgcaggtccatgctcgtcggcatcgtctccgtcttcttcggcaccggcatgtacgctgcgccgctctcggtcatgaaattggtgatccagacaaagagcgtggaatacatgcccctgttcctgtccctggcctccctcgccaacagcatctgctggaccgcctacgcgctcatccgcttcgacctctacatcaccatccccaacgggctgggcgtgctgttcgcgctgggtcagctgggcctgtacgccatgttctacaagaacaccaagcagatcatggaggcacgcaggcgcaaggccgaccagcagtcaaccatgatggaggtggtcaccgacgcctccgccacgccgcccccgccacccaacaacaacaacggcggcggcggcggcaacggctactgatcgcatgcaacaggaaggacgacgacgatcgaccagcaagcaaaagccacatacatagcgtcgtcgtagcgccccgccgcccaccgaatgcttgttgttccgattccgatctccccaaggggacgatgctccgttgcattctctgcatatcctactaatataacgaaacgaaacaaaacaaaagacagcacaaaagggcttgctgggtttcacatttaccatatataatcgtctgctgctgtcttgttgctggtatcactgctattggaaacccttcttgcttgttctctcttcattccgcccgccgcgtaggcgtagctagctgatcgatcgattttcacgtcatttattgctcggccttcttttaattttccagtttctgtatatactccctttcattttcaggatgctcagttgtaggtgaggtagtagtaagcgtttggatttttttctagtagatgaatagaaggaaacaatacccctcatctctatgctcctcgtcaccaacagcaaaaatgctatttccagttagcaacatctaaacttgtatctacaacacttgaattagttcctagactgtctcatctgaagtaacttcacaaatttcgattattttgttactctccaaaattagaacatgatagccacgtgaatgtacagggaaaagaattccaaaaacaataccatcagttgatctagattcaaatttatctttctagattttagcacagatcagtatttgcatccaaacgcacatggatgaaaaatggactatgtcttatttcattataatagtggctttagtatttgataaactttgggcttactttggtcctccaatatctcccccgttgaaatcaaatgacaaaaagaaaaaaaaaagattttaagcac

SEQ ID NO: 49928 - DNA, 1793 bp, Zea Mays
ccttgggcgccctgttttcttcctcccgcccgatacatttctcgtacatcgctctcgctctcgctctctctcctgctgtccacgaccgaccaaaggcgccgggcacagactcttcgtcggatccaagagaagctcgcgccctccccgaccatggtctcggcggataccatccgtacggctatcggcgtcatcggcccaccttcgtgggcatctggaagaagcgtgcggtggagcagtactcgccgatcccgtacgtggcgacgctgctgaactgcatgatgtgggtgctgtacgggctgccgctggtgcacccgcacagcatgctggtggtgaccatcaacggcaccggcatgctcatccagctgacctacgtggcgctcttcatcctctgctccgcgggggcggtgcgccgcagggtcgtgctcctgttcgccgccgaggtcgccttcgtcgtcgccttggccgcgctggtgctcaccctggcgcacacgcacgagcgcaggtccatgctcgtcggcatcgtctccgtcttcttcggcaccggcatgtacgctgcgccgctctcggtcatgaaattggtgatccagacaaagagcgtggaatacatgcccctgttcctgtccctggcctccctcgccaacagcatctgctggaccgcctacgcgctcatccgcttcgacctctacatcaccatccccaacgggctgggcgtgctgttcgcgctgggtcagctgggcctgtacgccatgttctacaagaacaccaagcagatcatggaggcacgcaggcgcaaggccgaccagcagtcaaccatgatggaggtggtcaccgacgcctccgccacgccgcccccgccacccaacaacaacaacggcggcggcggcggcaacggctactgatcgcatgcaacaggaaggacgacgacgatcgaccagcaagcaaaagccacatacatagcgtcgtcgtagcgccccgccgcccaccgaatgcttgttgttccgattccgatctccccaaggggacgatgctccgttgcattctctgcatatcctactaatataacgaaacgaaacaaaacaaaagacagcacaaaagggcttgctgggtttcacatttaccatatataatcgtctgctgctgtcttgttgctggtatcactgctattggaaacccttcttgcttgttctctcttcattccgcccgccgcgtaggcgtagctagctgatcgatcgattttcacgtcatttattgctcggccttcttttaattttccagtttctgtatatactccctttcattttcaggatgctcagttgtaggtgaggtagtagtaagcgtttggatttttttctagtagatgaatagaaggaaacaatacccctcatctctatgctcctcgtcaccaacagcaaaaatgctatttccagttagcaacatctaaacttgtatctacaacacttgaattagttcctagactgtctcatctgaagtaacttcacaaatttcgattattttgttactctccaaaattagaacatgatagccacgtgaatgtacagggaaaagaattccaaaaacaataccatcagttgatctagattcaaatttatctttctagattttagcacagatcagtatttgcatccaaacgcacatggatgaaaaatggactatgtcttatttcattataatagtggctttagtatttgataaactttgggcttactttggtcctccaatatctcccccgttgaaatcaaatgacaaaaagaaaaaaaaaagattttaagcac

SEQ ID NO: 49929 - DNA, 1377 bp, Zea Mays
tttttttatttttcttagaaagctgttaccgttactactttattacttagatgagagagagaaagcgcgcaagaaagacagaaagacgacactgtagtgactagtgtgagagagagctagatacagatagagatggaggtggagtggaggtgggcttggtgggacccgatagatgtccgcgggtccggccacggcgaggccagtgactcatgatcctcctctatttaagctggcgtccttcactcgctcgtcactcacaaagaagccggggacggagagcagagagcttcagcgcaactgtgctcaatcgtttcttcgtctttagttggtgcttggtctccctccgtcctctgtttcccaaacagaggtgtctcagctgactcttttgcttgctagcaaaatagcacactctctctctagagctgagcaccaccttgctgaaggcagctagctagcgacgaccatggtctcctcggacaccatccgcacggccatcggcgtcatcggcaatgggaccgccctggtgctcttcctctccccggtgcctacgttcatccgcatctggaagaaggggtcggtggagcagtactcgccgatcccgtacgtggcgacgctgctgaactgcatgatcgcaggtccatggtggtcggcatcctctgcgtcctcttcggcaccggcatgtacgccgcgccgctctccgtcatgaaaatggtgatccagacgaagagcgtggagtacatgccgctgttcctgtcactggcttccctggtgaacggcatctgctggaccgcctacgcgctcatccgcttcgacctctacatcaccatccccaacgggctgggcgtgctgttcgcgctggcgcagctgctcctgtacgccatctactacaagaacacccagaagatcgtggaggcacgcaagcgcaaggcgggccaggtcgccatgacggaggtggtcgtcgacggcagcagggcctccaacaacaacaacaacggcggcagcggcacctactgatgatgatgagtacgacgtaatattgtgcatggtgaccacgccaacacaacaccaagcaacacggggggccaacgccaacgccgtgtgtatctagcactagcaagcgtccttcttcctgacgaagggatgatctatgcatcttaagcagccgtcgtcttcttcttcttcttctgttaatccctagcttttattttctccatgcttcctagtaacgaagctttgcccactgattattagtacttatatgttgaatcataatattacgacctcggcagcccaaacacttctcttaatccatctaatcaatagaccttagccaagtcaacttaatcaattgactgatagtactgcttgactatgata

SEQ ID NO: 49930 - DNA, 621 bp, Zea Mays
ctcacttgcaacttgcaagccgtcatcattattatcagatcggcgagagaggtggatccatccatggacatccccaacgggctgggcgtgctgttcgcgctggcgcagctgctcctgtacgccatctactacaagaacacccagaagatcgtggaggcacgcaagcgcaaggcgggccaggtcgccatgacggaggtggtcgtcgacggcagcagggcctccaacaacaacaacaacggcggcagcggcacctactgatgatgatgagtacgacgtaatattgtgcatggtgaccacgccaacacaacaccaagcaacacggggggccaacgccaacgccgtgtgtatctagcactagcaagcgtccttcttcctgacgaagggatgatctatgcatcttaagcagccgtcgtcttcttcttcttcttctgttaatccctagcttttattttctccatgcttcctagtaacgaagctttgcccactgattattagtacttatatgttgaatcataatattacgacctcggcagcccaaacacttctcttaatccatctaatcaatagaccttagccaagtcaacttaatcaattgactgatagtactgcttgactatgata

SEQ ID NO: 49931 - DNA, 841 bp, Zea Mays
ccgcagccataccggattcccggattctccttgctcatgcgtacttctcctcagcgccgcccgcccagttctaggacccgcgcgccgcctggcctcgtcctcctcgttgcagactctcacgcccggtcccccacctcgtcgtggtcagccaccacgccggtgctcgcccgctcctggctgaccgtcgaccgagccgctcgccctgatcactgctcccagttcgtccatatctcacatcacgtccaacactacgctgctgctactcctatcccacacgcatagcactagcacctgacagatcgaagggatccacattctagctcttggagcatgctgccataggctacagctacggttattacattatagccggaagtgctccagctccaggactgattcaacagtttaaagaagtttgtggttggcaaagatggctagatggtgtaggaagtgaagttccagatcgacgctcgcctggtgctcggtgaattgcctgaactagagatcgtcgtcactttcacaatttccgagtcattttagtattggtgggttgatttgctgctccgacttgctggtttgatgaacgaatggaatgagatggatagtcttaggcatgtttgttttaacttatagattatataatctaaattataatctagattatataatctggattatttgctctggattaaataagctagatgttgctgtttgttagcttagattatttggactcgacttattattcatatgtatacaaatataacaatatccttggccgttttacttgtatggtttcatcagttggcactgcatcagtttatacataacagtttataca

SEQ ID NO: 49932 - DNA, 2892 bp, Zea Mays
gctcaacaactccgtactcgttctcttttactagcaaagacatattctttttttttcgagagaaaataataaacgatggaaggaatgccatgcatatactcatggtaaataaaatggaaaaaggcgataaataatttactcggcgccggcggccgacgtggcttcccttgcagcggcacactcacccgagacctgtagccggtggccgctatccgcgggggctccaccgccactcccgactcccgctcgccgcccgccttacaaaaccccacaaccccatccgcagccacccgccgcggcaccccctccaccaccggccaccatgcagacgcagaccctcatcctacgcgctggcccctccgcccgacgctccacgccgccgccggccagcaccgtgcacctcgccgcctccggaaggtgcctgctgcgtgctcccagctcgctccgacgccgaagaacccgctctctcagggcctctgcctctctcgagcaggtcaaggaagtcgccagctccccagctccctccgggaagagtagtcaagcaactagaagagatgtgaggaatatcgcaattgttgctcatgttgatcatgggaaaacaactttggtggattcaatgttaaggcaagccaaggttttccgagataatcaagttgtgcaggaaagaataatggactccaatgacctagaacgggaaagagggatcacgattctgagcaagaatacatcaataacctataagggcactaaaatcaatataattgatactcctggacattcagattttggtggggaggttgagcgtgttctgaacatggtggaaggagttcttctagtggttgattctgtagaggggcctatgccacagacaaggtttgttctgaagaaagctctagaatttggacatgctgttgttgtagttgtaaacaagatcgacagacctactgctcgtcctgagtttgtggtgaattcaacatttgaactatttattgaattaaatgcaactgatgaacagtgtgatttccaaacagtctatgcaagtggaattaaaggaaaggccagtctatctcctgacaatttagctgatgacctaggacccctttttgaggcaattcttagatgcataccagagccacgcgttgagaaagatggtgccctgcaaatgcttgtatctaatactgaatatgatgagcacaaaggaagaattgcaattggacggctgcatgcaggagaacttcagcgtggcatggaggtcaaggtttgtacaccagacgatgcttgcagggttggtaaagtgagtgagctttttgtttatcagaacttcagccgtgcccccgttgaatctgttagtgctggtgacatttgtgctgtatgtggaatcgatgatatcatgatcggggaaactatagctgataaagttacaggaacaccattgcccactatcaaagtggaggagccaacagtcagaatgtctttctccatcaatacatcaccttttgttggacgggaggggaaatatgttactagccgaaatctccgtgacaggttgtatcgcgagctcgaaaggaatttggctatgaaagtagaagacggggaaactgctgatacatttcttgttagtggcagaggcacactacatctcacaatattgatagaaaatatgcggagagaaggatatgaatttatgattggacctccaaaggtcataaacaagacagtcgatggaaaactactagagccttatgagctgctgttgaagtcccagaggagtccatgggatcagttgttgagcttttagggaaaaggcgtggacagatggttgacatggaagctaacgggacggagggaacaacattgctgaaatacaagattcctaccagaggccttattggacttcggaatgcaattcttacagcttctcgtggcagagctatattgaatacaatctttgacagctatggcccatgggctggagatcttagctcacgtgatcagggatccttggttgcttttgaagatggaagcactacttcttatgcacttcttaatgcacaagaaagaggtatgttgtttgtccaaccagggcaggatgtttacaaaggtcaaattgttggtatccatcagagacctggtgatttagcaattaatgtgtgcaagaaaaaggctgctacaaatgttcgttccaacaaagaaactacagtggttcttgatgaacctttaagctacagtttggatgactgcatagagtttatccaagaagatgagatagtggaggttactcctgcaagcatccgtatgtgcaagaacccaaaagtttcgaagaaaaagtaacataatcgcatccatttgtcgtcaatgcatcttctacacatagaagctgcatgctccgttgccaggtctcgtatgagtgacggctgcacggcgtcctcaagtcagtaatcaggatatttttggtggtctacagacaaagactaaaggtcgccagattaagatagaggattatatggcagttttgtgatgaataaatcagccgatacctggagtagtattatttggccacggataaggcgggcactgtttctcatctacttctccctgttctttttatttgtcgtgttttagttcaaaaatgaactagacgacaaatatttgagaacgaagttagtattacacatatattgtgtaggtcatacgtaggactataggcattgtacacgattctttcgacgctagtaaagactggaagaaagctttagcaaatggattagcacacaactgctgctacagactcttatttatttgtaattcaagccagtctataagttgcaacaaactcctgtgcaattttgaactgaagattatagggaagaacctaccattacacgaatgggc

SEQ ID NO: 49933 - DNA, 2836 bp, Zea Mays
gctcaacaactccgtactcgttctcttttactagcaaagacatattctttttttttcgagagaaaataataaacgatggaaggaatgccatgcatatactcatggtaaataaaatggaaaaaggcgataaataatttactcggcgccggcggccgacgtggcttcccttgcagcggcacactcacccgagacctgtagccggtggccgctatccgcgggggctccaccgccactcccgactcccgctcgccgcccgccttacaaaaccccacaaccccatccgcagccacccgccgcggcaccccctccaccaccggccaccatgcagacgcagaccctcatcctacgcgctggcccctccgcccgacgctccacgccgccgccggccagcaccgtgcacctcgccgcctccggaaggtgcctgctgcgtgctcccagctcgctccgacgccgaagaacccgctctctcagggcctctgcctctctcgagcaggtcaaggaagtcgccagctccccagctccctccgggaagagtagtcaagcaactagaagagatgtgaggaatatcgcaattgttgctcatgttgatcatgggaaaacaactttggtggattcaatgttaaggcaagccaaggttttccgagataatcaagttgtgcaggaaagaataatggactccaatgacctagaacgggaaagagggatcacgattctgagcaagaatacatcaataacctataagggcactaaaatcaatataattgatactcctggacattcagattttggtggggaggttgagcgtgttctgaacatggtggaaggagttcttctagtggttgattctgtagaggggcctatgccacagacaaggtttgttctgaagaaagctctagaatttggacatgctgttgttgtagttgtaaacaagatcgacagacctactgctcgtcctgagtttgtggtgaattcaacatttgaactatttattgaattaaatgcaactgatgaacagtgtgatttccaaacagtctatgcaagtggaattaaaggaaaggccagtctatctcctgacaatttagctgatgacctaggacccctttttgaggcaattcttagatgcataccagagccacgcgttgagaaagatggtgccctgcaaatgcttgtatctaatactgaatatgatgagcacaaaggaagaattgcaattggacggctgcatgcaggagaacttcagcgtggcatggaggtcaagaacttcagccgtgcccccgttgaatctgttagtgctggtgacatttgtgctgtatgtggaatcgatgatatcatgatcggggaaactatagctgataaagttacaggaacaccattgcccactatcaaagtggaggagccaacagtcagaatgtctttctccatcaatacatcaccttttgttggacgggaggggaaatatgttactagccgaaatctccgtgacaggttgtatcgcgagctcgaaaggaatttggctatgaaagtagaagacggggaaactgctgatacatttcttgttagtggcagaggcacactacatctcacaatattgatagaaaatatgcggagagaaggatatgaatttatgattggacctccaaaggtcataaacaagacagtcgatggaaaactactagagccttatgagatagctgctgttgaagtcccagaggagtccatgggatcagttgttgagcttttagggaaaaggcgtggacagatggttgacatggaagctaacgggacggagggaacaacattgctgaaatacaagattcctaccagaggccttattggacttcggaatgcaattcttacagcttctcgtggcagagctatattgaatacaatctttgacagctatggcccatgggctggagatcttagctcacgtgatcagggatccttggttgcttttgaagatggaagcactacttcttatgcacttcttaatgcacaagaaagaggtatgttgtttgtccaaccagggcaggatgtttacaaaggtcaaattgttggtatccatcagagacctggtgatttagcaattaatgtgtgcaagaaaaaggctgctacaaatgttcgttccaacaaagaaactacagtggttcttgatgaacctttaagctacagtttggatgactgcatagagtttatccaagaagatgagatagtggaggttactcctgcaagcatccgtatgtgcaagaacccaaaagtttcgaagaaaaagtaacataatcgcatccatttgtcgtcaatgcatcttctacacatagaagctgcatgctccgttgccaggtctcgtatgagtgacggctgcacggcgtcctcaagtcagtaatcaggatatttttggtggtctacagacaaagactaaaggtcgccagattaagatagaggattatatggcagttttgtgatgaataaatcagccgatacctggagtagtattatttggccacggataaggcgggcactgtttctcatctacttctccctgttctttttatttgtcgtgttttagttcaaaaatgaactagacgacaaatatttgagaacgaagttagtattacacatatattgtgtaggtcatacgtaggactataggcattgtacacgattctttcgacgctagtaaagactggaagaaagctttagcaaatggattagcacacaactgctgctacagactcttatttatttgtaattcaagccagtctataagttgcaacaaactcctgtgcaattttgaactgaagattatagggaagaacctaccattacacgaatgggc

SEQ ID NO: 49934 - DNA, 1085 bp, Zea Mays
tcaggcttcaactgatttcctagaacaaccagacggagggaacaacattgctgaaatacaagattcctaccagaggccttattggacttcggaatgcaattcttacagcttctcgtggcagagctatattgaatacaatctttgacagctatggcccatgggctggagatcttagctcacgtgatcagggatccttggttgcttttgaagatggaagcactacttcttatgcacttcttaatgcacaagaaagaggtatgttgtttgtccaaccagggcaggatgtttacaaaggtcaaattgttggtatccatcagagacctggtgatttagcaattaatgtgtgcaagaaaaaggctgctacaaatgttcgttccaacaaagaaactacagtggttcttgatgaacctttaagctacagtttggatgactgcatagagtttatccaagaagatgagatagtggaggttactcctgcaagcatccgtatgtgcaagaacccaaaagtttcgaagaaaaagtaacataatcgcatccatttgtcgtcaatgcatcttctacacatagaagctgcatgctccgttgccaggtctcgtatgagtgacggctgcacggcgtcctcaagtcagtaatcaggatatttttggtggtctacagacaaagactaaaggtcgccagattaagatagaggattatatggcagttttgtgatgaataaatcagccgatacctggagtagtattatttggccacggataaggcgggcactgtttctcatctacttctccctgttctttttatttgtcgtgttttagttcaaaaatgaactagacgacaaatatttgagaacgaagttagtattacacatatattgtgtaggtcatacgtaggactataggcattgtacacgattctttcgacgctagtaaagactggaagaaagctttagcaaatggattagcacacaactgctgctacagactcttatttatttgtaattcaagccagtctataagttgcaacaaactcctgtgcaattttgaactgaagattatagggaagaacctaccattacacgaatgggc

SEQ ID NO: 49935 - DNA, 1799 bp, Zea Mays
acatgacattatcaatatatatttactacattatcataaatatacagaaacaatattgaattacatttataccttcggcttgacagaaggtgaaagtacaagtatgatgcacgagcgagtaacagtcagcgtgaacagtacggggatattgttcatctatttataggcacagggcgcagcctgtgtaaatttacattcatgccctttatatttactattgacttatggatgaaccaatgagagctaaatagccttttcccctttaggtcggttcctttttccgccagttagccgaagctcccttacgtgtagcttcggagcaacatcagccttcgtctcaatcatgcttttcacatcgcgtatggttttaacccgagtccaaaggtacctgttcatatgtcacacttggaaaacattgttaaatcatgtttttgaggaccttcgaaagacgaaggcccccgacaatcacgctgctagcttcgtcttcacccgattcttgggatttcttgatgacgcacggaacgacgacgagatcgagtgtggagcgagctggcgaggacacgaatcctgtgagggctctggcgacgacgaagtcacgagcaagggaggatgggttcaacagctcgacggtaaacgcgagcacgcgcgaagcccgatggacgaagagcgagtgcgccacagtgacaacgagcaggcgcgcgagcgctaacgcgagtcaggggcaagcacgagtgctggggtacatcagatgacacccgtcgagcaagcagcgaggcacgcagcagcgacgacagttgaatcagacagagcattggtgaactcgatgaacacgaccatggatgcggactggcgaggataggacaacgacggctggcaagcccaacagaggagcttgcgcgacgacaaccaaacagtgaagcacgcgcgcgcaaccagggacaaggcacggagctgaagatcgacggcgttggggttcggcaacaaggcaaggtcgagcacagagagtgactagctacggatctggagcaggacgagcatgaggtcatgtcgatctgggcgcggggtacagaaacagccgaccagagcagtttcgcgcgcacggcaaccagaacaacagggagcggcgcgcggtcagcaggggagccgagctcagcatcagggcgagcgagctagggatagggaggaggagcgcgcgatgcagggagtccggtcaggaacgagttggaggaacaaggagcaggggcagtccgagctgggcgccatggaagatggtggtcggtgacggcgtttcgaaccagcgactggtggagcttagcgccatggaggagcaggagatgggaaagaggggcaagcaccagggaactgtgagagagagagatgggcgcgctgacgaggaagctccatggcgaggtctgagcagaggaaagggcggcccgacgacgagctgcaggaaggcgagctgagggacgcggcaccagggagctcgaccgggctgaggccgggcgcgggagctggagcagagcgccatgagaaggacctcggcgggcgcgcagcagaggagcaagcagcaggcgcgacagaggaggaggaaggaggtgcgtgcatcagggagcaggcgcggcaggaaaatctgagctgggaggaagctccggctaggcgaacttcgagaaggagcagagaagatcgcaaggtgcgtgggagctggagcaggggagtgcggcgtgagacagagcttggggaaagagagagttgcgcgcagagaactcagcgcgacaggaagaagaagaccgcgcgggcga

SEQ ID NO: 49936 - DNA, 1145 bp, Zea Mays
caaaacctgagtctctccaccgtacacgaaaaagacggcccgttggcccggaattattaccgtctgtttgtcctcgtctccctccgctgtccgattgtgcgctgtcgcagcctctgccctctcccagcccgctcctccatctccggtgagacgcgaattgaatcgcatcgaatccatgggcagctcctcgaataccaacacgagcggcggggccagcgacaaggaggagaagaagaaggaggacaagatcaaaggcaaggactcgtcggggccatccttcaaggagaacgaaagggtcctcgcctaccacggccccctcctctacgaggccaaggttcaaaggatcgaaaaccatgaagatgaatggcgctactttgtccattatctcggttggaataagaactgggatgaatgggttgcaaatgaccgcttgttggaattgacggaggaaaacgtgcgcaaacaacaagagcttgataagaatcaggtagttgacaaaacaatgaagtctggacggtcaacacagcataaaccaaaagtctccaatgcggatgcaaaagctgataaagatgacactaagagtctcatttcagtgaaggggaagaaacgtaaaagtcagcttgggactgagtttcctttgccactgaagaagcaacttgtggatgattgggagtttgttacgcagatgggtaagcttgtgaagctaccacgatcacctactgttgatgatattctaaagaagtacttggaacaccgggcaaagaaggatggcaagataaatgactcctatgctgagattctgaaaggattacgctgctactttgataaagcattgcctgcaatgcttttatataagaaagagcgagatcagtatgctgaagaagttaaaggtgatgtctcaccatcaactgtatatggagctgagcatctattgcgcctttttggagagccttaagtttatggaggggaaaaaagcaaaatggtctgccaccgtccaaatttccagttcataatttgatctgcactggaaatggtaacagataaaatgcttccacaaagtaaactgaaaacaaatagaaacttatgaataatagcttttccctaaattatattctgtttgccatactactaaaattacctacttg

SEQ ID NO: 49937 - DNA, 720 bp, Zea Mays
cggaattattaccgtctgtttgtcctcgtctccctccgctgtccgattgtgcgctgtcgcagcctctgccctctcccagcccgctcctccatctccggtgagacgcgaattgaatcgcatcgaatccatgggcagctcctcgaataccaacacgagcggcggggccagcgacaaggaggagaagaagaaggaggacaagatcaaaggcaaggactcgtcggggccatccttcaaggagaacgaaagggtcctcgcctaccacggccccctcctctacgaggccaaggttcaaaggatcgaaaaccatgaagatgaatggcgctactttgtccattatctcggttggaataagaactgggatgaatgggttgcaaatgaccgcttgttggaattgacggaggaaaacgtgcgcaaacaacaagagcttgataagaatcaggtagttgacaaaacaatgaagtctggacggtcaacacagcataaaccaaaagtctccaatgcggatgcaaaagctgataaagatgacactaagagtctcatttcagtgaaggggaagaaacgtaaaagtcagcttgggactgaggacaaggaaaaaagatcatcacatagtctactagtgttgcagtttcctttgccactgaagaagcaacttgtggatgattgggagtttgttacgcagatgggcccaagtggcaagctcattagctcattcagaaaaag

SEQ ID NO: 49938 - DNA, 976 bp, Zea Mays
cggaattattaccgtctgtttgtcctcgtctccctccgctgtccgattgtgcgctgtcgcagcctctgccctctcccagcccgctcctccatctccggtgagacgcgaattgaatcgcatcgaatccatgggcagctcctcgaataccaacacgagcggcggggccagcgacaaggaggagaagaagaaggaggacaagatcaaaggcaaggactcgtcggggccatccttcaaggagaacgaaagggtcctcgcctaccacggccccctcctctacgaggccaaggttcaaaggatcgaaaaccatgaagatgaatggcgctactttgtccattatctcggttggaataagaactgggatgaatgggttgcaaatgaccgcttgttggaattgacggaggaaaacgtgcgcaaacaacaagagcttgataagaatcaggtagttgacaaaacaatgaagtctggacggtcaacacagcataaaccaaaagtctccaatgcggatgcaaaagctgataaagatgacactaagagtctcatttcagtgaaggggaagaaacgtaaaagtcagcttgggactgagattcaggacaaggaaaaaagatcatcacatagtctactagtgttgcagtttcctttgccactgaagaagcaacttgtggatgattgggagtttgttacgcagatgggtaagcttgtgaagctaccacgatcacctactgttgatgatattctaaagaagtacttggaacaccgggcaaagaaggatggcaagataaatgactcctatgctgagattctgaaaggattacgctgctactttgataaagcattgcctgcaatgcttttatataagaaagagcgagatcagtatgctgaagaagttaaaggtgatgtctcaccatcaactgtatatggagctgagcatctattgcgcctttttgcttggttatatggctactgtgtgattgtcacc

SEQ ID NO: 49939 - DNA, 1395 bp, Zea Mays
ggaattattaccgtctgtttgtcctcgtctccctccgctgtccgattgtgcgctgtcgcagcctctgccctctcccagcccgctcctccatctccggtgagacgcgaattgaatcgcatcgaatccatgggcagctcctcgaataccaacacgagcggcggggccagcgacaaggaggagaagaagaaggaggacaagatcaaaggcaaggactcgtcggggccatccttcaaggagaacgaaagggtcctcgcctaccacggccccctcctctacgaggccaaggttcaaaggatcgaaaaccatgaagatgaatggcgctactttgtccattatctcggttggaataagaactgggatgaatgggttgcaaatgaccgcttgttggaattgacggaggaaaacgtgcgcaaacaacaagagcttgataagaatcaggtagttgacaaaacaatgaagtctggacggtcaacacagcataaaccaaaagtctccaatgcggatgcaaaagctgataaagatgacactaagagtctcatgaaggggaagaaacgtaaaagtcagcttgggactgagattcaggacaaggaaaaaagatcatcacatagtctactagtgttgcagtttcctttgccactgaagaagcaacttgtggatgattgggagtttgttacgcagatggcttgtgaagctaccacgatcacctactgttgatgatattctaaagaagtacttggaacaccgggcaaagaaggatggcaagataaatgactcctatgctgagattctgaaaggattacgctgctactttgataaagcattgcctgcaatgcttttatataagaaagagcgagatcagtatgctgaagaagttaaaggtgatgtctcaccatcaactgtatatggagctgagcatctattgcgcctttttgtaaaattgccagagctacttgcttctgtcaatatggaggaagatgcgttgaacaagctacagctgaaactgctggacgttctcaaaagaatcagatcaccttctttacctctgcgtacgatggttcttgtaaaggtgcagatgaggataaaaccaaatgattgcatgtgaacgttttatatcatgtaacatctttcgatggacttgtctggcactattgttgatatgaatgtcgcttaggacaacaatcggtttatgtaggatagatgctgcagattcctgaaagacggtacttgaactgcccggagcatgttgtattttcttaagatgctggaactaagacggcttagttgaattttcactatcaagtgagtctcggtcttgccccaaaaagaatgttttgtacctcctctgtcccaatttatacgacaatttataattcgtatgacttttttggaccaagt

SEQ ID NO: 49940 - DNA, 1129 bp, Zea Mays
ccgtctgtttgtcctcgtctccctccgctgtccgattgtgcgctgtcgcagcctctgccctctcccagcccgctcctccatctccggtgagacgcgaattgaatcgcatcgaatccatgggcagctcctcgaataccaacacgagcggcggggccagcgacaaggaggagaagaagaaggaggacaagatcaaaggcaaggactcgtcggggccatccttcaaggagaacgaaagggtcctcgcctaccacggccccctcctctacgaggccaaggttcaaaggatcgaaaaccatgaagatgaatggcgctactttgtccattatctcggttggaataagaactgggatgaatgggttgcaaatgaccgcttgttggaattgacggaggaaaacgtgcgcaaacaacaagagcttgataagaatcaggtagttgacaaaacaatgaagtctggacggtcaacacagcataaaccaaaagtctccaatgcggatgcaaaagctgataaagatgacactaagagtctcatttcagtgaaggggaagaaacgtaaaagtcagcttgggactgagattcaggacaaggaaaaaagatcatcacatagtctactagtgttgcagtttcctttgccactgaagaagcaacttgtggatgattgggagtttgttacgcagatggcttgtgaagctaccacgatcacctactgttgatgatattctaaagaagtacttggaacaccgggcaaagaaggatggcaagataaatgactcctatgctgagattctgaaaggattacgctgctactttgataaagcattgcctgcaatgcttttatataagaaagagcgagatcagtatgctgaagaagttaaaggtgatgtctcaccatcaactgtatatggagctgagcatctattgcgcctttttggagagccttaagtttatggaggggaaaaaagcaaaatggtctgccaccgtccaaatttccagttcataatttgatctgcactggaaatggtaacagataaaatgcttccacaaagtaaactgaaaacaaatagaaacttatgaataatagcttttccctaaattatattctgtttgccatactactaaaattacctacttg

SEQ ID NO: 49941 - DNA, 932 bp, Zea Mays
tctgtttgtcctcgtctccctccgctgtccgattgtgcgctgtcgcagcctctgccctctcccagcccgctcctccatctccggtgagacgcgaattgaatcgcatcgaatccatgggcagctcctcgaataccaacacgagcggcggggccagcgacaaggaggagaagaagaaggaggacaagatcaaaggcaaggactcgtcggggccatccttcaaggagaacgaaagggtcctcgcctaccacggccccctcctctacgaggccaaggttcaaaggatcgaaaaccatgaagatgaatggcgctactttgtccattatctcggttggaataagaactgggatgaatgggttgcaaatgaccgcttgttggaattgacggaggaaaacgtgcgcaaacaacaagagcttgataagaatcaggtagttgacaaaacaatgaagtctggacggtcaacacagcataaaccaaaagtctccaatgcggatgcaaaagctgataaagatgacactaagagtctcatttcagtgaaggggaagaaacgtaaaagtcagcttgggactgagattcaggacaaggaaaaaagatcatcacatagtctactagtgttgcagtttcctttgccactgaagaagcaacttgtggatgattgggagtttgttacgcagatggcttgtgaagctaccacgatcacctactgttgatgatattctaaagaagtacttggaacaccgggcaaagaaggatggcaagataaatgactcctatgctgagattctgaaaggattacgctgctactttgataaagcattgcctgcaatgcttttatataagaaagagcgagatcagtatgctgaagaagttaaaggtgatgtctcaccatcaactgtatatggagctgagcatctattgcgcctttttgtttgcag

SEQ ID NO: 49942 - DNA, 1393 bp, Zea Mays
ctcgtctccctccgctgtccgattgtgcgctgtcgcagcctctgccctctcccagcccgctcctccatctccggtgagacgcgaattgaatcgcatcgaatccatgggcagctcctcgaataccaacacgagcggcggggccagcgacaaggaggagaagaagaaggaggacaagatcaaaggcaaggactcgtcggggccatccttcaaggagaacgaaagggtcctcgcctaccacggccccctcctctacgaggccaaggttcaaaggatcgaaaaccatgaagatgaatggcgctactttgtccattatctcggttggaataagaactgggatgaatgggttgcaaatgaccgcttgttggaattgacggaggaaaacgtgcgcaaacaacaagagcttgataagaatcaggtagttgacaaaacaatgaagtctggacggtcaacacagcataaaccaaaagtctccaatgcggatgcaaaagctgataaagatgacactaagagtctcatttcagtgaaggggaagaaacgtaaaagtcagcttgggactgagattcaggacaaggaaaaaagatcatcacatagtctactagtgttgcagtttcctttgccactgaagaagcaacttgtggatgattgggagtttgttacgcagatgggtaagcttgtgaagctaccacgatcacctactgttgatgatattctaaagaagtacttggaacaccgggcaaagaaggatggcaagataaatgactcctatgctgagattctgaaaggattacgctgctactttgataaagcattgcctgcaatgcttttatataagaaagagcgagatcagtatgctgaagaagttaaaggtgatgtctcaccatcaactgtatatggagctgagcatctattgcgcctttttgtaaaattgccagagctacttgcttctgtcaatatggaggaagatgcgttgaacaagctacagctgaaactgctggacgttctcaagtttcttcagaagaatcagatcaccttctttacctctgcgtacgatggttcttgtaaaggtgcagatgaggataaaaccaaatgattgcatgtgaacgttttatatcatgtaacatctttcgatggacttgtctggcactattgttgatatgaatgtcgcttaggacaacaatcggtttatgtaggatagatgctgcagattcctgaaagacggtacttgaactgcccggagcatgttgtattttcttaagatgctggaactaagacggcttagttgaattttcactatcaagtgagtctcggtcttgccccaaaaagaatgttttgtacctcctctgtcccaatttatacgacaatttataattcgtatgacttttttggaccaagt

SEQ ID NO: 49943 - DNA, 1099 bp, Zea Mays
gtccgattgtgcgctgtcgcagcctctgccctctcccagcccgctcctccatctccggtgagacgcgaattgaatcgcatcgaatccatgggcagctcctcgaataccaacacgagcggcggggccagcgacaaggaggagaagaagaaggaggacaagatcaaaggcaaggactcgtcggggccatccttcaaggagaacgaaagggtcctcgcctaccacggccccctcctctacgaggccaaggttcaaaggatcgaaaaccatgaagatgaatggcgctactttgtccattatctcggttggaataagaactgggatgaatgggttgcaaatgaccgcttgttggaattgacggaggaaaacgtgcgcaaacaacaagagcttgataagaatcaggtagttgacaaaacaatgaagtctggacggtcaacacagcataaaccaaaagtctccaatgcggatgcaaaagctgataaagatgacactaagagtctcatgaaggggaagaaacgtaaaagtcagcttgggactgagattcaggacaaggaaaaaagatcatcacatagtctactagtgttgcagtttcctttgccactgaagaagcaacttgtggatgattgggagtttgttacgcagatgggtaagcttgtgaagctaccacgatcacctactgttgatgatattctaaagaagtacttggaacaccgggcaaagaaggatggcaagataaatgactcctatgctgagattctgaaaggattacgctgctactttgataaagcattgcctgcaatgcttttatataagaaagagcgagatcagtatgctgaagaagttaaaggtgatgtctcaccatcaactgtatatggagctgagcatctattgcgcctttttggagagccttaagtttatggaggggaaaaaagcaaaatggtctgccaccgtccaaatttccagttcataatttgatctgcactggaaatggtaacagataaaatgcttccacaaagtaaactgaaaacaaatagaaacttatgaataatagcttttccctaaattatattctgtttgccatactactaaaattacctacttg

SEQ ID NO: 49944 - DNA, 1308 bp, Zea Mays
gtccgattgtgcgctgtcgcagcctctgccctctcccagcccgctcctccatctccggtgagacgcgaattgaatcgcatcgaatccatgggcagctcctcgaataccaacacgagcggcggggccagcgacaaggaggagaagaagaaggaggacaagatcaaaggcaaggactcgtcggggccatccttcaaggagaacgaaagggtcctcgcctaccacggccccctcctctacgaggccaaggttcaaaggatcgaaaaccatgaagatgaatggcgctactttgtccattatctcggttggaataagaactgggatgaatgggttgcaaatgaccgcttgttggaattgacggaggaaaacgtgcgcaaacaacaagagcttgataagaatcaggtagttgacaaaacaatgaagtctggacggtcaacacagcataaaccaaaagtctccaatgcggatgcaaaagctgataaagatgacactaagagtctcatgaaggggaagaaacgtaaaagtcagcttgggactgagtttcctttgccactgaagaagcaacttgtggatgattgggagtttgttacgcagatggcttgtgaagctaccacgatcacctactgttgatgatattctaaagaagtacttggaacaccgggcaaagaaggatggcaagataaatgactcctatgctgagattctgaaaggattacgctgctactttgataaagcattgcctgcaatgcttttatataagaaagagcgagatcagtatgctgaagaagttaaaggtgatgtctcaccatcaactgtatatggagctgagcatctattgcgcctttttgtaaaattgccagagctacttgcttctgtcaatatggaggaagatgcgttgaacaagctacagctgaaactgctggacgttctcaaaagaatcagatcaccttctttacctctgcgtacgatggttcttgtaaaggtgcagatgaggataaaaccaaatgattgcatgtgaacgttttatatcatgtaacatctttcgatggacttgtctggcactattgttgatatgaatgtcgcttaggacaacaatcggtttatgtaggatagatgctgcagattcctgaaagacggtacttgaactgcccggagcatgttgtattttcttaagatgctggaactaagacggcttagttgaattttcactatcaagtgagtctcggtcttgccccaaaaagaatgttttgtacctcctctgtcccaatttatacgacaatttataattcgtatgacttttttggaccaagt

SEQ ID NO: 49945 - DNA, 1366 bp, Zea Mays
gtccgattgtgcgctgtcgcagcctctgccctctcccagcccgctcctccatctccggtgagacgcgaattgaatcgcatcgaatccatgggcagctcctcgaataccaacacgagcggcggggccagcgacaaggaggagaagaagaaggaggacaagatcaaaggcaaggactcgtcggggccatccttcaaggagaacgaaagggtcctcgcctaccacggccccctcctctacgaggccaaggttcaaaggatcgaaaaccatgaagatgaatggcgctactttgtccattatctcggttggaataagaactgggatgaatgggttgcaaatgaccgcttgttggaattgacggaggaaaacgtgcgcaaacaacaagagcttgataagaatcaggtagttgacaaaacaatgaagtctggacggtcaacacagcataaaccaaaagtctccaatgcggatgcaaaagctgataaagatgacactaagagtctcatgaaggggaagaaacgtaaaagtcagcttgggactgagattcaggacaaggaaaaaagatcatcacatagtctactagtgttgcagtttcctttgccactgaagaagcaacttgtggatgattgggagtttgttacgcagatggcttgtgaagctaccacgatcacctactgttgatgatattctaaagaagtacttggaacaccgggcaaagaaggatggcaagataaatgactcctatgctgagattctgaaaggattacgctgctactttgataaagcattgcctgcaatgcttttatataagaaagagcgagatcagtatgctgaagaagttaaaggtgatgtctcaccatcaactgtatatggagctgagcatctattgcgcctttttgtaaaattgccagagctacttgcttctgtcaatatggaggaagatgcgttgaacaagctacagctgaaactgctggacgttctcaagtttcttcagaagaatcagatcaccttctttacctctgcgtacgatggttcttgtaaaggtgcagatgaggataaaaccaaatgattgcatgtgaacgttttatatcatgtaacatctttcgatggacttgtctggcactattgttgatatgaatgtcgcttaggacaacaatcggtttatgtaggatagatgctgcagattcctgaaagacggtacttgaactgcccggagcatgttgtattttcttaagatgctggaactaagacggcttagttgaattttcactatcaagtgagtctcggtcttgccccaaaaagaatgttttgtacctcctctgtcccaatttatacgacaatttataattcgtatgacttttttggaccaagt

SEQ ID NO: 49946 - DNA, 1372 bp, Zea Mays
gtccgattgtgcgctgtcgcagcctctgccctctcccagcccgctcctccatctccggtgagacgcgaattgaatcgcatcgaatccatgggcagctcctcgaataccaacacgagcggcggggccagcgacaaggaggagaagaagaaggaggacaagatcaaaggcaaggactcgtcggggccatccttcaaggagaacgaaagggtcctcgcctaccacggccccctcctctacgaggccaaggttcaaaggatcgaaaaccatgaagatgaatggcgctactttgtccattatctcggttggaataagaactgggatgaatgggttgcaaatgaccgcttgttggaattgacggaggaaaacgtgcgcaaacaacaagagcttgataagaatcaggtagttgacaaaacaatgaagtctggacggtcaacacagcataaaccaaaagtctccaatgcggatgcaaaagctgataaagatgacactaagagtctcatttcagtgaaggggaagaaacgtaaaagtcagcttgggactgagattcaggacaaggaaaaaagatcatcacatagtctactagtgttgcagtttcctttgccactgaagaagcaacttgtggatgattgggagtttgttacgcagatggcttgtgaagctaccacgatcacctactgttgatgatattctaaagaagtacttggaacaccgggcaaagaaggatggcaagataaatgactcctatgctgagattctgaaaggattacgctgctactttgataaagcattgcctgcaatgcttttatataagaaagagcgagatcagtatgctgaagaagttaaaggtgatgtctcaccatcaactgtatatggagctgagcatctattgcgcctttttgtaaaattgccagagctacttgcttctgtcaatatggaggaagatgcgttgaacaagctacagctgaaactgctggacgttctcaagtttcttcagaagaatcagatcaccttctttacctctgcgtacgatggttcttgtaaaggtgcagatgaggataaaaccaaatgattgcatgtgaacgttttatatcatgtaacatctttcgatggacttgtctggcactattgttgatatgaatgtcgcttaggacaacaatcggtttatgtaggatagatgctgcagattcctgaaagacggtacttgaactgcccggagcatgttgtattttcttaagatgctggaactaagacggcttagttgaattttcactatcaagtgagtctcggtcttgccccaaaaagaatgttttgtacctcctctgtcccaatttatacgacaatttataattcgtatgacttttttggaccaagt

SEQ ID NO: 49947 - DNA, 1323 bp, Zea Mays
gtccgattgtgcgctgtcgcagcctctgccctctcccagcccgctcctccatctccggtgagacgcgaattgaatcgcatcgaatccatgggcagctcctcgaataccaacacgagcggcggggccagcgacaaggaggagaagaagaaggaggacaagatcaaaggcaaggactcgtcggggccatccttcaaggagaacgaaagggtcctcgcctaccacggccccctcctctacgaggccaaggttcaaaggatcgaaaaccatgaagatgaatggcgctactttgtccattatctcggttggaataagaactgggatgaatgggttgcaaatgaccgcttgttggaattgacggaggaaaacgtgcgcaaacaacaagagcttgataagaatcaggtagttgacaaaacaatgaagtctggacggtcaacacagcataaaccaaaagtctccaatgcggatgcaaaagctgataaagatgacactaagagtctcatgaaggggaagaaacgtaaaagtcagcttgggactgagtttcctttgccactgaagaagcaacttgtggatgattgggagtttgttacgcagatgggtaagcttgtgaagctaccacgatcacctactgttgatgatattctaaagaagtacttggaacaccgggcaaagaaggatggcaagataaatgactcctatgctgagattctgaaaggattacgctgctactttgataaagcattgcctgcaatgcttttatataagaaagagcgagatcagtatgctgaagaagttaaaggtgatgtctcaccatcaactgtatatggagctgagcatctattgcgcctttttgtaaaattgccagagctacttgcttctgtcaatatggaggaagatgcgttgaacaagctacagctgaaactgctggacgttctcaagtttcttcagaagaatcagatcaccttctttacctctgcgtacgatggttcttgtaaaggtgcagatgaggataaaaccaaatgattgcatgtgaacgttttatatcatgtaacatctttcgatggacttgtctggcactattgttgatatgaatgtcgcttaggacaacaatcggtttatgtaggatagatgctgcagattcctgaaagacggtacttgaactgcccggagcatgttgtattttcttaagatgctggaactaagacggcttagttgaattttcactatcaagtgagtctcggtcttgccccaaaaagaatgttttgtacctcctctgtcccaatttatacgacaatttataattcgtatgacttttttggaccaagt

SEQ ID NO: 49948 - DNA, 1367 bp, Zea Mays
gtccgattgtgcgctgtcgcagcctctgccctctcccagcccgctcctccatctccggtgagacgcgaattgaatcgcatcgaatccatgggcagctcctcgaataccaacacgagcggcggggccagcgacaaggaggagaagaagaaggaggacaagatcaaaggcaaggactcgtcggggccatccttcaaggagaacgaaagggtcctcgcctaccacggccccctcctctacgaggccaaggttcaaaggatcgaaaaccatgaagatgaatggcgctactttgtccattatctcggttggaataagaactgggatgaatgggttgcaaatgaccgcttgttggaattgacggaggaaaacgtgcgcaaacaacaagagcttgataagaatcaggtagttgacaaaacaatgaagtctggacggtcaacacagcataaaccaaaagtctccaatgcggatgcaaaagctgataaagatgacactaagagtctcatttcagtgaaggggaagaaacgtaaaagtcagcttgggactgagattcaggacaaggaaaaaagatcatcacatagtctactagtgttgcagtttcctttgccactgaagaagcaacttgtggatgattgggagtttgttacgcagatgggtaagcttgtgaagctaccacgatcacctactgttgatgatattctaaagaagtacttggaacaccgggcaaagaaggatggcaagataaatgactcctatgctgagattctgaaaggattacgctgctactttgataaagcattgcctgcaatgcttttatataagaaagagcgagatcagtatgctgaagaagttaaaggtgatgtctcaccatcaactgtatatggagctgagcatctattgcgcctttttgtaaaattgccagagctacttgcttctgtcaatatggaggaagatgcgttgaacaagctacagctgaaactgctggacgttctcaaaagaatcagatcaccttctttacctctgcgtacgatggttcttgtaaaggtgcagatgaggataaaaccaaatgattgcatgtgaacgttttatatcatgtaacatctttcgatggacttgtctggcactattgttgatatgaatgtcgcttaggacaacaatcggtttatgtaggatagatgctgcagattcctgaaagacggtacttgaactgcccggagcatgttgtattttcttaagatgctggaactaagacggcttagttgaattttcactatcaagtgagtctcggtcttgccccaaaaagaatgttttgtacctcctctgtcccaatttatacgacaatttataattcgtatgacttttttggaccaagt

SEQ ID NO: 49949 - DNA, 1361 bp, Zea Mays
gtccgattgtgcgctgtcgcagcctctgccctctcccagcccgctcctccatctccggtgagacgcgaattgaatcgcatcgaatccatgggcagctcctcgaataccaacacgagcggcggggccagcgacaaggaggagaagaagaaggaggacaagatcaaaggcaaggactcgtcggggccatccttcaaggagaacgaaagggtcctcgcctaccacggccccctcctctacgaggccaaggttcaaaggatcgaaaaccatgaagatgaatggcgctactttgtccattatctcggttggaataagaactgggatgaatgggttgcaaatgaccgcttgttggaattgacggaggaaaacgtgcgcaaacaacaagagcttgataagaatcaggtagttgacaaaacaatgaagtctggacggtcaacacagcataaaccaaaagtctccaatgcggatgcaaaagctgataaagatgacactaagagtctcatgaaggggaagaaacgtaaaagtcagcttgggactgagattcaggacaaggaaaaaagatcatcacatagtctactagtgttgcagtttcctttgccactgaagaagcaacttgtggatgattgggagtttgttacgcagatgggtaagcttgtgaagctaccacgatcacctactgttgatgatattctaaagaagtacttggaacaccgggcaaagaaggatggcaagataaatgactcctatgctgagattctgaaaggattacgctgctactttgataaagcattgcctgcaatgcttttatataagaaagagcgagatcagtatgctgaagaagttaaaggtgatgtctcaccatcaactgtatatggagctgagcatctattgcgcctttttgtaaaattgccagagctacttgcttctgtcaatatggaggaagatgcgttgaacaagctacagctgaaactgctggacgttctcaaaagaatcagatcaccttctttacctctgcgtacgatggttcttgtaaaggtgcagatgaggataaaaccaaatgattgcatgtgaacgttttatatcatgtaacatctttcgatggacttgtctggcactattgttgatatgaatgtcgcttaggacaacaatcggtttatgtaggatagatgctgcagattcctgaaagacggtacttgaactgcccggagcatgttgtattttcttaagatgctggaactaagacggcttagttgaattttcactatcaagtgagtctcggtcttgccccaaaaagaatgttttgtacctcctctgtcccaatttatacgacaatttataattcgtatgacttttttggaccaagt

SEQ ID NO: 49950 - DNA, 1366 bp, Zea Mays
gtccgattgtgcgctgtcgcagcctctgccctctcccagcccgctcctccatctccggtgagacgcgaattgaatcgcatcgaatccatgggcagctcctcgaataccaacacgagcggcggggccagcgacaaggaggagaagaagaaggaggacaagatcaaaggcaaggactcgtcggggccatccttcaaggagaacgaaagggtcctcgcctaccacggccccctcctctacgaggccaaggttcaaaggatcgaaaaccatgaagatgaatggcgctactttgtccattatctcggttggaataagaactgggatgaatgggttgcaaatgaccgcttgttggaattgacggaggaaaacgtgcgcaaacaacaagagcttgataagaatcaggtagttgacaaaacaatgaagtctggacggtcaacacagcataaaccaaaagtctccaatgcggatgcaaaagctgataaagatgacactaagagtctcatttcagtgaaggggaagaaacgtaaaagtcagcttgggactgaggacaaggaaaaaagatcatcacatagtctactagtgttgcagtttcctttgccactgaagaagcaacttgtggatgattgggagtttgttacgcagatggcttgtgaagctaccacgatcacctactgttgatgatattctaaagaagtacttggaacaccgggcaaagaaggatggcaagataaatgactcctatgctgagattctgaaaggattacgctgctactttgataaagcattgcctgcaatgcttttatataagaaagagcgagatcagtatgctgaagaagttaaaggtgatgtctcaccatcaactgtatatggagctgagcatctattgcgcctttttgtaaaattgccagagctacttgcttctgtcaatatggaggaagatgcgttgaacaagctacagctgaaactgctggacgttctcaagtttcttcagaagaatcagatcaccttctttacctctgcgtacgatggttcttgtaaaggtgcagatgaggataaaaccaaatgattgcatgtgaacgttttatatcatgtaacatctttcgatggacttgtctggcactattgttgatatgaatgtcgcttaggacaacaatcggtttatgtaggatagatgctgcagattcctgaaagacggtacttgaactgcccggagcatgttgtattttcttaagatgctggaactaagacggcttagttgaattttcactatcaagtgagtctcggtcttgccccaaaaagaatgttttgtacctcctctgtcccaatttatacgacaatttataattcgtatgacttttttggaccaagt

SEQ ID NO: 49951 - DNA, 1360 bp, Zea Mays
gtccgattgtgcgctgtcgcagcctctgccctctcccagcccgctcctccatctccggtgagacgcgaattgaatcgcatcgaatccatgggcagctcctcgaataccaacacgagcggcggggccagcgacaaggaggagaagaagaaggaggacaagatcaaaggcaaggactcgtcggggccatccttcaaggagaacgaaagggtcctcgcctaccacggccccctcctctacgaggccaaggttcaaaggatcgaaaaccatgaagatgaatggcgctactttgtccattatctcggttggaataagaactgggatgaatgggttgcaaatgaccgcttgttggaattgacggaggaaaacgtgcgcaaacaacaagagcttgataagaatcaggtagttgacaaaacaatgaagtctggacggtcaacacagcataaaccaaaagtctccaatgcggatgcaaaagctgataaagatgacactaagagtctcatgaaggggaagaaacgtaaaagtcagcttgggactgaggacaaggaaaaaagatcatcacatagtctactagtgttgcagtttcctttgccactgaagaagcaacttgtggatgattgggagtttgttacgcagatggcttgtgaagctaccacgatcacctactgttgatgatattctaaagaagtacttggaacaccgggcaaagaaggatggcaagataaatgactcctatgctgagattctgaaaggattacgctgctactttgataaagcattgcctgcaatgcttttatataagaaagagcgagatcagtatgctgaagaagttaaaggtgatgtctcaccatcaactgtatatggagctgagcatctattgcgcctttttgtaaaattgccagagctacttgcttctgtcaatatggaggaagatgcgttgaacaagctacagctgaaactgctggacgttctcaagtttcttcagaagaatcagatcaccttctttacctctgcgtacgatggttcttgtaaaggtgcagatgaggataaaaccaaatgattgcatgtgaacgttttatatcatgtaacatctttcgatggacttgtctggcactattgttgatatgaatgtcgcttaggacaacaatcggtttatgtaggatagatgctgcagattcctgaaagacggtacttgaactgcccggagcatgttgtattttcttaagatgctggaactaagacggcttagttgaattttcactatcaagtgagtctcggtcttgccccaaaaagaatgttttgtacctcctctgtcccaatttatacgacaatttataattcgtatgacttttttggaccaagt

SEQ ID NO: 49952 - DNA, 681 bp, Zea Mays
cacacttctgtgggtaagtgtttggttcgtgactaactttaggcagccacaaaaagtgtggcgaggttccctgagcttgccatactttttttcgccgcatctggggcgctcgttttcgatgccccagcaccgctacgcgccgcacttcgcccccttctctccctctcatgccgctggttgatctctcgtcatctcctcctccaagcacggatcttctcgtcgtctcctccaagcacggaccaggagcactgaaattctatctcaaccggttctgccgactgggtaacttgaattctaaaggttgatccaagcaggaggtgaatgtgtgatggttggttattttgcatttcttctaggttgatgcatgacggttcatggagaaggctggtggttgtgatagctatcacacactcttttggttaataattagatactctttttgttgagcaatgtgaacctttaatggtgtttatgggtcttgtggagttgtgatggggctattatgaagatgctatggcctgttatggatgattggacatgttatgggctctatatattaatctgttattttggtttcctcatattcatcatgtcatggggctattatgaaggttcttgcagctgctgaagtgcatctgtgatatttgtaaataagttattggtaactgaaatgaaggaaag

SEQ ID NO: 49953 - DNA, 436 bp, Zea Mays
atttgagtcatgggtattgaagcatttaagtgatttggacctgtgaatcgactaggttgatccaagcaggaggtgaatgtgtgatggttggttattttgcatttcttctaggttgatgcatgacggttcatggagaaggctggtggttgtgatagctatcacacactcttttggttaataattagatactctttttgttgagcaatgtgaacctttaatggtgtttatgggtcttgtggagttgtgatggggctattatgaagatgctatggcctgttatggatgattggacatgttatgggctctatatattaatctgttattttggtttcctcatattcatcatgtcatggggctattatgaaggttcttgcagctgctgaagtgcatctgtgatatttgtaaataagttattggtaactgaaatgaaggaaag

SEQ ID NO: 49954 - DNA, 1671 bp, Zea Mays
cagaatcctgaagcgactattgtccctttcaattcccctcccctacctgaggccctgaagcctgggtagccgatccatccgaaattccgaaacccctgcggcatgggaatggaaatcgagaggccgccgcagccaccgcctgtcgctgctgccatggctgcggcggcagccatttccacggtgctcggcgacgacgaccttctgcgcgagatcctcgtacgcctcggcctccccaccagtctcctccgtgccgctctcgtctgccggcgctggctccgccacgcctccgatccggccttcctccgccgattccgtgacctcaacccgccccgtctcctcggcgtctacctctccacctcgtccggccccgccccgcgcctgcggttcctcccgattcgtccggtcccggagctcgccgccgccgcccgccgcgccggctccttcttcaacgccttcaagggatcctcggccgctgtctacgacagccgcggtggccgcctcctcgtcaccaccttcgatgaccgccacgactccacgcaccaggtctgccgcccgctgtctccgggcggggacaccaccgtggttccgccgcccccgccgccgccgccgatccagctcaacaacgacgaggagtgcctcatctaccactacggtgaattccttcgcgatgatggcgacggccgctcctacttctgcgtggtgatggggtttagtgagctgcagaccaccgtgtacttgtacgagttgcacaacatcaactgggttgtcaaagcctcggcggccgtgttgctcgctttattgccaccgaaaccaagggttatgctcttcgatagcgccaacttctacatgttgtccgcaaccaacaggattcttgtgtgtgattttccatcctcaagtatctcagtcatggagctccccaatggggtggagaacaagcccggtggttgcatcatgctttccaggggagatagttctggaatctttctgatctatgtcaaagagtttcagctacacatcttccaccataggatgggcatcaattatccaagcaactggtccctagtggattctgtttctttgcgtcaggtatgcgccaatcttgatatggcaaggtggccatctgtgaatggacctagtgctggtgttaaattgtgcgcagttggggacaatgcggagtttgtgctcttggagatatttggtactattgtattcttggatattacaagcaggcaagcagagaaggtgtatgagctgacaccagaggataaagagttggtcagtgtccgccccctgatgttgatatggcctcctgttttccctcagttgaaggatgcatattatgacaaaaaagagtgatgcaaagcttcagaggaaccagttcaaagctcaacctgcaggtccaaagatgagaatgagaagcataacaatatcactgaagaggcttcatgatgagcacaccctgttccgaggtggcgaggtgtagtaaaaacgagagagaataaagggaggctagttcatgtaaataactttgaataaaaaatagttgttaaactacttgtttagatcagatcatttgatgtaaataatgatttatcgaaacccgacggcactttctaattattcgtatgccaggcttttctttataatctataataagattttcttagatcg

SEQ ID NO: 49955 - DNA, 3661 bp, Zea Mays
tcttcaatatggcagatgttataatactagaatcctaattatctgtcttggagtaataattttaagaagttggaatacctgagttttttttaaaaaaaactcgacagacggttgtaatgggaaacaaaaaaaaaatccaaagataatgtccctatctttagggccggtgctttctcacgggaaaagaaggaaaaaaaagcctcgtccagtcgtcccagtcccgaccccttccgcctccgggactcctgcctacgtcataccatcgggcagccgaaccctcgattggccgccgccgccgtaagagagaccgacgtcctccttccactgccgagcgacacctcgaatttctctctcatcgtcatcccttctcccctttattcgcgtcgcgcatctgggagatccagccagcgtgatttgtgttatcggtagctttggatttgtttgtgacccggcgctaacccaacccatccggtggtggattcagcttcttggataccttggtggcggatgttctgctcgtagcaacttgtctcccagaatttttttgggggctagacgctacccctgccatggaatcagattattgatatccctgtacaggcgataccaaatttgatgcatcacagtatgctttctttggcaacaatgccgtggaggaggttgaactaggtggattggatgatgatgatgatgctgcatttattgagcacgaagatgaagaaaaccctctttatgggagggataatatgttggaggagggtgtaggttcatttgctgacattgatgatcttgctggaactttctcgaagctgaccagaatagtcaatggaccaaagcaaccagtagtagttagtcatagtggatcaatttctagacaaagttctaatgcagagtgggtgcaagagtctgaacttccatattggcctacacagcctgtattggacactgatcacgggctggataaaaagaattggtggtcccaaccaccccattcagtcaacttcattgactatagactgcagaggacatcgtcatccccacagcaagatgctcagcataatcctgttgaacctattcttgaagcaaagccatctcctttacatagaacatcaacgtacccacaacaagaacctcagtacagtaatactgaaccaattcctgtgcccaagtcatcattcatttcatgtcctccatctggtgcagcatctcattcttcacctagtcagccacatcatgtgaacatgccatctcctcccactgcattccagttgcatatgtcttctgcacaaaatgatctactccttccccagttccatcatggaggtacgcctccagggcctccatttggtagacagaatcatgttttaaataatggatcgatgcatggaaagggtcccaggtttatgccaggtttgatgcctcatcaattgcaatgtcccaatggactgatgccacctcagatgcagccacctcatcaacatggaatgctgccaatacaacagtccccaccacagttctcacaactacatgcacggatgattggtccccatcattccccaccacaaagcatgcagatgtttggtcctcaacatccttcttcacaagtgatgagtagatttgatgcaaactttgctatgcctgacttgagtgatccaagagcaagatcaatgttgcaacatgaaaggctgggacagcgttatcctcaccaaggttatgagctcaataatattaggatagataatggatggtcacggttcagatccaagtacatgtgtactgaagaaatcgagaacattgcaaggatgcagcaggctgccacacacatcaatgacccgtatattgatgattactaccatcaagcttgtttagcaaaaaaatcagcaggggctcaactaaagcaccacttttgtccaaccttgattagagatccatcttcacgtgcacgcagtaaggatgagccacatgcatatctacaggttgatgctcttgggaggcttccattttcttctatccgcaggcctcgtccgcttcttgatgttgaacaagcctctgcaccaagtgataatgctgaaaaatctgtgtcaaagcctcttgaccaagagcccatgcttgctgctaggatcacaattgaagacggactttgcctactgcttgatgttgatgatattgatcgtctgctgcaatttagccagcagcaagatggtggtttgcaactgagaaacagaagacaggggctcctcgagcagcttgcagaatcactgcaattagttgatctccttgcaccaaataagaattcacctgtgtctccgtatgatgatttggtgtttcttcgcatagtcactctatcaaagggccagaagctactttcccattaccttgagcttctgacatcaggcagtgagcttgcaaggatagcttgcatggcagtcttccggcatctaagatccatatttggaaatatgccctctgatatcagtgcagtggagacaatgaatagacttgcaaaagctgtatccgcacatattgttcagatggatttgagtgatctcagtgcttgccttgctgctgttgtgtgttcatcattgcaaccacctcttcgacctctgggatccccagcaggtgattgggcttctgtcatcataaagtatgtattggacagagcaacagttctactcactgatcaccatgtggcttctaactacagcatgcggaatcgatctctatggcaggcatcattcgacgccttttttgggctgcttacacagtactgcatgagtaagtttgatcgtgtggttcatactgcccaattgcaacctgctgctgcaaccgttataaccagggaaatgccagtagagcttctgcgtgccagcctccctcataccaatgaggctcaacgcaagcaattgctcagttttgctcaacgcactgtgcctgttggtacccacagttctcatgggtcttggtagtggaagcatcgagttcttattagaactgagtactcgctaaaaatggctctttaggggacctgttatgcttcccctgaaagaagagagggttaaacttgtcactagtactatgaatatcaaaaaacaagagtaaagatggttggagcatcaaaatggtaatactcaacatcaaattttgtgtcactcaaacatgtttgcatggattacttttgtagggtagtcagatgtctgcgtcaattttgtcaatacctgtgttggttattgcaaaatggttcctgtgggtctgttgctcttaagaggaatccgcaattggtctgtagcggttacttgaagacactgtttaattgctcttcaaggtggttcttttcaaggagtagttgccttggcctcaagatgtggaagttggcatagccacaacacgtcgttaagttcttcaggaacaatgcggttgctatggaagttgtaaaatggtagtattattgttttgcgacggccttttgccttttgagaactacaactgatgttgcccatttctctatgcttgatgtgcagaaagtggataaagcttgcatgcatccttactgaattgtgacatttatttggatagataggcgctcctttctttaaagcactgattttgtacggaaactctgatatagctaatctttgggtgcctgctgaaatgatgggctagg

SEQ ID NO: 49956 - DNA, 3486 bp, Zea Mays
tcttcaatatggcagatgttataatactagaatcctaattatctgtcttggagtaataattttaagaagttggaatacctgagttttttttaaaaaaaactcgacagacggttgtaatgggaaacaaaaaaaaaatccaaagataatgtccctatctttagggccggtgctttctcacgggaaaagaaggaaaaaaaagcctcgtccagtcgtcccagtcccgaccccttccgcctccgggactcctgcctacgtcataccatcgggcagccgaaccctcgattggccgccgccgccgtaagagagaccgacgtcctccttccactgccgagcgacacctcgaatttctctctcatcgtcatcccttctcccctttattcgcgtcgcgcatctgggagatccagccagcgtgatttgtgttatcggcgataccaaatttgatgcatcacagtatgctttctttggcaacaatgccgtggaggaggttgaactaggtggattggatgatgatgatgatgctgcatttattgagcacgaagatgaagaaaaccctctttatgggagggataatatgttggaggagggtgtaggttcatttgctgacattgatgatcttgctggaactttctcgaagctgaccagaatagtcaatggaccaaagcaaccagtagtagttagtcatagtggatcaatttctagacaaagttctaatgcagagtgggtgcaagagtctgaacttccatattggcctacacagcctgtattggacactgatcacgggctggataaaaagaattggtggtcccaaccaccccattcagtcaacttcattgactatagactgcagaggacatcgtcatccccacagcaagatgctcagcataatcctgttgaacctattcttgaagcaaagccatctcctttacatagaacatcaacgtacccacaacaagaacctcagtacagtaatactgaaccaattcctgtgcccaagtcatcattcatttcatgtcctccatctggtgcagcatctcattcttcacctagtcagccacatcatgtgaacatgccatctcctcccactgcattccagttgcatatgtcttctgcacaaaatgatctactccttccccagttccatcatggaggtacgcctccagggcctccatttggtagacagaatcatgttttaaataatggatcgatgcatggaaagggtcccaggtttatgccaggtttgatgcctcatcaattgcaatgtcccaatggactgatgccacctcagatgcagccacctcatcaacatggaatgctgccaatacaacagtccccaccacagttctcacaactacatgcacggatgattggtccccatcattccccaccacaaagcatgcagatgtttggtcctcaacatccttcttcacaagtgatgagtagatttgatgcaaactttgctatgcctgacttgagtgatccaagagcaagatcaatgttgcaacatgaaaggctgggacagcgttatcctcaccaaggttatgagctcaataatattaggatagataatggatggtcacggttcagatccaagtacatgtgtactgaagaaatcgagaacattgcaaggatgcagcaggctgccacacacatcaatgacccgtatattgatgattactaccatcaagcttgtttagcaaaaaaatcagcaggggctcaactaaagcaccacttttgtccaaccttgattagagatccatcttcacgtgcacgcagtaaggatgagccacatgcatatctacaggttgatgctcttgggaggcttccattttcttctatccgcaggcctcgtccgcttcttgatgttgaacaagcctctgcaccaagtgataatgctgaaaaatctgtgtcaaagcctcttgaccaagagcccatgcttgctgctaggatcacaattgaagacggactttgcctactgcttgatgttgatgatattgatcgtctgctgcaatttagccagcagcaagatggtggtttgcaactgagaaacagaagacaggggctcctcgagcagcttgcagaatcactgcaattagttgatctccttgcaccaaataagaattcacctgtgtctccgtatgatgatttggtgtttcttcgcatagtcactctatcaaagggccagaagctactttcccattaccttgagcttctgacatcaggcagtgagcttgcaaggatagcttgcatggcagtcttccggcatctaagatccatatttggaaatatgccctctgatatcagtgcagtggagacaatgaatagacttgcaaaagctgtatccgcacatattgttcagatggatttgagtgatctcagtgcttgccttgctgctgttgtgtgttcatcattgcaaccacctcttcgacctctgggatccccagcaggtgattgggcttctgtcatcataaagtatgtattggacagagcaacagttctactcactgatcaccatgtggcttctaactacagcatgcggaatcgatctctatggcaggcatcattcgacgccttttttgggctgcttacacagtactgcatgagtaagtttgatcgtgtggttcatactgcccaattgcaacctgctgctgcaaccgttataaccagggaaatgccagtagagcttctgcgtgccagcctccctcataccaatgaggctcaacgcaagcaattgctcagttttgctcaacgcactgtgcctgttggtacccacagttctcatgggtcttggtagtggaagcatcgagttcttattagaactgagtactcgctaaaaatggctctttaggggacctgttatgcttcccctgaaagaagagagggttaaacttgtcactagtactatgaatatcaaaaaacaagagtaaagatggttggagcatcaaaatggtaatactcaacatcaaattttgtgtcactcaaacatgtttgcatggattacttttgtagggtagtcagatgtctgcgtcaattttgtcaatacctgtgttggttattgcaaaatggttcctgtgggtctgttgctcttaagaggaatccgcaattggtctgtagcggttacttgaagacactgtttaattgctcttcaaggtggttcttttcaaggagtagttgccttggcctcaagatgtggaagttggcatagccacaacacgtcgttaagttcttcaggaacaatgcggttgctatggaagttgtaaaatggtagtattattgttttgcgacggccttttgccttttgagaactacaactgatgttgcccatttctctatgcttgatgtgcagaaagtggataaagcttgcatgcatccttactgaattgtgacatttatttggatagataggcgctcctttctttaaagcactgattttgtacggaaactctgatatagctaatctttgggtgcctgctgaaatgatgggctagg

SEQ ID NO: 49957 - DNA, 3581 bp, Zea Mays
tcttcaatatggcagatgttataatactagaatcctaattatctgtcttggagtaataattttaagaagttggaatacctgagttttttttaaaaaaaactcgacagacggttgtaatgggaaacaaaaaaaaaatccaaagataatgtccctatctttagggccggtgctttctcacgggaaaagaaggaaaaaaaagcctcgtccagtcgtcccagtcccgaccccttccgcctccgggactcctgcctacgtcataccatcgggcagccgaaccctcgattggccgccgccgccgtaagagagaccgacgtcctccttccactgccgagcgacacctcgaatttctctctcatcgtcatcccttctcccctttattcgcgtcgcgcatctgggagatccagccagcgtgatttgtgttatcgcttcttggataccttggtggcggatgttctgctcgtagcaacttgtctcccagaatttttttgggggctagacgctacccctgccatggaatcaggcgataccaaatttgatgcatcacagtatgctttctttggcaacaatgccgtggaggaggttgaactaggtggattggatgatgatgatgatgctgcatttattgagcacgaagatgaagaaaaccctctttatgggagggataatatgttggaggagggtgtaggttcatttgctgacattgatgatcttgctggaactttctcgaagctgaccagaatagtcaatggaccaaagcaaccagtagtagttagtcatagtggatcaatttctagacaaagttctaatgcagagtgggtgcaagagtctgaacttccatattggcctacacagcctgtattggacactgatcacgggctggataaaaagaattggtggtcccaaccaccccattcagtcaacttcattgactatagactgcagaggacatcgtcatccccacagcaagatgctcagcataatcctgttgaacctattcttgaagcaaagccatctcctttacatagaacatcaacgtacccacaacaagaacctcagtacagtaatactgaaccaattcctgtgcccaagtcatcattcatttcatgtcctccatctggtgcagcatctcattcttcacctagtcagccacatcatgtgaacatgccatctcctcccactgcattccagttgcatatgtcttctgcacaaaatgatctactccttccccagttccatcatggaggtacgcctccagggcctccatttggtagacagaatcatgttttaaataatggatcgatgcatggaaagggtcccaggtttatgccaggtttgatgcctcatcaattgcaatgtcccaatggactgatgccacctcagatgcagccacctcatcaacatggaatgctgccaatacaacagtccccaccacagttctcacaactacatgcacggatgattggtccccatcattccccaccacaaagcatgcagatgtttggtcctcaacatccttcttcacaagtgatgagtagatttgatgcaaactttgctatgcctgacttgagtgatccaagagcaagatcaatgttgcaacatgaaaggctgggacagcgttatcctcaccaaggttatgagctcaataatattaggatagataatggatggtcacggttcagatccaagtacatgtgtactgaagaaatcgagaacattgcaaggatgcagcaggctgccacacacatcaatgacccgtatattgatgattactaccatcaagcttgtttagcaaaaaaatcagcaggggctcaactaaagcaccacttttgtccaaccttgattagagatccatcttcacgtgcacgcagtaaggatgagccacatgcatatctacaggttgatgctcttgggaggcttccattttcttctatccgcaggcctcgtccgcttcttgatgttgaacaagcctctgcaccaagtgataatgctgaaaaatctgtgtcaaagcctcttgaccaagagcccatgcttgctgctaggatcacaattgaagacggactttgcctactgcttgatgttgatgatattgatcgtctgctgcaatttagccagcagcaagatggtggtttgcaactgagaaacagaagacaggggctcctcgagcagcttgcagaatcactgcaattagttgatctccttgcaccaaataagaattcacctgtgtctccgtatgatgatttggtgtttcttcgcatagtcactctatcaaagggccagaagctactttcccattaccttgagcttctgacatcaggcagtgagcttgcaaggatagcttgcatggcagtcttccggcatctaagatccatatttggaaatatgccctctgatatcagtgcagtggagacaatgaatagacttgcaaaagctgtatccgcacatattgttcagatggatttgagtgatctcagtgcttgccttgctgctgttgtgtgttcatcattgcaaccacctcttcgacctctgggatccccagcaggtgattgggcttctgtcatcataaagtatgtattggacagagcaacagttctactcactgatcaccatgtggcttctaactacagcatgcggaatcgatctctatggcaggcatcattcgacgccttttttgggctgcttacacagtactgcatgagtaagtttgatcgtgtggttcatactgcccaattgcaacctgctgctgcaaccgttataaccagggaaatgccagtagagcttctgcgtgccagcctccctcataccaatgaggctcaacgcaagcaattgctcagttttgctcaacgcactgtgcctgttggtacccacagttctcatgggtcttggtagtggaagcatcgagttcttattagaactgagtactcgctaaaaatggctctttaggggacctgttatgcttcccctgaaagaagagagggttaaacttgtcactagtactatgaatatcaaaaaacaagagtaaagatggttggagcatcaaaatggtaatactcaacatcaaattttgtgtcactcaaacatgtttgcatggattacttttgtagggtagtcagatgtctgcgtcaattttgtcaatacctgtgttggttattgcaaaatggttcctgtgggtctgttgctcttaagaggaatccgcaattggtctgtagcggttacttgaagacactgtttaattgctcttcaaggtggttcttttcaaggagtagttgccttggcctcaagatgtggaagttggcatagccacaacacgtcgttaagttcttcaggaacaatgcggttgctatggaagttgtaaaatggtagtattattgttttgcgacggccttttgccttttgagaactacaactgatgttgcccatttctctatgcttgatgtgcagaaagtggataaagcttgcatgcatccttactgaattgtgacatttatttggatagataggcgctcctttctttaaagcactgattttgtacggaaactctgatatagctaatctttgggtgcctgctgaaatgatgggctagg

SEQ ID NO: 49958 - DNA, 3733 bp, Zea Mays
tcttcaatatggcagatgttataatactagaatcctaattatctgtcttggagtaataattttaagaagttggaatacctgagttttttttaaaaaaaactcgacagacggttgtaatgggaaacaaaaaaaaaatccaaagataatgtccctatctttagggccggtgctttctcacgggaaaagaaggaaaaaaaagcctcgtccagtcgtcccagtcccgaccccttccgcctccgggactcctgcctacgtcataccatcgggcagccgaaccctcgattggccgccgccgccgtaagagagaccgacgtcctccttccactgccgagcgacacctcgaatttctctctcatcgtcatcccttctcccctttattcgcgtcgcgcatctgggagatccagccagcgtgatttgtgttatcggtagctttggatttgtttgtgacccggcgctaacccaacccatccggtggtggattcagcttcttggataccttggtggcggatgttctgctcgtagcaacttgtctcccagaatttttttgggggctagacgctacccctgccatggaatcaggcgataccaaatttgatgcatcacagtatgctttctttggcaacaatgccgtggaggaggttgaactaggtggattggatgatgatgatgatgctgcatttattgagcacgaagatgaagaaaaccctctttatgggagggataatatgttggaggagggtgtaggttcatttgctgacattgatgatcttgctggaactttctcgaagctgaccagaatagtcaatggaccaaagcaaccagtagtagttagtcatagtggatcaatttctagacaaagttcaggctaatttttccttttgatcatttgtggatatgcttggtccatgtattatgaaattgcaaatttgtgtttcaaccattaatgtttaggttctaatgcagagtgggtgcaagagtctgaacttccatattggcctacacagcctgtattggacactgatcacgggctggataaaaagaattggtggtcccaaccaccccattcagtcaacttcattgactatagactgcagaggacatcgtcatccccacagcaagatgctcagcataatcctgttgaacctattcttgaagcaaagccatctcctttacatagaacatcaacgtacccacaacaagaacctcagtacagtaatactgaaccaattcctgtgcccaagtcatcattcatttcatgtcctccatctggtgcagcatctcattcttcacctagtcagccacatcatgtgaacatgccatctcctcccactgcattccagttgcatatgtcttctgcacaaaatgatctactccttccccagttccatcatggaggtacgcctccagggcctccatttggtagacagaatcatgttttaaataatggatcgatgcatggaaagggtcccaggtttatgccaggtttgatgcctcatcaattgcaatgtcccaatggactgatgccacctcagatgcagccacctcatcaacatggaatgctgccaatacaacagtccccaccacagttctcacaactacatgcacggatgattggtccccatcattccccaccacaaagcatgcagatgtttggtcctcaacatccttcttcacaagtgatgagtagatttgatgcaaactttgctatgcctgacttgagtgatccaagagcaagatcaatgttgcaacatgaaaggctgggacagcgttatcctcaccaaggttatgagctcaataatattaggatagataatggatggtcacggttcagatccaagtacatgtgtactgaagaaatcgagaacattgcaaggatgcagcaggctgccacacacatcaatgacccgtatattgatgattactaccatcaagcttgtttagcaaaaaaatcagcaggggctcaactaaagcaccacttttgtccaaccttgattagagatccatcttcacgtgcacgcagtaaggatgagccacatgcatatctacaggttgatgctcttgggaggcttccattttcttctatccgcaggcctcgtccgcttcttgatgttgaacaagcctctgcaccaagtgataatgctgaaaaatctgtgtcaaagcctcttgaccaagagcccatgcttgctgctaggatcacaattgaagacggactttgcctactgcttgatgttgatgatattgatcgtctgctgcaatttagccagcagcaagatggtggtttgcaactgagaaacagaagacaggggctcctcgagcagcttgcagaatcactgcaattagttgatctccttgcaccaaataagaattcacctgtgtctccgtatgatgatttggtgtttcttcgcatagtcactctatcaaagggccagaagctactttcccattaccttgagcttctgacatcaggcagtgagcttgcaaggatagcttgcatggcagtcttccggcatctaagatccatatttggaaatatgccctctgatatcagtgcagtggagacaatgaatagacttgcaaaagctgtatccgcacatattgttcagatggatttgagtgatctcagtgcttgccttgctgctgttgtgtgttcatcattgcaaccacctcttcgacctctgggatccccagcaggtgattgggcttctgtcatcataaagtatgtattggacagagcaacagttctactcactgatcaccatgtggcttctaactacagcatgcggaatcgatctctatggcaggcatcattcgacgccttttttgggctgcttacacagtactgcatgagtaagtttgatcgtgtggttcatactgcccaattgcaacctgctgctgcaaccgttataaccagggaaatgccagtagagcttctgcgtgccagcctccctcataccaatgaggctcaacgcaagcaattgctcagttttgctcaacgcactgtgcctgttggtacccacagttctcatgggtcttggtagtggaagcatcgagttcttattagaactgagtactcgctaaaaatggctctttaggggacctgttatgcttcccctgaaagaagagagggttaaacttgtcactagtactatgaatatcaaaaaacaagagtaaagatggttggagcatcaaaatggtaatactcaacatcaaattttgtgtcactcaaacatgtttgcatggattacttttgtagggtagtcagatgtctgcgtcaattttgtcaatacctgtgttggttattgcaaaatggttcctgtgggtctgttgctcttaagaggaatccgcaattggtctgtagcggttacttgaagacactgtttaattgctcttcaaggtggttcttttcaaggagtagttgccttggcctcaagatgtggaagttggcatagccacaacacgtcgttaagttcttcaggaacaatgcggttgctatggaagttgtaaaatggtagtattattgttttgcgacggccttttgccttttgagaactacaactgatgttgcccatttctctatgcttgatgtgcagaaagtggataaagcttgcatgcatccttactgaattgtgacatttatttggatagataggcgctcctttctttaaagcactgattttgtacggaaactctgatatagctaatctttgggtgcctgctgaaatgatgggctagg

SEQ ID NO: 49959 - DNA, 3570 bp, Zea Mays
tcttcaatatggcagatgttataatactagaatcctaattatctgtcttggagtaataattttaagaagttggaatacctgagttttttttaaaaaaaactcgacagacggttgtaatgggaaacaaaaaaaaaatccaaagataatgtccctatctttagggccggtgctttctcacgggaaaagaaggaaaaaaaagcctcgtccagtcgtcccagtcccgaccccttccgcctccgggactcctgcctacgtcataccatcgggcagccgaaccctcgattggccgccgccgccgtaagagagaccgacgtcctccttccactgccgagcgacacctcgaatttctctctcatcgtcatcccttctcccctttattcgcgtcgcgcatctgggagatccagccagcgtgatttgtgttatcggtagctttggatttgtttgtgacccggcgctaacccaacccatccggtggtggattcagcttcttggataccttggtggcggatgttctgctcgtagcaacttgtctcccagaatttttttgggggctagacgctacccctgccatggaatcaggcgataccaaatttgatgcatcacagtatgctttctttggcaacaatgccgtggaggaggttgaactaggtggattggatgatgatgatgatgctgcatttattgagcacgaagatgaagaaaaccctctttatgggagggataatatgttggaggagggtgtaggttcatttgctgacattgatgatcttgctggaactttctcgaaggttctaatgcagagtgggtgcaagagtctgaacttccatattggcctacacagcctgtattggacactgatcacgggctggataaaaagaattggtggtcccaaccaccccattcagtcaacttcattgactatagactgcagaggacatcgtcatccccacagcaagatgctcagcataatcctgttgaacctattcttgaagcaaagccatctcctttacatagaacatcaacgtacccacaacaagaacctcagtacagtaatactgaaccaattcctgtgcccaagtcatcattcatttcatgtcctccatctggtgcagcatctcattcttcacctagtcagccacatcatgtgaacatgccatctcctcccactgcattccagttgcatatgtcttctgcacaaaatgatctactccttccccagttccatcatggaggtacgcctccagggcctccatttggtagacagaatcatgttttaaataatggatcgatgcatggaaagggtcccaggtttatgccaggtttgatgcctcatcaattgcaatgtcccaatggactgatgccacctcagatgcagccacctcatcaacatggaatgctgccaatacaacagtccccaccacagttctcacaactacatgcacggatgattggtccccatcattccccaccacaaagcatgcagatgtttggtcctcaacatccttcttcacaagtgatgagtagatttgatgcaaactttgctatgcctgacttgagtgatccaagagcaagatcaatgttgcaacatgaaaggctgggacagcgttatcctcaccaaggttatgagctcaataatattaggatagataatggatggtcacggttcagatccaagtacatgtgtactgaagaaatcgagaacattgcaaggatgcagcaggctgccacacacatcaatgacccgtatattgatgattactaccatcaagcttgtttagcaaaaaaatcagcaggggctcaactaaagcaccacttttgtccaaccttgattagagatccatcttcacgtgcacgcagtaaggatgagccacatgcatatctacaggttgatgctcttgggaggcttccattttcttctatccgcaggcctcgtccgcttcttgatgttgaacaagcctctgcaccaagtgataatgctgaaaaatctgtgtcaaagcctcttgaccaagagcccatgcttgctgctaggatcacaattgaagacggactttgcctactgcttgatgttgatgatattgatcgtctgctgcaatttagccagcagcaagatggtggtttgcaactgagaaacagaagacaggggctcctcgagcagcttgcagaatcactgcaattagttgatctccttgcaccaaataagaattcacctgtgtctccgtatgatgatttggtgtttcttcgcatagtcactctatcaaagggccagaagctactttcccattaccttgagcttctgacatcaggcagtgagcttgcaaggatagcttgcatggcagtcttccggcatctaagatccatatttggaaatatgccctctgatatcagtgcagtggagacaatgaatagacttgcaaaagctgtatccgcacatattgttcagatggatttgagtgatctcagtgcttgccttgctgctgttgtgtgttcatcattgcaaccacctcttcgacctctgggatccccagcaggtgattgggcttctgtcatcataaagtatgtattggacagagcaacagttctactcactgatcaccatgtggcttctaactacagcatgcggaatcgatctctatggcaggcatcattcgacgccttttttgggctgcttacacagtactgcatgagtaagtttgatcgtgtggttcatactgcccaattgcaacctgctgctgcaaccgttataaccagggaaatgccagtagagcttctgcgtgccagcctccctcataccaatgaggctcaacgcaagcaattgctcagttttgctcaacgcactgtgcctgttggtacccacagttctcatgggtcttggtagtggaagcatcgagttcttattagaactgagtactcgctaaaaatggctctttaggggacctgttatgcttcccctgaaagaagagagggttaaacttgtcactagtactatgaatatcaaaaaacaagagtaaagatggttggagcatcaaaatggtaatactcaacatcaaattttgtgtcactcaaacatgtttgcatggattacttttgtagggtagtcagatgtctgcgtcaattttgtcaatacctgtgttggttattgcaaaatggttcctgtgggtctgttgctcttaagaggaatccgcaattggtctgtagcggttacttgaagacactgtttaattgctcttcaaggtggttcttttcaaggagtagttgccttggcctcaagatgtggaagttggcatagccacaacacgtcgttaagttcttcaggaacaatgcggttgctatggaagttgtaaaatggtagtattattgttttgcgacggccttttgccttttgagaactacaactgatgttgcccatttctctatgcttgatgtgcagaaagtggataaagcttgcatgcatccttactgaattgtgacatttatttggatagataggcgctcctttctttaaagcactgattttgtacggaaactctgatatagctaatctttgggtgcctgctgaaatgatgggctagg

SEQ ID NO: 49960 - DNA, 765 bp, Zea Mays
ctccttcctaccatcctcatatagctgttgttttattgcaatggtatattttgtccaagacgctggcagaggaggctgcttggaagttctcaagggataatggacttgaaatcgttactataaacccagcgatggttattggtcccctgctgcagcctacactaaataccagtgctgaagcaatcctgaagttaatcaatgggtcatcgtctacatatcccaatttttgctttggatgggttaatgtcaaggatgttgccctggcccatatccttgcatacgaggttccctcatcaaatggaaggtactgcatggtggaaagagttgttcactactcagaactggtgaacattatccgcaacatgtatcctacccttcctcttccggacaagtgtgcagatgacaagccgtttgtcccaccctaccaagtatcaaaggagaagataaaaagcataggcatcgagttgattccactggagacgagcgtcaaggagaccatcgaaagcttgaaagagaaggggttcgctagtttttgactcgagcaagctgtgaaacataagtgttactgtactacgtgatgttgcattgtatacatgcatcggacttcgcagttcccaagctattttggtagctttggtctgtaagattacctaaaataaactgagccacgttgccacgctgtagcttttggacatgttatgctttgatcggattgagacacgtgatatatgatcgttgcttacaaatgtggtacgctctatctcc

SEQ ID NO: 49961 - DNA, 2856 bp, Zea Mays
aacggcctagccctatcctaccaaaaataatctgaacaaacttccaaatcctccttggaacagtcaacagccaaacccccaagaacacaccgtctcatcccagagtcccggcttccgatctcttcccttccccccgccgccggaaagatcccggctttttgggttccgcggcgagggataggccccaagaaggaggagggggcctcacggcggcggccttgcggtcgatgcgatcggttgacgcggcgggggcggagagctcggatcaccacaacctcaagaagccgcgcctggaacccaggaccaagatgccgctcgcggatgccgttgcggccggtgacagcggcgggggtgtggatgccgcggcggcgggcgccgacttctttggcatgacggtcgaggagatcgtgcagcacccgctgccgggatacggggcgccggcggttctcagcttcagccccgacgaccgccgggtcgcctacctatacagccccgacggcacgcttcaccgtaaggtgttcaccttcgataccgcgcggcgttgccaggagttgctcttcgggccccccgacggtggcgggctcgaggaggggaacctctccgccgaggagcgtctgcggcgcgagcgcgcacgggagcgcggcctcggggtcacccgctacgagtggcgctctcgccattctggtgaatcctcacgcgccggcattgtcgtgccgctcccatccggggtttacttccaggatttatctggctctgaaccagtgctgaaactacgaagttctcccacatctccgataattgacccatttctatctccaaatgggagcatgattgcatacgttagggatgacgaactgcatacgatggggttttccaatggagaaactaggcaattaacttacggtgcaagagaaaataggaaggtccacgggcttgctgagtatattgcacaggaagagatggaaaggaaggtgggattttggtggtctcctgacagcaagcaccttgcatttactgaagtggattcaacagagattccactgtatagaattatgcatcagggcaaaagttctgttggtccagatgctcaagaagaccatgcgtacccttttgcaggagctgctaacgttaaagtgcggcttggtgttgttcattcccatggaggggaagtaacttggatggatctcctttgtggagatccaaatggtccccatagtgatgaagaatatttagctagagtcaactggatgcataatagtgctcttgctgttcaagttctcaacaggtcacatacgaaacttaaattacttaagtttgatattagtacaggtgaaagagaagtcttactagaagagcagcatgatgtatggatcacattgcatgattgcttcactccactagacaaaggagtgaataataaacatccaggtggctttatttgggccagtgaaaaaacaggattcaggcatttatatgttcatggcaatgatggagcatgcttaggacctctcacacaaggtgattggatggttgagcacattgctggtatcaatgagagtaatggacttatatatttcactggaacattggatggaccattggagacaaatctctaccacaccaatctctttccagattggagccttcccttgcaaacccctaaaaggctgactcgtggaactggccggcattcagtaattctcgaccatcagttgctgaagtttattgatgtgtatgacacagcaaaatctccacctgtgatcttgctgtgctctttgcttgatggaagtgtaattatacccctgtttgagcagccactgactattccgccacttaaaaagttccagcagttgtctccagagatagttgaaattacagcgaaggatgggaccaatttatatggcgctctctaccttcctgacgagagaaaatatgggccacctccctacaaaacactggttaatgtttatggtggccccagtgtccagcttgttagtgattcatggatgtgtacagttgacatgagagctcaatatctacggagcaagggtatattagtttggaagatggataatcgaggatcggcaaggcgagggctgcattttgagggacaactgaagtacaacattggtcgtgttgatgctgaagatcaattagaaggggctgagtggttaataaagaagggccttgcaaaacctggccatattggtatctatggctggagctacggaggatttctctcagcaatgtgcctcgcaaggtttccagacacattctgttgtgcggtgtctggtgctccggtaacagcatgggatggttacgacaccttttacacagagaagtacttgggtctgcccgcggagcatccggatgcttacgagtacgggtcaataatgtaccacgccaagaacctgaaagggaagctgctcctcatccatgggatgattgacgagaacgtgcatttcaggcacacggcaaggctcatcaactcgctaatggcagagggcaagccctatgaaatcctccttttccctgacgagaggcacatgccacgacgccttggtgatcggatctacatggaggagaggatctttggttttttcgagaggagcctttgagagggcgtttgtataaatttgttgcccacatctgggctgtgattgggatgtttttggcatatggattcaggtttcagaataagcaaaaacttcatatcattgtggtacctctgatgaagtttattttctccggtaaagtagggaactctatgatatctgtgctctctttaatttatatttgatatcactagcgcagttatcttaatttatatcattgtggtacctacgatgacggtgg

SEQ ID NO: 49962 - DNA, 2757 bp, Zea Mays
aacggcctagccctatcctaccaaaaataatctgaacaaacttccaaatcctccttggaacagtcaacagccaaacccccaagaacacaccgtctcatcccagagtcccggcttccgatctcttcccttccccccgccgccggaaagatcccggctttttgggttccgcggcgagggataggccccaagaaggaggagggggcctcacggcggcggccttgcggtcgatgcgatcggttgacgcggcgggggcggagagctcggatcaccacaacctcaagaagccgcgcctggaacccaggaccaagatgccgctcgcggatgccgttgcggccggtgacagcggcgggggtgtggatgccgcggcggcgggcgccgacttctttggcatgacggtcgaggagatcgtgcagcacccgctgccgggatacggggcgccggcggttctcagcttcagccccgacgaccgccgggtcgcctacctatacagccccgacggcacgcttcaccgtaaggtgttcaccttcgataccgcgcggcgttgccaggagttgctcttcgggccccccgacggtggcgggctcgaggaggggaacctctccgccgaggagcgtctgcggcgcgagcgcgcacgggagcgcggcctcggggtcacccgctacgagtggcgctctcgccattctggtgaatcctcacgcgccggcattgtcgtgccgctcccatccggggtccacgggcttgctgagtatattgcacaggaagagatggaaaggaaggtgggattttggtggtctcctgacagcaagcaccttgcatttactgaagtggattcaacagagattccactgtatagaattatgcatcagggcaaaagttctgttggtccagatgctcaagaagaccatgcgtacccttttgcaggagctgctaacgttaaagtgcggcttggtgttgttcattcccatggaggggaagtaacttggatggatctcctttgtggagatccaaatggtccccatagtgatgaagaatatttagctagagtcaactggatgcataatagtgctcttgctgttcaagttctcaacaggtcacatacgaaacttaaattacttaagtttgatattagtacaggtgaaagagaagtcttactagaagagcagcatgatgtatggatcacattgcatgattgcttcactccactagacaaaggagtgaataataaacatccaggtggctttatttgggccagtgaaaaaacaggattcaggcatttatatgttcatggcaatgatggagcatgcttaggacctctcacacaaggtgattggatggttgagcacattgctggtatcaatgagagtaatggacttatatatttcactggaacattggatggaccattggagacaaatctctaccacaccaatctctttccagattggagccttcccttgcaaacccctaaaaggctgactcgtggaactggccggcattcagtaattctcgaccatcagttgctgaagtttattgatgtgtatgacacagcaaaatctccacctgtgatcttgctgtgctctttgcttgatggaagtgtaattatacccctgtttgagcagccactgactattccgccacttaaaaagttccagcagttgtctccagagatagttgaaattacagcgaaggatgggaccaatttatatggcgctctctaccttcctgacgagagaaaatatgggccacctccctacaaaacactggttaatgtttatggtggccccagtgtccagcttgttagtgattcatggatgtgtacagttgacatgagagctcaatatctacggagcaagggtatattagtttggaagatggataatcgaggatcggcaaggcgagggctgcattttgagggacaactgaagtacaacattggtcgtgttgatgctgaagatcaattagaaggggctgagtggttaataaagaagggccttgcaaaacctggccatattggtatctatggctggagctacggaggatttctctcagcaatgtgcctcgcaaggtttccagacacattctgttgtgcggtgtctggtgctccggtaacagcatgggatggttacgacaccttttacacagagaagtacttgggtctgcccgcggagcatccggatgcttacgagtacgggtcaataatgtaccacgccaagaacctgaaagggaagctgctcctcatccatgggatgattgacgagaacgtgcatttcaggcacacggcaaggctcatcaactcgctaatggcagagggcaagccctatgaaatcctccttttccctgacgagaggcacatgccacgacgccttggtgatcggatctacatggaggagaggatctttggttttttcgagaggagcctttgagagggcgtttgtataaatttgttgcccacatctgggctgtgattgggatgtttttggcatatggattcaggttttctcattcacacctgtatttatcactagcgcagttatctttgattcttttgccagtcttggatggttatcagctgtttggctgcgtttacaggtttcagaataagcaaaaacttcatatcattgtggtacctctgatgaagtttattttctccggtaaagtagggaactctatgatatctgtgctctctttaatttatatttgatatcactagcgcagttatcttaatttatatcattgtggtacctacgatgacggtgg

SEQ ID NO: 49963 - DNA, 914 bp, Zea Mays
tatagtcacttttatctttcatctcgagatggataatcgaggatcggcaaggcgagggctgcattttgagggacaactgaagtacaacattggtcgtgttgatgctgaagatcaattagaaggggctgagtggttaataaagaagggccttgcaaaacctggccatattggtatctatggctggagctacggaggatttctctcagcaatgtgcctcgcaaggtttccagacacattctgttgtgcggtgtctggtgctccggtaacagcatgggatggttacgacaccttttacacagagaagtacttgggtctgcccgcggagcatccggatgcttacgagtacgggtcaataatgtaccacgccaagaacctgaaagggaagctgctcctcatccatgggatgattgacgagaacgtgcatttcaggcacacggcaaggctcatcaactcgctaatggcagagggcaagccctatgaaatcctccttttccctgacgagaggcacatgccacgacgccttggtgatcggatctacatggaggagaggatctttggttttttcgagaggagcctttgagagggcgtttgtataaatttgttgcccacatctgggctgtgattgggatgtttttggcatatggattcaggttttctcattcacacctgtatttatcactagcgcagttatctttgattcttttgccagtcttggatggttatcagctgtttggctgcgtttacaggtttcagaataagcaaaaacttcatatcattgtggtacctctgatgaagtttattttctccggtaaagtagggaactctatgatatctgtgctctctttaatttatatttgatatcactagcgcagttatcttaatttatatcattgtggtacctacgatgacggtgg

SEQ ID NO: 49964 - DNA, 1889 bp, Zea Mays
acacccaacccaacccaacgcacactgactgaaccagagcgcgaggacagcagctcgctcgaccatggagaaccgacaccaagtggctgcacctgcacgaggcgaggtgtgggccgagatgaagaagcaggtgcgcctcgccgcgccgctcgccgcggggttcctcctgcagaaggtgatccagacgatctccatcatgttcgtggggcggctcggcgagctgcctctcgccagcgcgtccctggccacctcgttcgccagcgtcaccggcttcagcctgctgacaggcatggcgagcagcctggacacgctgtgcgggcaggcgttcggcgcggcgcggcaccagctgctgggcgtgcacaagcagcgggcgatgctggtggtcggcgcggcgagcgtccccgtggcgctcgtgtgggcctacaccggcgacatcctggtgtggttcaggcaggaccgggagatcgcggcgggcgccggcagctacatccggtgcctgatcccggcgctgttcctgttcgggcagctgcagtgccacgtccggttcctgcagccgcagaacgtggtggtgccggtgatgctcagctccggcgccaccgtcgcgctgcacgtggccgtctgctggctgctggtgcgcaggctgggcctgggcgccgacggcgccgcgctggccaacgccgtctccaacctcgccaacctgtccgccctggcgctctacatccggctctcgccgtcctgcaaggacacctgggcggggttctcgcgcgaggcgttccgcggcattctcgtcttcttgaagctcgccgtgccttcggctgccatggtctgcatggagtggtggtccttcgagctcctggttctgctttccggccttctccctaaccccaagcttgagaccgccgtcatgtcgatctgcttcaacacttacgtcttcgcattcatgttcccaatggggctcggtgctgcagcaaggttacatacgcgtctccaacgagcttggtgcaggacggccacgcgaggcccgcctggcgactcgggtggtcatgctcctggccttctccctgggcgtctcggaaggccttgtcatggtgctggcgcgcagcctgctcggctacgcctacgccaacgacaagcaagtcgccttgtacacctctaggttgatgccgatcctcgccgcctccaccctgtttgactgcctccagtgcgtcctatcaggtgttgtcaggggctgtggccgacaaaagatgggcgcctttatcaacgttgcggcattctacattgtcggcatccctgtagcgtccgttttcgccttcgttcgtcacctcggtggaatgggtctttggtttgggatcttgtgcggagtagcagtgcagatgatcctgcttctttgcatcaccttgtacactaactggaacaaagaagtatcgaaggcaaatgacaggcttttcagctgttctcttcctgtcaacgacaccataacatcgggtgttagcgagcagggaaatggatgtagttttgttgggaacaaggatggtgctaatggagacattgagctgacaagtggtctcaacaaaggttgatggctacaatgctacttttctactcatctatttagcttaattgtaggctggtaaatagcatccagtggaatgtacgtactcactgcttagccttcagttgaaagcagcaaaccatggtggtcgtatggacctcttttttttttcttcccagtaggttcaacatttttctgtagtcttgctaagccatgacgataagaaaaaaataatagatccgttaaacaagtagtgatgaaaatgttgacagtagattgaaaccgtatcatacatcagtaacgctagaattagtgagatcgatctagactgatttag

SEQ ID NO: 49965 - DNA, 2080 bp, Zea Mays
atacaagcatgacatgacatattatcattggatcggtgttttcacggttagttcctatcatcagttcgtcacccatttgaaccttgctggcaagtctatttgtcgtttaattggtcttggggcgattgctgcatcagccaaaaaactctttcccaacatcaccagcaagcatgtataaattagtttttgctcaatcacgcgtcagaaatgtataaaatagttagatgagggacgtttctgcgccattcttgcctacccttctcgctcagtgaagcacgagcgaggtcagtaatggaggcggcgctcctcgcggccgcaggcaccggtaggaaggatggtggtagtgaggagagcggtgtggtgtgcgaggtgaagaagcagttgtacctcgccgggccgctcgtggtcgggttcctcctgcagaacacggtccagatggtgtccgtcatgttcgtcggccaccttggggagctcgcgctggccagcgcctccctggccacctccttcgccggcgtcaccggcttcagcttgctggcaggcatggcgtgcagcctggacacgctgtgcgggcaggccttcggtgcgcggcagcaccacctgctgggcgtccacaagcagcgggccatgctggtgcttgctctcgtgagcgtcccggtggcgctggtgtgggcctacaccggcgacatcctggcgtggtgcgggcaggacccggagatcgcggcgggggccggcagctacatccggtgcctgatcccggccatggtcgtgtacggggcgctgcagtgccacgtccggttcctgcagacgcagaacctggtggtgcctgtgatgctgagctccggcgccaccgcgctgtgccacccggccgtctgctggctgctggtgcgcgggctcgggctgggctgcaacggcgccgcgctggccaacgccgtctcctacctcgccaacctctccttcttggccgtctatgtcagggtggctccggcctgcaaggccacctggacgggcttctcggcggaggcgttccgcggcgtccccgatttcctcaggctcgccgtgccgtcggctgtcatggtgtgcatggagtggtggtccttcgagctcctggtgctactgtccggactgctccccaaccccaagctggagacggccgtgctgtccatctgcacgcgtgtgtcgaacgagcttggagcagggcggcctcacgcagcccgactggcggcccgggtggtggtgcttctggcgctcatcgtgggcacgtcggaagctctggtcatagtgctggtacgcgacctgtgggggtacgcgtacagcagcgaggaggaagtggccaggtacaccgccaggatgatgccggtcctcgccgtgtccgtcatgctcgacggccagcagtgcgtgctctcaggtgtagtgaggggctgtggccgccagaaggccggcgctttcatcaaccttgccgcctactacctcgccggtatccctgccgcgctcgctttcgccttcgtgcgccgtctcgcgggaatgggcctctggttcgggatcttgtgcggcctggtggtgcagatgctctcgctgctctccgttaccttatgcaccgactggaacaaggaagcactgaaggcgaagaacagagtcttcagtgtggctcttcctgcagacatggaaacatgagattctgtctgggattgccagacacctgttcatgttgctgtgaatttctccagcaggctcaaccggattgatcattagttaattgataattgatcagtgactgtctgtctattccggaagaaggattaaacatagttggatgaaggataaaatttctgaacgagtctagtaccagtttggagtgcagatggatattttcatcgaatgtggcgtcgtaggacacataagcttcttctctcgatcatacatctaaattaagcacttgctatgccctttatatatatatagagtactataatatccgagacaatccattgttttaaacagaactgaagttcatgtgtgttatatggacgaagattagactaacagtgacaacacaagttctttagaaataagtaatcatacc

SEQ ID NO: 49966 - DNA, 2110 bp, Zea Mays
gttagttcctatcatcagttcgtcacccatttgaaccttgctggcaagtctatttgtcgtttaattggtcttggggcgattgctgcatcagccaaaaaactctttcccaacatcaccagcaagcatgtataaattagtttttgctcaatcacgcgtcagaaatgtataaaatagttagatgagggacgtttctgcgccattcttgcctacccttctcgctcagtgaagcacgagcgaggtcagtaatggaggcggcgctcctcgcggccgcaggcaccggtaggaaggatggtggtagtgaggagagcggtgtggtgtgcgaggtgaagaagcagttgtacctcgccgggccgctcgtggtcgggttcctcctgcagaacacggtccagatggtgtccgtcatgttcgtcggccaccttggggagctcgcgctggccagcgcctccctggccacctccttcgccggcgtcaccggcttcagcttgctggcaggcatggcgtgcagcctggacacgctgtgcgggcaggccttcggtgcgcggcagcaccacctgctgggcgtccacaagcagcgggccatgctggtgcttgctctcgtgagcgtcccggtggcgctggtgtgggcctacaccggcgacatcctggcgtggtgcgggcaggacccggagatcgcggcgggggccggcagctacatccggtgcctgatcccggccatggtcgtgtacggggcgctgcagtgccacgtccggttcctgcagacgcagaacctggtggtgcctgtgatgctgagctccggcgccaccgcgctgtgccacccggccgtctgctggctgctggtgcgcgggctcgggctgggctgcaacggcgccgcgctggccaacgccgtctcctacctcgccaacctctccttcttggccgtctatgtcagggtggctccggcctgcaaggccacctggacgggcttctcggcggaggcgttccgcggcgtccccgatttcctcaggctcgccgtgccgtcggctgtcatggtgtgcatggagtggtggtccttcgagctcctggtgctactgtccggactgctccccaaccccaagctggagacggccgtgctgtccatctgcttgaacactagctcattggcgttcatggcccctcttggacttggtgctgccataagcacgcgtgtgtcgaacgagcttggagcagggcggcctcacgcagcccgactggcggcccgggtggtggtgcttctggcgctcatcgtgggcacgtcggaagctctggtcatagtgctggtacgcgacctgtgggggtacgcgtacagcagcgaggaggaagtggccaggtacaccgccaggatgatgccggtcctcgccgtgtccgtcatgctcgacggccagcagtgcgtgctctcaggtgtagtgaggggctgtggccgccagaaggccggcgctttcatcaaccttgccgcctactacctcgccggtatccctgccgcgctcgctttcgccttcgtgcgccgtctcgcgggaatgggcctctggttcgggatcttgtgcggcctggtggtgcagatgctctcgctgctctccgttaccttatgcaccgactggaacaaggaagtaagcacgagttttaaaggcactgaaggcgaagaacagagtcttcagtgtggctcttcctgcagacatggaaacatgagattctgtctgggattgccagacacctgttcatgttgctgtgaatttctccagcaggctcaaccggattgatcattagttaattgataattgatcagtgactgtctgtctattccggaagaaggattaaacatagttggatgaaggataaaatttctgaacgagtctagtaccagtttggagtgcagatggatattttcatcgaatgtggcgtcgtaggacacataagcttcttctctcgatcatacatctaaattaagcacttgctatgccctttatatatatatagagtactataatatccgagacaatccattgttttaaacagaactgaagttcatgtgtgttatatggacgaagattagactaacagtgacaacacaagttctttagaaataagtaatcatacc

SEQ ID NO: 49967 - DNA, 2344 bp, Zea Mays
tgaatgattgcttgccatgtgtgggacaaccagatcctgtgctgcgcccagctcaacaatcccaaattccattactgcccacctgcatcgtcctctctgtaggctgcggtgtttgcatcgtccaaaactccaaatacatacatacaacatgctagcctagtcctcttctagtcgcctctacccagttacttgcatcgccccgtcaagcacgccgccggcacgcggccctcggtctccccgccgcgccctctgcctccgcccgaacaaagccgtctcgccgtcgcgttgccttccttaccgtccaccgcgggcagccgtcctagtactcggttggtcctcccctgctgcccttctacggtggaggagcggagatcctgccgttttccggctgatttcttctaattgcggggcaagttccgtggatagtcaatactgcttgtgctgttgagctaatattaagttcctgctgggagaacttctgcagttcctatggcaaagcctctcaatggcagtggccgtagcatgccaagatcgaatgagggaatgcggctcatattttcggcagttgtaggtgtcatgctgggttacctgtttgggatctccttccctacagtcaacataaccaagcttcacttcccttcgagtatcatctcttatatcgaagataggaactctggcatcacaacccagacattgttgaaccatgcttgggcatctgcaaacaatcataaaaagaatagttctgaatctaacactgatgaaattcccgagatttatgttcctacaaacccaaaaggtgctgagagacttccaccaggcattgtagtgtctgaaacagatctttatccccgaagactatggggtgatcctagtgaggaccttactagcgagccgaggtatcttgttacttttactgttggtattgggcaaaaggcaaatattgatgcagcggtcagaaagttttcagacaaattcaccattatgttgttccattatgatggtcggactacagagtgggatgaatttgagtggtctaaaagagcaatccatgtgagtgccaggaagcagacaaaatggtggtatgcaaaacgatttttgcatcccgatgttgttgccagatatgattacattttcatctgggatgaggatctaggtgtagagcatttcaacgcagagaagtacattgagcttgttagaaagcatgggttggaaatctctcagcctggtttgcaacctgatagaggactaacatggcaaatgactaaacggcgtggtgaccaggaagttcacaaagtaactgaggagagaccaggctggtgcactgatccacatctaccaccatgtgcagcgtagggccaaatgtttgttgtgtatttagttttcattgtctaattatcattttaaaagaagggcaggcctggtcaagtggtgagagctctcacttagtcaccatgtcccaggttcgaagcagcctctccgcatttgcgccgagaaggcttgcctcgatttatcccttctgtagaccccactcatgtttgacctccaacactaggtcttccttttttttaattatcattctaaaagttcgattttgatgtgcagatttgttgagattatggcaacagtgttctccagaaatgcatggcgctgtgtatggcatatgattcagaatgacttggtccatggatggggtcttgactttgctcttagaaaatgtgtggagccggctcatgagaaaattggagttgttgatgctcaatggattgttcatcaatcagttccttcacttggcaaccagggcaagtcagataatggaagaccaccatgggaaggggtaagagcacgctgcagaaaagaatgggggatatttcagacaaggctggctgatgcggagaaggcttattacttggagcgaggcatcacacccccgaactcaacatcagtttagatgaacacatgctcctcagatgccacggcaaggtttctgttgggggaacctgctgcaaactggcatgttcatcgaagctgctgcagcccagggcaaatccatatatttgtacattagaggtcccacgaatcgccatgattaatctttagtgtcgctcacctggttttaatgtcatttcttttgttagtgatactagctgcgatgtaagtaggaggatacagcagagaccgtgatgatacccatttgtgtattaatgacctgatgcaatatggatgttgataatcctttcctcagtttcagcatgtaaattgtttgttctagaccagctgtatgcaactgggtcaaatactacattgatgtaaggcccaaaatttgtataagaaaaaaataataaaa

SEQ ID NO: 49968 - DNA, 2154 bp, Zea Mays
tgaatgattgcttgccatgtgtgggacaaccagatcctgtgctgcgcccagctcaacaatcccaaattccattactgcccacctgcatcgtcctctctgtaggctgcggtgtttgcatcgtccaaaactccaaatacatacatacaacatgctagcctagtcctcttctagtcgcctctacccagttacttgcatcgccccgtcaagcacgccgccggcacgcggccctcggtctccccgccgcgccctctgcctccgcccgaacaaagccgtctcgccgtcgcgttgccttccttaccgtccaccgcgggcagccgtcctagtactcggttggtcctcccctgctgcccttctacggtggaggagcggagatcctgccgttttccggctgatttcttctaattgcggggcaagttccgtggatagtcaatactgcttgtgctgttgagctaatattaagttcctgctgggagaacttctgcagttcctatggcaaagcctctcaatggcagtggccgtagcatgccaagatcgaatgagggaatgcggctcatattttcggcagttgtaggtgtcatgctgggttacctgtttgggatctccttccctacagtcaacataaccaagcttcacttcccttcgagtatcatctcttatatcgaagataggaactctggcatcacaacccagacattgttgaaccatgcttgggcatctgcaaacaatcataaaaagaatagttctgaatctaacactgatgaaattcccgagatttatgttcctacaaacccaaaaggtgctgagagacttccaccaggcattgtagtgtctgaaacagatctttatccccgaagactatggggtgatcctagtgaggaccttactagcgagccgaggtatcttgttacttttactgttggtattgggcaaaaggcaaatattgatgcagcggtcagaaagacaaattcaccattatgttgttccattatgatggtcggactacagagtgggatgaatttgagtggtctaaaagagcaatccatgtgagtgccaggaagcagacaaaatggtggtatgcaaaacgatttttgcatcccgatgttgttgccagatatgattacattttcatctgggatgaggatctaggtgtagagcatttcaacgcagagaagtacattgagcttgttagaaagcatgggttggaaatctctcagcctggtttgcaacctgatagaggactaacatggcaaatgactaaacggcgtggtgaccaggaagttcacaaagtaactgaggagagaccaggctggtgcactgatccacatctaccaccatgtgcagcatttgttgagattatggcaacagtgttctccagaaatgcatggcgctgtgtatggcatatgattcaggtgaggtaacatggcatgcaagtcattagtttgtctgaagtggagtatgcttatgcacttctatatgcagaatgacttggtccatggatggggtcttgactttgctcttagaaaatgtgtggagccggctcatgagaaaattggagttgttgatgctcaatggattgttcatcaatcagttccttcacttggcaaccagggcaagtcagataatggaagaccaccatgggaaggggtaagagcacgctgcagaaaagaatgggggatatttcagacaaggctggctgatgcggagaaggcttattacttggagcgaggcatcacacccccgaactcaacatcagtttagatgaacacatgctcctcagatgccacggcaaggtttctgttgggggaacctgctgcaaactggcatgttcatcgaagctgctgcagcccagggcaaatccatatatttgtacattagaggtcccacgaatcgccatgattaatctttagtgtcgctcacctggttttaatgtcatttcttttgttagtgatactagctgcgatgtaagtaggaggatacagcagagaccgtgatgatacccatttgtgtattaatgacctgatgcaatatggatgttgataatcctttcctcagtttcagcatgtaaattgtttgttctagaccagctgtatgcaactgggtcaaatactacattgatgtaaggcccaaaatttgtataagaaaaaaataataaaa

SEQ ID NO: 49969 - DNA, 2015 bp, Zea Mays
tgaatgattgcttgccatgtgtgggacaaccagatcctgtgctgcgcccagctcaacaatcccaaattccattactgcccacctgcatcgtcctctctgtaggctgcggtgtttgcatcgtccaaaactccaaatacatacatacaacatgctagcctagtcctcttctagtcgcctctacccagttacttgcatcgccccgtcaagcacgccgccggcacgcggccctcggtctccccgccgcgccctctgcctccgcccgaacaaagccgtctcgccgtcgcgttgccttccttaccgtccaccgcgggcagccgtcctagtactcgcggggcaagttccgtggatagtcaatactgcttgtgctgttgagctaatattaagttcctgctgggagaacttctgcagttcctatggcaaagcctctcaatggcagtggccgtagcatgccaagatcgaatgagggaatgcggctcatattttcggcagttgtaggtgtcatgctgggttacctgtttgggatctccttccctacagtcaacataaccaagcttcacttcccttcgagtatcatctcttatatcgaagataggaactctggcatcacaacccagacattgttgaaccatgcttgggcatctgcaaacaatcataaaaagaatagttctgaatctaacactgatgaaattcccgagatttatgttcctacaaacccaaaaggtgctgagagacttccaccaggcattgtagtgtctgaaacagatctttatccccgaagactatggggtgatcctagtgaggaccttactagcgagccgaggtatcttgttacttttactgttggtattgggcaaaaggcaaatattgatgcagcggtcagaaagttttcagacaaattcaccattatgttgttccattatgatggtcggactacagagtgggatgaatttgagtggtctaaaagagcaatccatgtgagtgccaggaagcagacaaaatggtggtatgcaaaacgatttttgcatcccgatgttgttgccagatatgattacattttcatctgggatgaggatctaggtgtagagcatttcaacgcagagaagtacattgagcttgttagaaagcatgggttggaaatctctcagcctggtttgcaacctgatagaggactaacatggcaaatgactaaacggcgtggtgaccaggaagttcacaaagtaactgaggagagaccaggctggtgcactgatccacatctaccaccatgtgcagcatttgttgagattatggcaacagtgttctccagaaatgcatggcgctgtgtatggcatatgattcagaatgacttggtccatggatggggtcttgactttgctcttagaaaatgtgtggagccggctcatgagaaaattggagttgttgatgctcaatggattgttcatcaatcagttccttcacttggcaaccagggcaagtcagataatggaagaccaccatgggaaggggtaagagcacgctgcagaaaagaatgggggatatttcagacaaggctggctgatgcggagaaggcttattacttggagcgaggcatcacacccccgaactcaacatcagtttagatgaacacatgctcctcagatgccacggcaaggtttctgttgggggaacctgctgcaaactggcatgttcatcgaagctgctgcagcccagggcaaatccatatatttgtacattagaggtcccacgaatcgccatgattaatctttagtgtcgctcacctggttttaatgtcatttcttttgttagtgatactagctgcgatgtaagtaggaggatacagcagagaccgtgatgatacccatttgtgtattaatgacctgatgcaatatggatgttgataatcctttcctcagtttcagcatgtaaattgtttgttctagaccagctgtatgcaactgggtcaaatactacattgatgtaaggcccaaaatttgtataagaaaaaaataataaaa

SEQ ID NO: 49970 - DNA, 2292 bp, Zea Mays
tgaatgattgcttgccatgtgtgggacaaccagatcctgtgctgcgcccagctcaacaatcccaaattccattactgcccacctgcatcgtcctctctgtaggctgcggtgtttgcatcgtccaaaactccaaatacatacatacaacatgctagcctagtcctcttctagtcgcctctacccagttacttgcatcgccccgtcaagcacgccgccggcacgcggccctcggtctccccgccgcgccctctgcctccgcccgaacaaagccgtctcgccgtcgcgttgccttccttaccgtccaccgcgggcagccgtcctagtactcggttggtcctcccctgctgcccttctacggtggaggagcggagatcctgccgttttccggctgatttcttctaattgcggggcaagttccgtggatagtcaatactgcttgtgctgttgagctaatattaagttcctgctgggagaacttctgcagttcctatggcaaagcctctcaatggcagtggccgtagcatgccaagatcgaatgagggaatgcggctcatattttcggcagttgtaggtgtcatgctgggttacctgtttgggatctccttccctacagtcaacataaccaagcttcacttcccttcgagtatcatctcttatatcgaagataggaactctggcatcacaacccagacattgttgaaccatgcttgggcatctgcaaacaatcataaaaagaatagttctgaatctaacactgatgaaattcccgagatttatgttcctacaaacccaaaaggtgctgagagacttccaccaggcattgtagtgtctgaaacagatctttatccccgaagactatggggtgatcctagtgaggaccttactagcgagccgaggtatcttgttacttttactgttggtattgggcaaaaggcaaatattgatgcagcggtcagaaagagtgggatgaatttgagtggtctaaaagagcaatccatgtgagtgccaggaagcagacaaaatggtggtatgcaaaacgatttttgcatcccgatgttgttgccagatatgattacattttcatctgggatgaggatctaggtgtagagcatttcaacgcagagaagtacattgagcttgttagaaagcatgggttggaaatctctcagcctggtttgcaacctgatagaggactaacatggcaaatgactaaacggcgtggtgaccaggaagttcacaaagtaactgaggagagaccaggctggtgcactgatccacatctaccaccatgtgcagcgtagggccaaatgtttgttgtgtatttagttttcattgtctaattatcattttaaaagaagggcaggcctggtcaagtggtgagagctctcacttagtcaccatgtcccaggttcgaagcagcctctccgcatttgcgccgagaaggcttgcctcgatttatcccttctgtagaccccactcatgtttgacctccaacactaggtcttccttttttttaattatcattctaaaagttcgattttgatgtgcagatttgttgagattatggcaacagtgttctccagaaatgcatggcgctgtgtatggcatatgattcagaatgacttggtccatggatggggtcttgactttgctcttagaaaatgtgtggagccggctcatgagaaaattggagttgttgatgctcaatggattgttcatcaatcagttccttcacttggcaaccagggcaagtcagataatggaagaccaccatgggaaggggtaagagcacgctgcagaaaagaatgggggatatttcagacaaggctggctgatgcggagaaggcttattacttggagcgaggcatcacacccccgaactcaacatcagtttagatgaacacatgctcctcagatgccacggcaaggtttctgttgggggaacctgctgcaaactggcatgttcatcgaagctgctgcagcccagggcaaatccatatatttgtacattagaggtcccacgaatcgccatgattaatctttagtgtcgctcacctggttttaatgtcatttcttttgttagtgatactagctgcgatgtaagtaggaggatacagcagagaccgtgatgatacccatttgtgtattaatgacctgatgcaatatggatgttgataatcctttcctcagtttcagcatgtaaattgtttgttctagaccagctgtatgcaactgggtcaaatactacattgatgtaaggcccaaaatttgtataagaaaaaaataataaaa

SEQ ID NO: 49971 - DNA, 2265 bp, Zea Mays
tgaatgattgcttgccatgtgtgggacaaccagatcctgtgctgcgcccagctcaacaatcccaaattccattactgcccacctgcatcgtcctctctgtaggctgcggtgtttgcatcgtccaaaactccaaatacatacatacaacatgctagcctagtcctcttctagtcgcctctacccagttacttgcatcgccccgtcaagcacgccgccggcacgcggccctcggtctccccgccgcgccctctgcctccgcccgaacaaagccgtctcgccgtcgcgttgccttccttaccgtccaccgcgggcagccgtcctagtactcggttggtcctcccctgctgcccttctacggtggaggagcggagatcctgccgttttccggctgatttcttctaattgttcctatggcaaagcctctcaatggcagtggccgtagcatgccaagatcgaatgagggaatgcggctcatattttcggcagttgtaggtgtcatgctgggttacctgtttgggatctccttccctacagtcaacataaccaagcttcacttcccttcgagtatcatctcttatatcgaagataggaactctggcatcacaacccagacattgttgaaccatgcttgggcatctgcaaacaatcataaaaagaatagttctgaatctaacactgatgaaattcccgagatttatgttcctacaaacccaaaaggtgctgagagacttccaccaggcattgtagtgtctgaaacagatctttatccccgaagactatggggtgatcctagtgaggaccttactagcgagccgaggtatcttgttacttttactgttggtattgggcaaaaggcaaatattgatgcagcggtcagaaagttttcagacaaattcaccattatgttgttccattatgatggtcggactacagagtgggatgaatttgagtggtctaaaagagcaatccatgtgagtgccaggaagcagacaaaatggtggtatgcaaaacgatttttgcatcccgatgttgttgccagatatgattacattttcatctgggatgaggatctaggtgtagagcatttcaacgcagagaagtacattgagcttgttagaaagcatgggttggaaatctctcagcctggtttgcaacctgatagaggactaacatggcaaatgactaaacggcgtggtgaccaggaagttcacaaagtaactgaggagagaccaggctggtgcactgatccacatctaccaccatgtgcagcgtagggccaaatgtttgttgtgtatttagttttcattgtctaattatcattttaaaagaagggcaggcctggtcaagtggtgagagctctcacttagtcaccatgtcccaggttcgaagcagcctctccgcatttgcgccgagaaggcttgcctcgatttatcccttctgtagaccccactcatgtttgacctccaacactaggtcttccttttttttaattatcattctaaaagttcgattttgatgtgcagatttgttgagattatggcaacagtgttctccagaaatgcatggcgctgtgtatggcatatgattcagaatgacttggtccatggatggggtcttgactttgctcttagaaaatgtgtggagccggctcatgagaaaattggagttgttgatgctcaatggattgttcatcaatcagttccttcacttggcaaccagggcaagtcagataatggaagaccaccatgggaaggggtaagagcacgctgcagaaaagaatgggggatatttcagacaaggctggctgatgcggagaaggcttattacttggagcgaggcatcacacccccgaactcaacatcagtttagatgaacacatgctcctcagatgccacggcaaggtttctgttgggggaacctgctgcaaactggcatgttcatcgaagctgctgcagcccagggcaaatccatatatttgtacattagaggtcccacgaatcgccatgattaatctttagtgtcgctcacctggttttaatgtcatttcttttgttagtgatactagctgcgatgtaagtaggaggatacagcagagaccgtgatgatacccatttgtgtattaatgacctgatgcaatatggatgttgataatcctttcctcagtttcagcatgtaaattgtttgttctagaccagctgtatgcaactgggtcaaatactacattgatgtaaggcccaaaatttgtataagaaaaaaataataaaa

SEQ ID NO: 49972 - DNA, 2176 bp, Zea Mays
tgaatgattgcttgccatgtgtgggacaaccagatcctgtgctgcgcccagctcaacaatcccaaattccattactgcccacctgcatcgtcctctctgtaggctgcggtgtttgcatcgtccaaaactccaaatacatacatacaacatgctagcctagtcctcttctagtcgcctctacccagttacttgcatcgccccgtcaagcacgccgccggcacgcggccctcggtctccccgccgcgccctctgcctccgcccgaacaaagccgtctcgccgtcgcgttgccttccttaccgtccaccgcgggcagccgtcctagtactcggttggtcctcccctgctgcccttctacggtggaggagcggagatcctgccgttttccggctgatttcttctaattgcatgccaagatcgaatgagggaatgcggctcatattttcggcagttgtaggtgtcatgctgggttacctgtttgggatctccttccctacagtcaacataaccaagcttcacttcccttcgagtatcatctcttatatcgaagataggaactctggcatcacaacccagacattgttgaaccatgcttgggcatctgcaaacaatcataaaaagaatagttctgaatctaacactgatgaaattcccgagatttatgttcctacaaacccaaaaggtgctgagagacttccaccaggcattgtagtgtctgaaacagatctttatccccgaagactatggggtgatcctagtgaggaccttactagcgagccgaggtatcttgttacttttactgttggtattgggcaaaaggcaaatattgatgcagcggtcagaaagagtgggatgaatttgagtggtctaaaagagcaatccatgtgagtgccaggaagcagacaaaatggtggtatgcaaaacgatttttgcatcccgatgttgttgccagatatgattacattttcatctgggatgaggatctaggtgtagagcatttcaacgcagagaagtacattgagcttgttagaaagcatgggttggaaatctctcagcctggtttgcaacctgatagaggactaacatggcaaatgactaaacggcgtggtgaccaggaagttcacaaagtaactgaggagagaccaggctggtgcactgatccacatctaccaccatgtgcagcgtagggccaaatgtttgttgtgtatttagttttcattgtctaattatcattttaaaagaagggcaggcctggtcaagtggtgagagctctcacttagtcaccatgtcccaggttcgaagcagcctctccgcatttgcgccgagaaggcttgcctcgatttatcccttctgtagaccccactcatgtttgacctccaacactaggtcttccttttttttaattatcattctaaaagttcgattttgatgtgcagatttgttgagattatggcaacagtgttctccagaaatgcatggcgctgtgtatggcatatgattcagaatgacttggtccatggatggggtcttgactttgctcttagaaaatgtgtggagccggctcatgagaaaattggagttgttgatgctcaatggattgttcatcaatcagttccttcacttggcaaccagggcaagtcagataatggaagaccaccatgggaaggggtaagagcacgctgcagaaaagaatgggggatatttcagacaaggctggctgatgcggagaaggcttattacttggagcgaggcatcacacccccgaactcaacatcagtttagatgaacacatgctcctcagatgccacggcaaggtttctgttgggggaacctgctgcaaactggcatgttcatcgaagctgctgcagcccagggcaaatccatatatttgtacattagaggtcccacgaatcgccatgattaatctttagtgtcgctcacctggttttaatgtcatttcttttgttagtgatactagctgcgatgtaagtaggaggatacagcagagaccgtgatgatacccatttgtgtattaatgacctgatgcaatatggatgttgataatcctttcctcagtttcagcatgtaaattgtttgttctagaccagctgtatgcaactgggtcaaatactacattgatgtaaggcccaaaatttgtataagaaaaaaataataaaa

SEQ ID NO: 49973 - DNA, 2290 bp, Zea Mays
tgaatgattgcttgccatgtgtgggacaaccagatcctgtgctgcgcccagctcaacaatcccaaattccattactgcccacctgcatcgtcctctctgtaggctgcggtgtttgcatcgtccaaaactccaaatacatacatacaacatgctagcctagtcctcttctagtcgcctctacccagttacttgcatcgccccgtcaagcacgccgccggcacgcggccctcggtctccccgccgcgccctctgcctccgcccgaacaaagccgtctcgccgtcgcgttgccttccttaccgtccaccgcgggcagccgtcctagtactcggttggtcctcccctgctgcccttctacggtggaggagcggagatcctgccgttttccggctgatttcttctaattgcggggcaagttccgtggatagtcaatactgcttgtgctgttgagctaatattaagttcctgctgggagaacttctgcagttcctatggcaaagcctctcaatggcagtggccgtagcatgccaagatcgaatgagggaatgcggctcatattttcggcagttgtaggtgtcatgctgggttacctgtttgggatctccttccctacagtcaacataaccaagcttcacttcccttcgagtatcatctcttatatcgaagataggaactctggcatcacaacccagacattgttgaaccatgcttgggcatctgcaaacaatcataaaaagaatagttctgaatctaacactgatgaaattcccgagatttatgttcctacaaacccaaaaggtgctgagagacttccaccaggcattgtagtgtctgaaacagatctttatccccgaagactatggggtgatcctagtgaggaccttactagcgagccgaggtatcttgttacttttactgttggtattgggcaaaaggcaaatattgatgcagcggtcagaaagttttcagacaaattcaccattatgttgttccattatgatggtcggactacagagtgggatgaatttgagtggtctaaaagagcaatccatgtgagtgccaggaagcagacaaaatggtggtatgcaaaacgatttttgcatcccgatgttgttgccagatatgattacattttcatctgggatgaggatctaggtgtagagcatttcaacgcagagaagtacattgagcttgttagaaagcatgggttggaaatctctcagcctggtttgcaacctgatagaggactaacatggcaaatgactaaacggcgtggtgaccaggaagttcacaaagtaactgaggagagaccaggctggtgcactgatccacatctaccaccatgtgcagcgtagggccaaatgtttgttgtgtatttagttttcattgtctaattatcattttaaaagaagggcaggcctggtcaagtggtgagagctctcacttagtcaccatgtcccaggttcgaagcagcctctccgcatttgcgccgagaaggcttgcctcgatttatcccttctgtagaccccactcatgtttgacctccaacactaggtcttccttttttttaattatcattctaaaagttcgattttgatgtgcagatttgttgagattatggcaacagtgttctccagaaatgcatggcgctgtgtatggcatatgattcagccggctcatgagaaaattggagttgttgatgctcaatggattgttcatcaatcagttccttcacttggcaaccagggcaagtcagataatggaagaccaccatgggaaggggtaagagcacgctgcagaaaagaatgggggatatttcagacaaggctggctgatgcggagaaggcttattacttggagcgaggcatcacacccccgaactcaacatcagtttagatgaacacatgctcctcagatgccacggcaaggtttctgttgggggaacctgctgcaaactggcatgttcatcgaagctgctgcagcccagggcaaatccatatatttgtacattagaggtcccacgaatcgccatgattaatctttagtgtcgctcacctggttttaatgtcatttcttttgttagtgatactagctgcgatgtaagtaggaggatacagcagagaccgtgatgatacccatttgtgtattaatgacctgatgcaatatggatgttgataatcctttcctcagtttcagcatgtaaattgtttgttctagaccagctgtatgcaactgggtcaaatactacattgatgtaaggcccaaaatttgtataagaaaaaaataataaaa

SEQ ID NO: 49974 - DNA, 2039 bp, Zea Mays
tgaatgattgcttgccatgtgtgggacaaccagatcctgtgctgcgcccagctcaacaatcccaaattccattactgcccacctgcatcgtcctctctgtaggctgcggtgtttgcatcgtccaaaactccaaatacatacatacaacatgctagcctagtcctcttctagtcgcctctacccagttacttgcatcgccccgtcaagcacgccgccggcacgcggccctcggtctccccgccgcgccctctgcctccgcccgaacaaagccgtctcgccgtcgcgttgccttccttaccgtccaccgcgggcagccgtcctagtactcggttggtcctcccctgctgcccttctacggtggaggagcggagatcctgccgttttccggctgatttcttctaattgcggggcaagttccgtggatagtcaatactgcttgtgctgttgagctaatattaagttcctgctgggagaacttctgcagttcctatggcaaagcctctcaatggcagtggccgtagcatgccaagatcgaatgagggaatgcggctcatattttcggcagttgtaggtgtcatgctgggttacctgtttgggatctccttccctacagtcaacataaccaagcttcacttcccttcgagtatcatctcttatatcgaagataggaactctggcatcacaacccagacattgttgaaccatgcttgggcatctgcaaacaatcataaaaagaatagttctgaatctaacactgatgaaattcccgagatttatgttcctacaaacccaaaaggtgctgagagacttccaccaggcattgtagtgtctgaaacagatctttatccccgaagactatggggtgatcctagtgaggaccttactagcgagccgaggtatcttgttacttttactgttggtattgggcaaaaggcaaatattgatgcagcggtcagaaagagtgggatgaatttgagtggtctaaaagagcaatccatgtgagtgccaggaagcagacaaaatggtggtatgcaaaacgatttttgcatcccgatgttgttgccagatatgattacattttcatctgggatgaggatctaggtgtagagcatttcaacgcagagaagtacattgagcttgttagaaagcatgggttggaaatctctcagcctggtttgcaacctgatagaggactaacatggcaaatgactaaacggcgtggtgaccaggaagttcacaaagtaactgaggagagaccaggctggtgcactgatccacatctaccaccatgtgcagcatttgttgagattatggcaacagtgttctccagaaatgcatggcgctgtgtatggcatatgattcagaatgacttggtccatggatggggtcttgactttgctcttagaaaatgtgtggagccggctcatgagaaaattggagttgttgatgctcaatggattgttcatcaatcagttccttcacttggcaaccagggcaagtcagataatggaagaccaccatgggaaggggtaagagcacgctgcagaaaagaatgggggatatttcagacaaggctggctgatgcggagaaggcttattacttggagcgaggcatcacacccccgaactcaacatcagtttagatgaacacatgctcctcagatgccacggcaaggtttctgttgggggaacctgctgcaaactggcatgttcatcgaagctgctgcagcccagggcaaatccatatatttgtacattagaggtcccacgaatcgccatgattaatctttagtgtcgctcacctggttttaatgtcatttcttttgttagtgatactagctgcgatgtaagtaggaggatacagcagagaccgtgatgatacccatttgtgtattaatgacctgatgcaatatggatgttgataatcctttcctcagtttcagcatgtaaattgtttgttctagaccagctgtatgcaactgggtcaaatactacattgatgtaaggcccaaaatttgtataagaaaaaaataataaaa

SEQ ID NO: 49975 - DNA, 738 bp, Zea Mays
cacgattcggttcggaccgtggtgtgtggccgttatcttcgtcgtccgcgctgaccttgtttccctcttgcctttatattaacccccatgaacctccccacgtccatccgaagaacaagaccggcggcagctgagaacttggggagccgccacagactttatcatgccacaaccaaattggcgttcgggttgccattttgcgtgacctctgatgcacaccactcatacctgtggcctcgctacgacgggacgacaatctggggcggtgaatttccggtcggatcacgggaagtcgtctggaatctcgctctaccacaggcgtgcggatatgcgctccaaatctcgtgcggtcacgaggatccgaagaatcaccctggtaactggaatctcaagtgcgaggcaagttgtgcccttgatcactttcatttacccaataatattctttattgtcacttattcatgcataggtttaattttgatgggatccaataggctaccctagtctgtttatcctgtttaccttgtttacccctgattcacttgggtagttatggtattgcattatgtggtttcgggttaatatttcattatatccatgttcttattattctgttatgttatttatgttcatgataagatcattatgttaatgggaacatggagcgaccaccagggaaaacagtgctaccacaagggtttaatgggacgcccttggccgattaattaggaaaactagtg

SEQ ID NO: 49976 - DNA, 729 bp, Zea Mays
cggaccgtggtgtgtggccgttatcttcgtcgtccgcgctgaccttgtttccctcttgcctttatattaacccccatgaacctccccacgtccatccgaagaacaagaccggcggcagctgagaacttggggagccgccacagactttatcatgccacaaccaaattggcgttcgggttgccattttgcgtgacctctgatgcacaccactcatacctgtggcctcgctacgacgggacgacaatctggggcggtgaatttccggtcggatcacgggaagtcgtctggaatctcgctctaccacaggcgtgcggatatgcgctccaaatctcgcagtgcggtcacgaggatccgaagaatcaccctggtaactggaatctcaagtgcgaggcaagttgtgcccttgatcactttcatttacccaataatattctttattgtcacttattcatgcataggtttaattttgatgggatccaataggctaccctagtctgtttatcctgtttaccttgtttacccctgattcacttgggtagttatggtattgcattatgtggtttcgggttaatatttcattatatccatgttcttattattctgttatgttatttatgttcatgataagatcattatgttaatgggaacatggagcgaccaccagggaaaacagtgctaccacaagggtttaatgggacgcccttggccgattaattaggaaaactagtg

SEQ ID NO: 49977 - DNA, 595 bp, Zea Mays
gccgggccatcgcacgtcgcccgtcgcgcgcgcgggcaggcaggcatgggaaagaagcacgcggcaggtggcggctggttcgccgccgtcaggaaggtgttccggccgtcgggctccggcggctcatccgcgaccaccaccacctcctcctcctcgtccaaggacaaggataaggacgccgtgcagcacgggaaacaggccaccgccgccgccgccgccgaagagccagaggtgctgctgctggagcacttcccggcgtccgagacgtcggcggaggcgagcaacgagggcggcgacgcggaggcggagctggcggcggttgcggcgacgacgaagggtcgtcgtcgtcgagacgacgaggtcggcgacgaggatggggagatggaggaggagctggccgacgacatggagcgcgcgagggcgctggcggccgcggccgaggctgccgtggccgcggccgaggcggctgccagagtggtgcggcttgcggcgctccggcgcctgtcgcgcgaggagcgcgccgccgtgcgcatccaggcctactaccgcggatacctggtatgggttcatgaaccataatacgggtgtctaacct

SEQ ID NO: 49978 - DNA, 134 bp, Zea Mays
ttgaataacattgttgttattgtcacaaataacagaattccatgtgcaagggttaacttgattttggttccaatctgaaagctgaccgccagtaacattcagtttttgtttcatatcatataaagcatctcctg

SEQ ID NO: 49979 - DNA, 340 bp, Zea Mays
cttggcgatcggatgcagagaagcacggcaaggatatcaccagaagcaacacaacgaagcgcagctccctcatcttgcgtagatcccactccggccgggcctccattctactccacctaatcagcccagccgcgctagagggccccggtggccgcgccgccccccgggaggggggggggaggtgcagcgcgttgaggagaagagagcgtcgagttcgagcaaggcggacggacgtcgggatcgcggagggggcggccgcggattcgagagtttcagtgggctggggctgggatgagcaagcagaaagaagagcggagcaagaacctcgagcacttgtcct

SEQ ID NO: 49980 - DNA, 601 bp, Zea Mays
aagaggcgtctacttgtgacccgacccataaacaagtttggggctggcccaaccctcagcatacaggcacgaaacctcgcgccgccaccaaatctccagcgagcgaagaggcggctccggcgagtgcgcggcaacgacgaaggcgtcggggccagtggcgagaggaagagcatgctgaagttcctgtccaaggtggtggtggagtactgccctctggacccgcggaaggcggcggcagtggagctcctcgcgcagtgcaacggccgcaaggccaaggactccaacccggcttgctcggtcgagctccgccgcctcccctccccagctccgtccacggacctcaagtcgcagccgactctcccgcctccgagggtcctcgtgacctacttcaccggagctgaagaggccatcgtctttgctgagggagctacggcgcagggcatccgggaccagatcgtcgcacggggccggctcatcgatacggagaagatgttccgcgacggcggggagaagtggcccgtcgtcatccccgaggaggagcttggcatgtcgttccctggcatcaagcagtgcaagttttgctcgaataagtcactgggat

SEQ ID NO: 49981 - DNA, 439 bp, Zea Mays
agagggccgcgatggagtagagggccgccggagtagagggggcgcagccgcacgctggagaaggggcgacggctactgtctggctggtgtggtacagccaaagaaagccgaggataagccccaggccgagtgaccaagcaggagttttctactttatatatcatggttaactatggacatttgtacactcacagatgctggaagaaaattttctcttgccgctaccacttagaatgtgtgttaccagtttgaaagccatgtctggtccaatttttgttttcccgcattgacatatgcttccagttggtgctcttaactcgtacaccattttggctattgtcagcgtaatattctgtggacaaatttgactcagaataagaaacttcacaatatcgcagtcttaaattaactgctccacggttgatttgttagtgtttgt

SEQ ID NO: 49982 - DNA, 398 bp, Zea Mays
atatcgaggtctgtcatgtgtgcagtggatgacatcctcagcggacatgatattctccaaagaaagccgaggataagccccaggccgagtgaccaagcaggagttttctactttatatatcatggttaactatggacatttgtacactcacagatgctggaagaaaattttctcttgccgctaccacttagaatgtgtgttaccagtttgaaagccatgtctggtccaatttttgttttcccgcattgacatatgcttccagttggtgctcttaactcgtacaccattttggctattgtcagcgtaatattctgtggacaaatttgactcagaataagaaacttcacaatatcgcagtcttaaattaactgctccacggttgatttgttagtgtttgt

SEQ ID NO: 49983 - DNA, 1704 bp, Zea Mays
atggataggggagtcgtccacaaatcatcggcggctctagtgcgcgagatgggggaggcaggccatagccatggatggtggagcatgaataatttgctgaggcccccctttgagcagcagcaccacgcttctcttttcatgccgtccacaaccaccagcagcagcaccgccgccgccgcgccctcttcttcttcgtcgtcgtcgccgcctctccaatccttctcctctctgctgctctcgaaccactacccgctgcctaccaccaccagcacgtcgccgtggcagcacgacaccagcatcacaagtagccatggccagccggattcttggagccagctcatacacaaggaaagccagcagatggcgtttccaactacgatttgttcggaatccggaggcggcggcagcagctacgtcgtctacggtgccgcagcggctagccatgggagcagcacaagtgatgtcgagatccagttgccatggggaagcagcagcgtactccagcagcagcagaaagcgtcctctcctaggtcttcttccagaaccacagcgacgacgacctctcccggaagcaacatgctggagttctccaacaacagtagcagttcaccacgtgagtgcatcagtacagtatctggatcagctttcaagaaggctaggacccaagaaccctccccggctcaatctactgtgaaggtgaggaaggagaagctaggggatcgaataactgctctccaccagcttgtctccccgtttggaaagactgacacagcgtctgtactccttgaagccattgggtacatcagattcctccatagtcaaattgaggctctgagctccccgtacgtgggcggcagcaatggaggtgggggcggctccaagcagaatcagcagctccacgaggcgcagagagaaagcaggcacagcatatttccagaagaccctggccagctcctgcatgacagcagcgcaataaagaaacgggccggactgcagcctgctgatggtgagcaggatgaagaaagctgtgatgaagagaagaagaaggatctgagaagcaggggcctgtgcctcgtcccggtgagctgcacgctggacgtgggtgtggacgtggtcgctggccccgcagactactgggcggcagctgcgccggctttcggcatggggttcggtgcgtagatgatgctggccaggacgtacgatcgatgctgtgaggaacacttgtgtgtgtctgtgtgcgccatatgcatgtatgggctgcacctgcatgcatagcatcaggagcagccatcctggtggaagctggagaatgctcaagaaggctggctcctcttgatgctatatatgcgtatggtatatggtgcacacaccgacaatgcatgcatgggcatatattatatagctacagagacgctgagagtatatgacttgcgtttctgtgtttgtgtgtacgtgatgagatcttgtctagctagctagagcgagatcaaacaatttgggtgccatggagaggggcgctatagctgcagatatttaattgttaaggctaggagtactgcgcgcggatctgtaagcaatgcaactcttttaagtcttcgtcattgaggcgtcactgtgtgctatatatatatgcatggccgaaatgtgtaataagtttgtgcgtgcatgctattttccccaaagtttgatcaatttatcgcatca

SEQ ID NO: 49984 - DNA, 1704 bp, Zea Mays
atggataggggagtcgtccacaaatcatcggcggctctagtgcgcgagatgggggaggcaggccatagccatggatggtggagcatgaataatttgctgaggcccccctttgagcagcagcaccacgcttctcttttcatgccgtccacaaccaccagcagcagcaccgccgccgccgcgccctcttcttcttcgtcgtcgtcgccgcctctccaatccttctcctctctgctgctctcgaaccactacccgctgcctaccaccaccagcacgtcgccgtggcagcacgacaccagcatcacaagtagccatggccagccggattcttggagccagctcatacacaaggaaagccagcagatggcgtttccaactacgatttgttcggaatccggaggcggcggcagcagctacgtcgtctacggtgccgcagcggctagccatgggagcagcacaagtgatgtcgagatccagttgccatggggaagcagcagcgtactccagcagcagcagaaagcgtcctctcctaggtcttcttccagaaccacagcgacgacgacctctcccggaagcaacatgctggagttctccaacaacagtagcagttcaccacgtgagtgcatcagtacagtatctggatcagctttcaagaaggctaggacccaagaaccctccccggctcaatctactgtgaaggtgaggaaggagaagctaggggatcgaataactgctctccaccagcttgtctccccgtttggaaagactgacacagcgtctgtactccttgaagccattgggtacatcagattcctccatagtcaaattgaggctctgagctccccgtacgtgggcggcagcaatggaggtgggggcggctccaagcagaatcagcagctccacgaggctagtagagaaagcaggcacagcatatttccagaagaccctggccagctcctgcatgacagcagcgcaataaagaaacgggccggactgcagcctgctgatggtgagcaggatgaagaaagctgtgatgaagagaagaagaaggatctgagaagcaggggcctgtgcctcgtcccggtgagctgcacgctggacgtgggtgtggacgtggtcgctggccccgcagactactgggcggcagctgcgccggctttcggcatggggttcggtgcgtagatgatgctggccaggacgtacgatcgatgctgtgaggaacacttgtgtgtgtctgtgtgcgccatatgcatgtatgggctgcacctgcatgcatagcatcaggagcagccatcctggtggaagctggagaatgctcaagaaggctggctcctcttgatgctatatatgcgtatggtatatggtgcacacaccgacaatgcatgcatgggcatatattatatagctacagagacgctgagagtatatgacttgcgtttctgtgtttgtgtgtacgtgatgagatcttgtctagctagctagagcgagatcaaacaatttgggtgccatggagaggggcgctatagctgcagatatttaattgttaaggctaggagtactgcgcgcggatctgtaagcaatgcaactcttttaagtcttcgtcattgaggcgtcactgtgtgctatatatatatgcatggccgaaatgtgtaataagtttgtgcgtgcatgctattttccccaaagtttgatcaatttatcgcatca

SEQ ID NO: 49985 - DNA, 1695 bp, Zea Mays
atggataggggagtcgtccacaaatcatcggcggctctagtgcgcgagatgggggaggcaggccatagccatggatggtggagcatgaataatttgctgaggcccccctttgagcagcagcaccacgcttctcttttcatgccgtccacaaccaccagcagcagcaccgccgccgccgcgccctcttcttcttcgtcgtcgtcgccgcctctccaatccttctcctctctgctgctctcgaaccactacccgctgcctaccaccaccagcacgtcgccgtggcagcacgacaccagcatcacaagtagccatggccagccggattcttggagccagctcatacacaaggaaagccagcagatggcgtttccaactacgatttgttcggaatccggaggcggcggcagcagctacgtcgtctacggtgccgcagcggctagccatgggagcagcacaagtgatgtcgagatccagttgccatggggaagcagcagcgtactccagcagcagcagaaagcgtcctctcctaggtcttcttccagaaccacagcgacgacgacctctcccggaagcaacatgctggagttctccaacaacagtagcagttcaccacgtgagtgcatcagtacagtatctggatcagctttcaagaaggctaggacccaagaaccctccccggctcaatctactgtgaaggtgaggaaggagaagctaggggatcgaataactgctctccaccagcttgtctccccgtttggaaagactgacacagcgtctgtactccttgaagccattgggtacatcagattcctccatagtcaaattgaggctctgagctccccgtacgtgggcggcagcaatggaggtgggggcggctccaagcagaatcagcagctccacgaggctagtgcgcagagagaaagcaggcacagcatatttccagaagaccctggccagctcctgcatgacagcagcgcaataaagaaacgggccggactgcagcctgctgatgaaagctgtgatgaagagaagaagaaggatctgagaagcaggggcctgtgcctcgtcccggtgagctgcacgctggacgtgggtgtggacgtggtcgctggccccgcagactactgggcggcagctgcgccggctttcggcatggggttcggtgcgtagatgatgctggccaggacgtacgatcgatgctgtgaggaacacttgtgtgtgtctgtgtgcgccatatgcatgtatgggctgcacctgcatgcatagcatcaggagcagccatcctggtggaagctggagaatgctcaagaaggctggctcctcttgatgctatatatgcgtatggtatatggtgcacacaccgacaatgcatgcatgggcatatattatatagctacagagacgctgagagtatatgacttgcgtttctgtgtttgtgtgtacgtgatgagatcttgtctagctagctagagcgagatcaaacaatttgggtgccatggagaggggcgctatagctgcagatatttaattgttaaggctaggagtactgcgcgcggatctgtaagcaatgcaactcttttaagtcttcgtcattgaggcgtcactgtgtgctatatatatatgcatggccgaaatgtgtaataagtttgtgcgtgcatgctattttccccaaagtttgatcaatttatcgcatca

SEQ ID NO: 49986 - DNA, 1713 bp, Zea Mays
atggataggggagtcgtccacaaatcatcggcggctctagtgcgcgagatgggggaggcaggccatagccatggatggtggagcatgaataatttgctgaggcccccctttgagcagcagcaccacgcttctcttttcatgccgtccacaaccaccagcagcagcaccgccgccgccgcgccctcttcttcttcgtcgtcgtcgccgcctctccaatccttctcctctctgctgctctcgaaccactacccgctgcctaccaccaccagcacgtcgccgtggcagcacgacaccagcatcacaagtagccatggccagccggattcttggagccagctcatacacagcaaggaaagccagcagatggcgtttccaactacgatttgttcggaatccggaggcggcggcagcagctacgtcgtctacggtgccgcagcggctagccatgggagcagcacaagtgatgtcgagatccagttgccatggggaagcagcagcgtactccagcagcagcagaaagcgtcctctcctaggtcttcttccagaaccacagcgacgacgacctctcccggaagcaacatgctggagttctccaacaacagtagcagttcaccacgtgagtgcatcagtacagtatctggatcagctttcaagaaggctaggacccaagaaccctccccggctcaatctactgtgaaggtgaggaaggagaagctaggggatcgaataactgctctccaccagcttgtctccccgtttggaaagactgacacagcgtctgtactccttgaagccattgggtacatcagattcctccatagtcaaattgaggctctgagctccccgtacgtgggcggcagcaatggaggtgggggcggctccaagcagaatcagcagctccacgaggctagtgcgcagagagaaagcaggcacagcatatttccagaagaccctggccagctcctgcatgacagcagcgcaataaagaaacgggccggactgcagcctgctgatggtgagcaggatgaagaaagctgtgatgaagagaagaagaaggatctgagaagcaggggcctgtgcctcgtcccggtgagctgcacgctggacgtgggtgtggacgtggtcgctggccccgcagactactgggcggcagctgcgccggctttcggcatggggttcggtgcgtagatgatgctggccaggacgtacgatcgatgctgtgaggaacacttgtgtgtgtctgtgtgcgccatatgcatgtatgggctgcacctgcatgcatagcatcaggagcagccatcctggtggaagctggagaatgctcaagaaggctggctcctcttgatgctatatatgcgtatggtatatggtgcacacaccgacaatgcatgcatgggcatatattatatagctacagagacgctgagagtatatgacttgcgtttctgtgtttgtgtgtacgtgatgagatcttgtctagctagctagagcgagatcaaacaatttgggtgccatggagaggggcgctatagctgcagatatttaattgttaaggctaggagtactgcgcgcggatctgtaagcaatgcaactcttttaagtcttcgtcattgaggcgtcactgtgtgctatatatatatgcatggccgaaatgtgtaataagtttgtgcgtgcatgctattttccccaaagtttgatcaatttatcgcatca

SEQ ID NO: 49987 - DNA, 1647 bp, Zea Mays
atggataggggagtcgtccacaaatcatcggcggctctagtgcgcgagatgggggaggcaggccatagccatggatggtggagcatgaataatttgctgaggcccccctttgagcagcagcaccacgcttctcttttcatgccgtccacaaccaccagcagcagcaccgccgccgccgcgccctcttcttcttcgtcgtcgtcgccgcctctccaatccttctcctctctgctgctctcgaaccactacccgctgcctaccaccaccagcacgtcgccgtggcagcacgacaccagcatcacaagtagccatggccagccggattcttggagccagctcatacacagcaaggaaagccagcagatggcgtttccaactacgatttgttcggaatccggaggcggcggcagcagctacgtcgtctacggtgccgcagcggctagccatgggagcagcacaagtgatgtcgagatccagttgccatggggaagcagcagcgtactccagcagcagcagaaagcgtcctctcctaggtcttcttccagaaccacagcgacgacgacctctcccggaagcaacatgctggagttctccaacaacagtagcagttcaccacgtgagtgcatcagtacagtatctggatcagctttcaagaaggctaggacccaagaaccctccccggctcaatctactgtgaaggtgaggaaggagaagctaggggatcgaataactgctctccaccagcttgtctccccgtttggaaaggctctgagctccccgtacgtgggcggcagcaatggaggtgggggcggctccaagcagaatcagcagctccacgaggctagtgcgcagagagaaagcaggcacagcatatttccagaagaccctggccagctcctgcatgacagcagcgcaataaagaaacgggccggactgcagcctgctgatggtgagcaggatgaagaaagctgtgatgaagagaagaagaaggatctgagaagcaggggcctgtgcctcgtcccggtgagctgcacgctggacgtgggtgtggacgtggtcgctggccccgcagactactgggcggcagctgcgccggctttcggcatggggttcggtgcgtagatgatgctggccaggacgtacgatcgatgctgtgaggaacacttgtgtgtgtctgtgtgcgccatatgcatgtatgggctgcacctgcatgcatagcatcaggagcagccatcctggtggaagctggagaatgctcaagaaggctggctcctcttgatgctatatatgcgtatggtatatggtgcacacaccgacaatgcatgcatgggcatatattatatagctacagagacgctgagagtatatgacttgcgtttctgtgtttgtgtgtacgtgatgagatcttgtctagctagctagagcgagatcaaacaatttgggtgccatggagaggggcgctatagctgcagatatttaattgttaaggctaggagtactgcgcgcggatctgtaagcaatgcaactcttttaagtcttcgtcattgaggcgtcactgtgtgctatatatatatgcatggccgaaatgtgtaataagtttgtgcgtgcatgctattttccccaaagtttgatcaatttatcgcatca

SEQ ID NO: 49988 - DNA, 890 bp, Zea Mays
tctctctctctgtctccatagccgctctgagctccccgtacgtgggcggcagcaatggaggtgggggcggctccaagcagaatcagcagctccacgaggctagtgcgcagagagaaagcaggcacagcatatttccagaagaccctggccagctcctgcatgacagcagcgcaataaagaaacgggccggactgcagcctgctgatgaaagctgtgatgaagagaagaagaaggatctgagaagcaggggcctgtgcctcgtcccggtgagctgcacgctggacgtgggtgtggacgtggtcgctggccccgcagactactgggcggcagctgcgccggctttcggcatggggttcggtgcgtagatgatgctggccaggacgtacgatcgatgctgtgaggaacacttgtgtgtgtctgtgtgcgccatatgcatgtatgggctgcacctgcatgcatagcatcaggagcagccatcctggtggaagctggagaatgctcaagaaggctggctcctcttgatgctatatatgcgtatggtatatggtgcacacaccgacaatgcatgcatgggcatatattatatagctacagagacgctgagagtatatgacttgcgtttctgtgtttgtgtgtacgtgatgagatcttgtctagctagctagagcgagatcaaacaatttgggtgccatggagaggggcgctatagctgcagatatttaattgttaaggctaggagtactgcgcgcggatctgtaagcaatgcaactcttttaagtcttcgtcattgaggcgtcactgtgtgctatatatatatgcatggccgaaatgtgtaataagtttgtgcgtgcatgctattttccccaaagtttgatcaatttatcgcatca

SEQ ID NO: 49989 - DNA, 1466 bp, Zea Mays
gccacgaaaccaaacaaagaaaaacccgtgggccgtggtcactccgtccgcacggcgactggactatactgctaccatgaacctcgccgtcgcagccgcactgccgtccgtgacgccacgtaccggcgtcgtgctcccacggagcagtcgccgacactgcccccgcggggtcgtcccacgcgcggcctcgagctccgtttcctcctttacctccccctcagcagcggcggcgcccatctacacgcccacgccgcaggaccggtctctccggacgccgcatagcgggtaccactttgatggcacggctcgacctttctttgaaggatggtacttcaaggtgtcgattccagagtgcaggcagagtttctgctttatgtactctgttgagaaccctctcttccgtgatggtatgagtgatttggacaagttgttatatcgcccacgctttactggtgtgggagcacaaatccttggtgcggacgataagtacatatgccagttctctgagaaatcaaacaatttttggggaagatggatagaatgggatggagaacggtttgaatttgaaaatgctccatcttactcagaaaagaactggggcggaggttttccaagaaagtgatccagtgcaatgtcttcccaggagcttctggtgaagtttctttaactgctgctggtggattgaggaaaattggacttggtgatacctatgaaagtccttcactgattggaatacattatgagggacagttttttgaatttgtaccttggactggaacagtaagctgggacattggactgtggggtctttggaaaatgtctggcgagaacaaaactcatctggtagaaatagaagcaaccactgcagaatcaggaactgctctgcgcgctcctactatcgaggctggactggtaccagcgtgcaaagacacctgctatggagatctaaggctacagttgtgggaaaagaaatacgatggtagcaagggagagatgatactcgacgccacaagcaacatggcagcactagaagttggcggaggcccctggttcaatgggtggaaagggacaactgttgtgaacgaggttgtaaataacattgtgggcacgccagtcgatgtagagagcctcctcccaatcccatttcttaagcccccaggcctataggatcaccaacgaatgtcacaatgaagaagtatcacggatatcaatgttgatcatacagtaaaactgtgcccagttcaataataattcatgatttttacttgttttttactacaatccacaaactatctgccgttgcatgtgcatcgacatcattgttagctcacagttttcccttctttttcgaaggcgggatgattttcacagaaccttctattgttggggtagactaactatttcaagactgatagaccgaactctgaatatatggcaaaatgggacatgaatctatagtagggtca

SEQ ID NO: 49990 - DNA, 1801 bp, Zea Mays
cgaaaccaaacaaagaaaaacccgtgggccgtggtcactccgtccgcacggcgactggactatactgctaccatgaacctcgccgtcgcagccgcactgccgtccgtgacgccacgtaccggcgtcgtgctcccacggagcagtcgccgacactgcccccgcggggtcgtcccacgcgcggcctcgagctccgtttcctcctttacctccccctcagcagcggcggcgcccatctacacgcccacgccgcaggaccggtctctccggacgccgcatagcgggtaccactttgatggcacggctcgacctttctttgaaggatggtacttcaaggtgtcgattccagagtgcaggcagagtttctgctttatgtactctgttgagaaccctctcttccgtgatggtatgagtgatttggacaagttgttatatcgcccacgctttactggtgtgggagcacaaatccttggtgcggacgataagtacatatgccagttctctgagaaatcaaacaatttttggggaagcatgaactaatgctgggaaacactttcatttccaataaagagtcaaccccaccgcaaggggaggtgccccctcagcggttgtaggatttctctaggcgtgttttggaagggttccaagtcaccccaatatggcatcaaggtttcatacgtgatgatggaaggtcaaactacgtgccaaatgtccaaacagctcgctgggagtacagcactcgtccagtttatgggtggggtgatgtcaaatctaagcagttgtccacagctggttggcttgcagcttttcctttctttgaacctcattggcaaatttgcatggctagtggcttgtccacaggatggatagaatgggatggagaacggtttgaatttgaaaatgctccatcttactcagaaaagaactggggcggaggttttccaagaaagtggtattggatccagtgcaatgtcttcccaggagcttctggtgaagtttctttaactgctgctggtggattgaggaaaattggacttggtgatacctatgaaagtccttcactgattggaatacattatgagggacagttttttgaatttgtaccttggactggaacagtaagctgggacattggactgtggggtctttggaaaatgtctggcgagaacaaaactcatctggtagaaatagaagcaaccactgcagaatcaggaactgctctgcgcgctcctactatcgaggctggactggtaccagcgtgcaaagacacctgctatggagatctaaggctacagttgtgggaaaagaaatacgatggtagcaagggagagatgatactcgacgccacaagcaacatggcagcactagaagttggcggaggcccctggttcaatgggtggaaagggacaactgttgtgaacgaggttgtaaataacattgtgggcacgccagtcgatgtagagagcctcctcccaatcccatttcttaagcccccaggcctataggatcaccaacgaatgtcacaatgaagaagtatcacggatatcaatgttgatcatacagtaaaactgtgcccagttcaataataattcatgatttttacttgttttttactacaatccacaaactatctgccgttgcatgtgcatcgacatcattgttagctcacagttttcccttctttttcgaaggcgggatgattttcacagaaccttctattgttggggtagactaactatttcaagactgatagaccgaactctgaatatatggcaaaatgggacatgaatctatagtagggtca

SEQ ID NO: 49991 - DNA, 1885 bp, Zea Mays
cgaaaccaaacaaagaaaaacccgtgggccgtggtcactccgtccgcacggcgactggactatactgctaccatgaacctcgccgtcgcagccgcactgccgtccgtgacgccacgtaccggcgtcgtgctcccacggagcagtcgccgacactgcccccgcggggtcgtcccacgcgcggcctcgagctccgtttcctcctttacctccccctcagcagcggcggcgcccatctacacgcccacgccgcaggaccggtctctccggacgccgcatagcgggtaccactttgatggcacggctcgacctttctttgaaggatggtacttcaaggtgtcgattccagagtgcaggcagagtttctgctttatgtactctgttgagaaccctctcttccgtgatggtatgagtgatttggacaagttgttatatcgcccacgctttactggtgtgggagcacaaatccttggtgcggacgataagtacatatgccagttctctgagaaatcaaacaatttttggggaagtaggcatgaactaatgctgggaaacactttcatttccaataaagagtcaaccccaccgcaaggggaggtgccccctcaggatttctctaggcgtgttttggaagggttccaagtcaccccaatatggcatcaaggtttcatacgtgatgatggaaggtcaaactacgtgccaaatgtccaaacagctcgctgggagtacagcactcgtccagtttatgggtggggtgatgtcaaatctaagcagttgtccacagctggatggatagaatgggatggagaacggtttgaatttgaaaatgctccatcttactcagaaaagaactggggcggaggttttccaagaaagtggtattggatccagtgcaatgtcttcccaggagcttctggtgaagtttctttaactgctgctggtggattgaggaaaattggacttggtgatacctatgaaagtccttcactggtacaatttgtgatacttcgctttccaaatttaacatggtccatacttctacttcacacttacgtgttatgggcatgcatccatgagactgaattggtgagggagacaggagacattgcacaagggagaagctgactagagcacatgcttcaggcgtgcatcggggtgtgaggggcaatggctagacggtggtaaagagatgagggagaaggttaagctgggacattggactgtggggtctttggaaaatgtctggcgagaacaaaactcatctggtagaaatagaagcaaccactgcagaatcaggaactgctctgcgcgctcctactatcgaggctggactggtaccagcgtgcaaagacacctgctatggagatctaaggctacagttgtgggaaaagaaatacgatggtagcaagggagagatgatactcgacgccacaagcaacatggcagcactagaagttggcggaggcccctggttcaatgggtggaaagggacaactgttgtgaacgaggttgtaaataacattgtgggcacgccagtcgatgtagagagcctcctcccaatcccatttcttaagcccccaggcctataggatcaccaacgaatgtcacaatgaagaagtatcacggatatcaatgttgatcatacagtaaaactgtgcccagttcaataataattcatgatttttacttgttttttactacaatccacaaactatctgccgttgcatgtgcatcgacatcattgttagctcacagttttcccttctttttcgaaggcgggatgattttcacagaaccttctattgttggggtagactaactatttcaagactgatagaccgaactctgaatatatggcaaaatgggacatgaatctatagtagggtca

SEQ ID NO: 49992 - DNA, 1734 bp, Zea Mays
cgaaaccaaacaaagaaaaacccgtgggccgtggtcactccgtccgcacggcgactggactatactgctaccatgaacctcgccgtcgcagccgcactgccgtccgtgacgccacgtaccggcgtcgtgctcccacggagcagtcgccgacactgcccccgcggggtcgtcccacgcgcggcctcgagctccgtttcctcctttacctccccctcagcagcggcggcgcccatctacacgcccacgccgcaggaccggtctctccggacgccgcatagcgggtaccactttgatggcacggctcgacctttctttgaaggatggtacttcaaggtgtcgattccagagtgcaggcagagtttctgctttatgtactctgttgagaaccctctcttccgtgatggtatgagtgatttggacaagttgttatatcgcccacgctttactggtgtgggagcacaaatccttggtgcggacgataagtacatatgccagttctctgagaaatcaaacaatttttggggaagtaggcatgaactaatgctgggaaacactttcatttccaataaagagtcaaccccaccgcaaggggaggtgccccctcaggatttctctaggcgtgttttggaagggttccaagtcaccccaatatggcatcaaggtttcatacgtgatgatggaaggtcaaactacgtgccaaatgtccaaacagctcgctgggagtacagcactcgtccagtttatgggtggggtgatgtcaaatctaagcagttgtccacagctggttggcttgcagcttttcctttctttgaacctcattggcaaatttgcatggctagtggcttgtccacaggatggatagaatgggatggagaacggtttgaatttgaaaatgctccatcttactcagaaaagaactggggcggaggttttccaagaaagtgatccagtgcaatgtcttcccaggagcttctggtgaagtttctttaactgctgctggtggattgaggaaaattggacttggtgatacctatgaaagtccttcactgtaagctgggacattggactgtggggtctttggaaaatgtctggcgagaacaaaactcatctggtagaaatagaagcaaccactgcagaatcaggaactgctctgcgcgctcctactatcgaggctggactggtaccagcgtgcaaagacacctgctatggagatctaaggctacagttgtgggaaaagaaatacgatggtagcaagggagagatgatactcgacgccacaagcaacatggcagcactagaagttggcggaggcccctggttcaatgggtggaaagggacaactgttgtgaacgaggttgtaaataacattgtgggcacgccagtcgatgtagagagcctcctcccaatcccatttcttaagcccccaggcctataggatcaccaacgaatgtcacaatgaagaagtatcacggatatcaatgttgatcatacagtaaaactgtgcccagttcaataataattcatgatttttacttgttttttactacaatccacaaactatctgccgttgcatgtgcatcgacatcattgttagctcacagttttcccttctttttcgaaggcgggatgattttcacagaaccttctattgttggggtagactaactatttcaagactgatagaccgaactctgaatatatggcaaaatgggacatgaatctatagtagggtca

SEQ ID NO: 49993 - DNA, 1867 bp, Zea Mays
cgaaaccaaacaaagaaaaacccgtgggccgtggtcactccgtccgcacggcgactggactatactgctaccatgaacctcgccgtcgcagccgcactgccgtccgtgacgccacgtaccggcgtcgtgctcccacggagcagtcgccgacactgcccccgcggggtcgtcccacgcgcggcctcgagctccgtttcctcctttacctccccctcagcagcggcggcgcccatctacacgcccacgccgcaggaccggtctctccggacgccgcatagcgggtaccactttgatggcacggctcgacctttctttgaaggatggtacttcaaggtgtcgattccagagtgcaggcagagtttctgctttatgtactctgttgagaaccctctcttccgtgatggtatgagtgatttggacaagttgttatatcgcccacgctttactggtgtgggagcacaaatccttggtgcggacgataagtacatatgccagttctctgagaaatcaaacaatttttggggaagtaggcatgaactaatgctgggaaacactttcatttccaataaagagtcaaccccaccgcaaggggaggtgccccctcaggatttctctaggcgtgttttggaagggttccaagtcaccccaatatggcatcaaggtttcatacgtgatgatggaaggtcaaactacgtgccaaatgtccaaacagctcgctgggagtacagcactcgtccagtttatgggtggggtgatgtcaaatctaagcagttgtccacagctggttggcttgcagcttttcctttctttgaacctcattggcaaatttgcatggctagtggcttgtccacaggatggatagaatgggatggagaacggtttgaatttgaaaatgctccatcttactcagaaaagaactggggcggaggttttccaagaaagtggtattggatccagtgcaatgtcttcccaggagcttctggtgaagtttctttaactgctgctggtggattgaggaaaattggacttggtgatacctatgaaagtccttcactgactgaattggtgagggagacaggagacattgcacaagggagaagctgactagagcacatgcttcaggcgtgcatcggggtgtgaggggcaatggctagacggtggtaaagagatgagggagaaggttaagctgggacattggactgtggggtctttggaaaatgtctggcgagaacaaaactcatctggtagaaatagaagcaaccactgcagaatcaggaactgctctgcgcgctcctactatcgaggctggactggtaccagcgtgcaaagacacctgctatggagatctaaggctacagttgtgggaaaagaaatacgatggtagcaagggagagatgatactcgacgccacaagcaacatggcagcactagaagttggcggaggcccctggttcaatgggtggaaagggacaactgttgtgaacgaggttgtaaataacattgtgggcacgccagtcgatgtagagagcctcctcccaatcccatttcttaagcccccaggcctataggatcaccaacgaatgtcacaatgaagaagtatcacggatatcaatgttgatcatacagtaaaactgtgcccagttcaataataattcatgatttttacttgttttttactacaatccacaaactatctgccgttgcatgtgcatcgacatcattgttagctcacagttttcccttctttttcgaaggcgggatgattttcacagaaccttctattgttggggtagactaactatttcaagactgatagaccgaactctgaatatatggcaaaatgggacatgaatctatagtagggtca

SEQ ID NO: 49994 - DNA, 1789 bp, Zea Mays
cgaaaccaaacaaagaaaaacccgtgggccgtggtcactccgtccgcacggcgactggactatactgctaccatgaacctcgccgtcgcagccgcactgccgtccgtgacgccacgtaccggcgtcgtgctcccacggagcagtcgccgacactgcccccgcggggtcgtcccacgcgcggcctcgagctccgtttcctcctttacctccccctcagcagcggcggcgcccatctacacgcccacgccgcaggaccggtctctccggacgccgcatagcgggtaccactttgatggcacggctcgacctttctttgaaggatggtacttcaaggtgtcgattccagagtgcaggcagagtttctgctttatgtactctgttgagaaccctctcttccgtgatggtatgagtgatttggacaagttgttatatcgcccacgctttactggtgtgggagcacaaatccttggtgcggacgataagtacatatgccagttctctgagaaatcaaacaatttttggggaagtaggcatgaactaatgctgggaaacactttcatttccaataaagagtcaaccccaccgcaaggggaggtgccccctcaggatttctctaggcgtgttttggaagggttccaagtcaccccaatatggcatcaaggtttcatacgtgatgatggaaggtcaaactacgtgccaaatgtccaaacagctcgctgggagtacagcactcgtccagtttatgggtggggtgatgtcaaatctaagcagttgtccacagctggttggcttgcagcttttcctttctttgaacctcattggcaaatttgcatggctagtggcttgtccacaggatggatagaatgggatggagaacggtttgaatttgaaaatgctccatcttactcagaaaagaactggggcggaggttttccaagaaagtgatccagtgcaatgtcttcccaggagcttctggtgaagtttctttaactgctgctggtggattgaggaaaattggacttggtgatacctatgaaagtccttcactgattggaatacattatgagggacagttttttgaatttgtaccttggactggaacagtaagctgggacattggactgtggggtctttggaaaatgtctggcgagaacaaaactcatctggtagaaatagaagcaaccactgcagaatcaggaactgctctgcgcgctcctactatcgaggctggactggtaccagcgtgcaaagacacctgctatggagatctaaggctacagttgtgggaaaagaaatacgatggtagcaagggagagatgatactcgacgccacaagcaacatggcagcactagaagttggcggaggcccctggttcaatgggtggaaagggacaactgttgtgaacgaggttgtaaataacattgtgggcacgccagtcgatgtagagagcctcctcccaatcccatttcttaagcccccaggcctataggatcaccaacgaatgtcacaatgaagaagtatcacggatatcaatgttgatcatacagtaaaactgtgcccagttcaataataattcatgatttttacttgttttttactacaatccacaaactatctgccgttgcatgtgcatcgacatcattgttagctcacagttttcccttctttttcgaaggcgggatgattttcacagaaccttctattgttggggtagactaactatttcaagactgatagaccgaactctgaatatatggcaaaatgggacatgaatctatagtagggtca

SEQ ID NO: 49995 - DNA, 1950 bp, Zea Mays
cgaaaccaaacaaagaaaaacccgtgggccgtggtcactccgtccgcacggcgactggactatactgctaccatgaacctcgccgtcgcagccgcactgccgtccgtgacgccacgtaccggcgtcgtgctcccacggagcagtcgccgacactgcccccgcggggtcgtcccacgcgcggcctcgagctccgtttcctcctttacctccccctcagcagcggcggcgcccatctacacgcccacgccgcaggaccggtctctccggacgccgcatagcgggtaccactttgatggcacggctcgacctttctttgaaggatggtacttcaaggtgtcgattccagagtgcaggcagagtttctgctttatgtactctgttgagaaccctctcttccgtgatggtatgagtgatttggacaagttgttatatcgcccacgctttactggtgtgggagcacaaatccttggtgcggacgataagtacatatgccagttctctgagaaatcaaacaatttttggggaagcatgaactaatgctgggaaacactttcatttccaataaagagtcaaccccaccgcaaggggaggtgccccctcaggatttctctaggcgtgttttggaagggttccaagtcaccccaatatggcatcaaggtttcatacgtgatgatggaaggtcaaactacgtgccaaatgtccaaacagctcgctgggagtacagcactcgtccagtttatgggtggggtgatgtcaaatctaagcagttgtccacagctggttggcttgcagcttttcctttctttgaacctcattggcaaatttgcatggctagtggcttgtccacaggatggatagaatgggatggagaacggtttgaatttgaaaatgctccatcttactcagaaaagaactggggcggaggttttccaagaaagtggtattggatccagtgcaatgtcttcccaggagcttctggtgaagtttctttaactgctgctggtggattgaggaaaattggacttggtgatacctatgaaagtccttcactggtacaatttgtgatacttcgctttccaaatttaacatggtccatacttctacttcacacttacgtgttatgggcatgcatccatgagactgaattggtgagggagacaggagacattgcacaagggagaagctgactagagcacatgcttcaggcgtgcatcggggtgtgaggggcaatggctagacggtggtaaagagatgagggagaaggttaagctgggacattggactgtggggtctttggaaaatgtctggcgagaacaaaactcatctggtagaaatagaagcaaccactgcagaatcaggaactgctctgcgcgctcctactatcgaggctggactggtaccagcgtgcaaagacacctgctatggagatctaaggctacagttgtgggaaaagaaatacgatggtagcaagggagagatgatactcgacgccacaagcaacatggcagcactagaagttggcggaggcccctggttcaatgggtggaaagggacaactgttgtgaacgaggttgtaaataacattgtgggcacgccagtcgatgtagagagcctcctcccaatcccatttcttaagcccccaggcctataggatcaccaacgaatgtcacaatgaagaagtatcacggatatcaatgttgatcatacagtaaaactgtgcccagttcaataataattcatgatttttacttgttttttactacaatccacaaactatctgccgttgcatgtgcatcgacatcattgttagctcacagttttcccttctttttcgaaggcgggatgattttcacagaaccttctattgttggggtagactaactatttcaagactgatagaccgaactctgaatatatggcaaaatgggacatgaatctatagtagggtca

SEQ ID NO: 49996 - DNA, 1900 bp, Zea Mays
cgaaaccaaacaaagaaaaacccgtgggccgtggtcactccgtccgcacggcgactggactatactgctaccatgaacctcgccgtcgcagccgcactgccgtccgtgacgccacgtaccggcgtcgtgctcccacggagcagtcgccgacactgcccccgcggggtcgtcccacgcgcggcctcgagctccgtttcctcctttacctccccctcagcagcggcggcgcccatctacacgcccacgccgcaggaccggtctctccggacgccgcatagcgggtaccactttgatggcacggctcgacctttctttgaaggatggtacttcaaggtgtcgattccagagtgcaggcagagtttctgctttatgtactctgttgagaaccctctcttccgtgatggtatgagtgatttggacaagttgttatatcgcccacgctttactggtgtgggagcacaaatccttggtgcggacgataagtacatatgccagttctctgagaaatcaaacaatttttggggaagtaggcatgaactaatgctgggaaacactttcatttccaataaagagtcaaccccaccgcaaggggaggtgccccctcaggatttctctaggcgtgttttggaagggttccaagtcaccccaatatggcatcaaggtttcatacgtgatgatggaaggtcaaactacgtgccaaatgtccaaacagctcgctgggagtacagcactcgtccagtttatgggtggggtgatgtcaaatctaagcagttgtccacagctggttggcttgcagcttttcctttctttgaacctcattggcaaatttgcatggctagtggcttgtccacaggatggatagaatgggatggagaacggtttgaatttgaaaatgctccatcttactcagaaaagaactggggcggaggttttccaagaaagtggtattggatccagtgcaatgtcttcccaggagcttctggtgaagtttctttaactgctgctggtggattgaggaaaattggacttggtgatacctatgaaagtccttcactggagacattgcacaagggagaagctgactagagcacatgcttcaggcgtgcatcggggtgtgaggggcaatggctagacggtggtaaagagatgagggagaaggtattggaatacattatgagggacagttttttgaatttgtaccttggactggaacagtaagctgggacattggactgtggggtctttggaaaatgtctggcgagaacaaaactcatctggtagaaatagaagcaaccactgcagaatcaggaactgctctgcgcgctcctactatcgaggctggactggtaccagcgtgcaaagacacctgctatggagatctaaggctacagttgtgggaaaagaaatacgatggtagcaagggagagatgatactcgacgccacaagcaacatggcagcactagaagttggcggaggcccctggttcaatgggtggaaagggacaactgttgtgaacgaggttgtaaataacattgtgggcacgccagtcgatgtagagagcctcctcccaatcccatttcttaagcccccaggcctataggatcaccaacgaatgtcacaatgaagaagtatcacggatatcaatgttgatcatacagtaaaactgtgcccagttcaataataattcatgatttttacttgttttttactacaatccacaaactatctgccgttgcatgtgcatcgacatcattgttagctcacagttttcccttctttttcgaaggcgggatgattttcacagaaccttctattgttggggtagactaactatttcaagactgatagaccgaactctgaatatatggcaaaatgggacatgaatctatagtagggtca

SEQ ID NO: 49997 - DNA, 1922 bp, Zea Mays
cgaaaccaaacaaagaaaaacccgtgggccgtggtcactccgtccgcacggcgactggactatactgctaccatgaacctcgccgtcgcagccgcactgccgtccgtgacgccacgtaccggcgtcgtgctcccacggagcagtcgccgacactgcccccgcggggtcgtcccacgcgcggcctcgagctccgtttcctcctttacctccccctcagcagcggcggcgcccatctacacgcccacgccgcaggaccggtctctccggacgccgcatagcgggtaccactttgatggcacggctcgacctttctttgaaggatggtacttcaaggtgtcgattccagagtgcaggcagagtttctgctttatgtactctgttgagaaccctctcttccgtgatggtatgagtgatttggacaagttgttatatcgcccacgctttactggtgtgggagcacaaatccttggtgcggacgataagtacatatgccagttctctgagaaatcaaacaatttttggggaagtaggcatgaactaatgctgggaaacactttcatttccaataaagagtcaaccccaccgcaaggggaggtgccccctcaggatttctctaggcgtgttttggaagggttccaagtcaccccaatatggcatcaaggtttcatacgtgatgatggaaggtcaaactacgtgccaaatgtccaaacagctcgctgggagtacagcactcgtccagtttatgggtggggtgatgtcaaatctaagcagttgtccacagctggttggcttgcagcttttcctttctttgaacctcattggcaaatttgcatggctagtggcttgtccacaggatggatagaatgggatggagaacggtttgaatttgaaaatgctccatcttactcagaaaagaactggggcggaggttttccaagaaagtggtattggatccagtgcaatgtcttcccaggagcttctggtgaagtttctttaactgctgctggtggattgaggaaaattggacttggtgatacctatgaaagtccttcactgactgaattggtgagggagacaggagacattgcacaagggagaagctgactagagcacatgcttcaggcgtgcatcggggtgtgaggggcaatggctagacggtggtaaagagatgagggagaaggtattggaatacattatgagggacagttttttgaatttgtaccttggactggaacagtaagctgggacattggactgtggggtctttggaaaatgtctggcgagaacaaaactcatctggtagaaatagaagcaaccactgcagaatcaggaactgctctgcgcgctcctactatcgaggctggactggtaccagcgtgcaaagacacctgctatggagatctaaggctacagttgtgggaaaagaaatacgatggtagcaagggagagatgatactcgacgccacaagcaacatggcagcactagaagttggcggaggcccctggttcaatgggtggaaagggacaactgttgtgaacgaggttgtaaataacattgtgggcacgccagtcgatgtagagagcctcctcccaatcccatttcttaagcccccaggcctataggatcaccaacgaatgtcacaatgaagaagtatcacggatatcaatgttgatcatacagtaaaactgtgcccagttcaataataattcatgatttttacttgttttttactacaatccacaaactatctgccgttgcatgtgcatcgacatcattgttagctcacagttttcccttctttttcgaaggcgggatgattttcacagaaccttctattgttggggtagactaactatttcaagactgatagaccgaactctgaatatatggcaaaatgggacatgaatctatagtagggtca

SEQ ID NO: 49998 - DNA, 1469 bp, Zea Mays
cgaaaccaaacaaagaaaaacccgtgggccgtggtcactccgtccgcacggcgactggactatactgctaccatgaacctcgccgtcgcagccgcactgccgtccgtgacgccacgtaccggcgtcgtgctcccacggagcagtcgccgacactgcccccgcggggtcgtcccacgcgcggcctcgagctccgtttcctcctttacctccccctcagcagcggcggcgcccatctacacgcccacgccgcaggaccggtctctccggacgccgcatagcgggtaccactttgatggcacggctcgacctttctttgaaggatggtacttcaaggtgtcgattccagagtgcaggcagagtttctgctttatgtactctgttgagaaccctctcttccgtgatggtatgagtgatttggacaagttgttatatcgcccacgctttactggtgtgggagcacaaatccttggtgcggacgataagtacatatgccagttctctgagaaatcaaacaatttttggggaagatggatagaatgggatggagaacggtttgaatttgaaaatgctccatcttactcagaaaagaactggggcggaggttttccaagaaagtggtattggatccagtgcaatgtcttcccaggagcttctggtgaagtttctttaactgctgctggtggattgaggaaaattggacttggtgatacctatgaaagtccttcactgattggaatacattatgagggacagttttttgaatttgtaccttggactggaacagtaagctgggacattggactgtggggtctttggaaaatgtctggcgagaacaaaactcatctggtagaaatagaagcaaccactgcagaatcaggaactgctctgcgcgctcctactatcgaggctggactggtaccagcgtgcaaagacacctgctatggagatctaaggctacagttgtgggaaaagaaatacgatggtagcaagggagagatgatactcgacgccacaagcaacatggcagcactagaagttggcggaggcccctggttcaatgggtggaaagggacaactgttgtgaacgaggttgtaaataacattgtgggcacgccagtcgatgtagagagcctcctcccaatcccatttcttaagcccccaggcctataggatcaccaacgaatgtcacaatgaagaagtatcacggatatcaatgttgatcatacagtaaaactgtgcccagttcaataataattcatgatttttacttgttttttactacaatccacaaactatctgccgttgcatgtgcatcgacatcattgttagctcacagttttcccttctttttcgaaggcgggatgattttcacagaaccttctattgttggggtagactaactatttcaagactgatagaccgaactctgaatatatggcaaaatgggacatgaatctatagtagggtca

SEQ ID NO: 49999 - DNA, 967 bp, Zea Mays
ctgtgtgttcgagaaaaaattgaggatggatagaatgggatggagaacggtttgaatttgaaaatgctccatcttactcagaaaagaactggggcggaggttttccaagaaagtggtattggatccagtgcaatgtcttcccaggagcttctggtgaagtttctttaactgctgctggtggattgaggaaaattggacttggtgatacctatgaaagtccttcactgattggaatacattatgagggacagttttttgaatttgtaccttggactggaacagtaagctgggacattggactgtggggtctttggaaaatgtctggcgagaacaaaactcatctggtagaaatagaagcaaccactgcagaatcaggaactgctctgcgcgctcctactatcgaggctggactggtaccagcgtgcaaagacacctgctatggagatctaaggctacagttgtgggaaaagaaatacgatggtagcaagggagagatgatactcgacgccacaagcaacatggcagcactagaagttggcggaggcccctggttcaatgggtggaaagggacaactgttgtgaacgaggttgtaaataacattgtgggcacgccagtcgatgtagagagcctcctcccaatcccatttcttaagcccccaggcctataggatcaccaacgaatgtcacaatgaagaagtatcacggatatcaatgttgatcatacagtaaaactgtgcccagttcaataataattcatgatttttacttgttttttactacaatccacaaactatctgccgttgcatgtgcatcgacatcattgttagctcacagttttcccttctttttcgaaggcgggatgattttcacagaaccttctattgttggggtagactaactatttcaagactgatagaccgaactctgaatatatggcaaaatgggacatgaatctatagtagggtca

SEQ ID NO: 50000 - DNA, 957 bp, Zea Mays
ttcgcgttgcatcgaatccttatcgttttctgtttttgttttgcccattttttcgctggcgatttatgccatcacatctggcgctgctgtcgtgcctgctggtactgctcctctctttcgacaagttcctcttccactacctgaagcgccgctggttctccggcggcagcggcgccaccgtcccaaggccccccgccaaatcgaggcggaacatggcggccgccaagtggagcgagacggccatgctcgttatcgacatgcaggacttcgtggacccggcgatgcgcagcccgatgctggtggccggtggcgaggccgtcgtccctgccgttgccggggccgtcgccgtcgcaagggagcgcggcattttcgtcgtctgggttgtcagagagcatgacccttctggaagagatgttgaacttttccgtaggcaccattattctgggggaaagggtccaacagtgaaaggtctgaaaggagcggagctggctgatgggcttgttatcaaagaaggggagtacaagttggtgaagactagatttagtgctttcttcgcaacacatcttgattctgtcctgaaaactgcaggaataaagaacttggttattgttggtaagcattgatatacatttgatgatatggaagtgattgtcatttcgctaccatgataattgaattctgtatgatatccttgttacttaataatcttattccttttccttgtgtcttccttttcaatacttcatttgtgattttaattttcttggccacatgatggaagcacccattcatatataggtgtgtcaatgggaataaacgtacaaattcttcattttttctacagtatagcaacctgtgcaccccaaaagggaaacttatttgaaacagagatgttatcatatcttttcttcttgagagaggttgtcagcagacaacacgtgagccaacatgttgagg

SEQ ID NO: 50001 - DNA, 360 bp, Zea Mays
gctcccggccactagaggtcgggcaacattccccagtttggaaggacacgagtggatccaatcgactgcactccaccgccaccatctccaccagcatcgcccacaccgctgtcatccgctccgtcgctgtgccatcgtcgtccactgtgccgccatccgctccaccgtcgtgccatcgtcgtccactgagccgccattggaaggtactcatgcgaattaggtgctgccattatcgatctatttgtctgaggtggccgggttacctctgctggttagggcttttgaaaggaattaaaccaacaggattccattgcttactaatctctttctagcaccaagggagctcttgctgtgttaatc

SEQ ID NO: 50002 - DNA, 1714 bp, Zea Mays
atatttcagattcaaaaaaactgcgaagggcgaccaaacctccattgtcccatcctcagcgtcttctccccgagcccagcaccaccctcctcgatcccaaagaccagaaagattttgcctttcctcttatcttctcctcaaattcaattcctcgtaatctcccttattggcatcgattccttcgatcttctccgctaccccctcccgtttcccgctgcttattgagttttggactctgcatgagtctatcaactcgcccttgttaaaggattcattgtccaattgcggtagctcgcgcggcaagattcggtttttgagtcggtgcgcgacggtagtggtccagattgctgagcccggctcgacgttctggcctgagacctaattcggtggcattgtggtgtggtgatggagcaggggaggaatcaacagcacccgcagcagttgtcgagtccgcctgttttggccgccgcgagcgagataaaggcccctgcggtgccttcgcaacagcccaagccggcggcccccgtgatgtcggtgcctagacagtggccgatagctttcaaccccctgaagtcctccactgaagaaaaaagtgttactccaaagaaaaagaagcattgtaattgtagaaactcaaaatgtttgaagatgtactgtgaatgctttcaagaacttcaatactgtgatggctgcaactgttcaaattgtggaaacattgttgggaatgagaatgccagaaacgaagcaattgaggcaattcgtcagcgtaatccgtctgcttttcagcctaaaattggaaatgactcaaatacactcaacgttcgaaaggataattctggagcagtccctctcgtagcaaagcaccataaaggttgtcattgcaagaagtcaggatgcctaaagaagtactgtgaatgctaccaagcaaatgttttttgctccaaaaattgtagatgcatgcactgtaagaactctgaaggaaataaagatacagaaacttcaattcaaagggaccatgcatctgacagaaatcatattgaacaagcagctaatatagcattcaatggtagtgttggatcatcaggatatatttgttcccttagtagaaaaagatctcatgaagacacccaatgtgttaggataaactctgaaggaagcatgccagagacacaatatcaacagggtaaccatgcagatgtttcaatgcttccaccctgttccacaggatttgatgggcacaatgctgccaatactaaaccgtataacccaaactacagagcagtagatgagattaaagtccccagccaccatccaagggccatcacaagcatttctgatgtctctaagttcctggaggaactgaattttttccccctcaccctgaggtccatacacacaagtaagccaccaagcctgcccctctgccctacaaaactggaccgaaatactgtgattttgaaattttgtctgtcctgtgtgcccaatgtgtctcctccaagcaatcaaaataccaccacttgcccccacagatgggaggtacacatactcagaaaaatcagctcccaacatagacagaatgtttctcctagagatgttctgcatttttgtttcttgcaagcacaccacatcaacctgggaggagtccaccaattcttttattgagtcctgcctaacagaggaattcagccccctcacattccaaattaaaagtttt

SEQ ID NO: 50003 - DNA, 2212 bp, Zea Mays
atatttcagattcaaaaaaactgcgaagggcgaccaaacctccattgtcccatcctcagcgtcttctccccgagcccagcaccaccctcctcgatcccaaagaccagaaagattttgcctttcctcttatcttctcctcaaattcaattcctcgtaatctcccttattggcatcgattccttcgatcttctccgctaccccctcccgtttcccgctgcttattgagttttggactctgcatgagtctatcaactcgcccttgttaaaggattcattgtccaattgcggtagctcgcgcggcaagattcggtttttgagtcggtgcgcgacggggaggaatcaacagcacccgcagcagttgtcgagtccgcctgttttggccgccgcgagcgagataaaggcccctgcggtgccttcgcaacagcccaagccggcggcccccgtgatgtcggtgcctagacagtggccgatagctttcaaccccctgaagtcctccactgaagaaaaaagtgttactccaaagaaaaagaagcattgtaattgtagaaactcaaaatgtttgaagatgtactgtgaatgctttcaagaacttcaatactgtgatggctgcaactgttcaaattgtggaaacattgttgggaatgagaatgccagaaacgaagcaattgaggcaattcgtcagcgtaatccgtctgcttttcagcctaaaattggaaatgactcaaatacactcaacgttcgaaaggataattctggagcagtccctctcgtagcaaagcaccataaaggttgtcattgcaagaagtcaggatgcctaaagaagtactgtgaatgctaccaagcaaatgttttttgctccaaaaattgtagatgcatgcactgtaagaactctgaaggaaataaagatacagaaacttcaattcaaagggaccatgcatctgacagaaatcatattgaacaagcagctaatatagcattcaatggtagtgttggatcatcaggatatatttgttcccttagtagaaaaagatctcatgaagacacccaatgtgttaggataaactctgaaggaagcatgccagagacacaatatcaacagggtaaccatgcagatgtttcaatgcttccaccctgttccacaggatttgatgggcacaatgctgccaatactaaaccgtataacccaaactacaggtctccactggcaaacaccatccacctcagtgaggtcaatgatctagtcaagcagttggtgatggtttgcagaatggctgcagcgacaatagctgatgatgaaacagatttgattgctgaagagaagggatcccagtcaaataatgggttaagcaatggtaactgcaaacagcaggacttcaaagaagcctcctccatggtcatccttagcgaaggatgtagtgaccaacccaacatcgatgaaacgggctcccatcggtctaaaacattggatttttctaggcctgcatctccaacaacacaagcactaatgtgtgatgaacaggatgccacatttggaaatgagcctgcatctccaacaacacaagcactgatgtgtgaagaacagaataccacatttggaaatgattatagaagttcatttcctttggtttcgtgtgatcaagatatttctgagataaatgctgcacaagaaaacctagtattgactgggttgcgagagtatctccgggtgattatcacacgtggaaaaataaatgaacacaaatcctcattagaggcagcaatggaattggatgcccaacagcatcatggagcaccacctgccctttctgcaacagaagatgaagaaaaatctcctccttcaagcactattgaaaccccaagaactaatcaacagcctacaccaaatggtggatcgaaagatagtattggaagctaaataaaactcggtacagaattcagcctcttcatttcaagacgcctgcactgcaaatgatttcggtacatagatcggcattgggcgagatagatactatagtttttgttgccatttctggcaacaggccttgtaggaaatgaactaccattcatgcattagacgtttagtagcaggaaacaaaagttgcctgctacatcgtgttgtaatttaataaatgataattttcattgttcgatgctcgagttgactaactggttttgtttaaagctgatccttcctgatttgattactgaaaac

SEQ ID NO: 50004 - DNA, 2439 bp, Zea Mays
tgaaccagagatgagtacggttaaaatgtatcagactccaagatgtggctgggtatggagtggctttggcagtaaaagatatctacgctgatgcctttggagaaagaaatttgggctctaaccttgtgggcctgatggtaaaggatggacgacaaggaaaggtgaatgccaaaggttactacatttatgagaagggtgcgaagccaaagccagaccctagtgttaagcatgtgatcgaggagtaccgaaagcaggcaaacacaatgcctggtggaaagcctgttactttaatggatcaagatattttggagatgattttcttcccagttgtgaatgaggcatgcagggttatggatgaaaatgttgtaattcgagcttccgatcttgatattgcttctgttcttggaatgggctttcccaaatacaggggtggtcttgtcttctgggctgacactgttggagcgccttacatacattcgaagctaagcaagtgggccgaaatgtatggtcccttcttcaaaccttcatcgtatttggaacaacgagctaaaagtggtgtaccattgagcgcaccaggaacatcacagcaaggttcggcgaggtcgcgcatgtgaggtgctgtccagcattgggaagaagaattcagaatacttgcggccgggatgagccatagacggctgcttcgcagatcaaaaacacctccttgaatacaaataggaggcacagaaatgatgaaaaataaatggttttgcatagctgtaacagttttggtgccttgaactgtaactatggcagagtttctgtgaacagagtggcatgcattaattatacttgaccactctatatgtcgctgtttgtataattttcaatacgtacaagaactaaaatatattattggatagtattttttataataaactcatctgttgctatactttatttaaatctacaaagaaaatttgactcgtacggatatcatgtcgatacctaccagggaacttaggacggcgtcgtcgtctcgaattaatcgcttgcactaagctggacggccgcccgctgtgatccagcgaacaaccaggacggccggtcatggcggcagggacgatgatgcgggtgacaatggaggtgggcacagacggggtggcgctcatcaccatgtgcaacccgccagtgaacgccctgcaccccgccatcttcgctggactctgggagaactacggcgaggccatggcccgtgacgacgtcaaggccatcgtgctcaaaggtgctcgagggaaattctgtggaggtttcgacatcaatacgttctcacaaattcatcggaccggagacatgtcgcttctgccagactctgttaagtttgcgtcttatatgatggaagagggcaaaaagccttccgttgcagccattcaaggccttgctctgggtggtggactagagttgacgatggcttgtcatgctcgaatatctacccctgaagctcaacttggattaccagagttaactcttggcataattcctggatctgggggaacccagcgtctaccgaggcttgtaggtctgcccaaagcaatacaaatgatgctgcaatcaaagttcattatgggggacgaaggaaaagaacaaggtcttattgatgccctttgctcccctgatgaattgataaagatgtcacgccattgtgccctggaaattgctaatggtggtagaccgtgggtaaaaccactcagcagaacagataagcttggctcaccatctgaagctcatgctgcattaagtatggcaagacagcaggtgaagaagattgcaagaaacatgccgcagtatcaagcctgccttgatgtaattgaagaaggtgtgctatttggaggccattcaggtgttttaaaggaatataaggttttcaaggagttagtgccatcaccaacagcaagggcacttgttcatatcttcttggcacagcgtttgagcacaaaggtgccaggtgtcactgatgttcacctaaaacctaggcaaattagaaaagttggcattattggtggtggtttgatgggctctggaattgcaactgcacttcttgttagcaacatatctgttgtgctcaaggaagtaaaccctcaggttctgcaaaggggacaaaaaacgatagcagctaatcttgaggacctggtcaaaaggggctcacttgcaaaggacaggataaataaggtcatgtcacttctgaaaggcactcttgattattcggattttaaggatgtcgatatggctattgaggccgttatagaggacattcctttgaagcaatcaacattttctgacattgagaagttctgcccaccacattgcatacttgcaacaaacacatctaccatcagtttgaatgttattggcaagaggacaaattctcaagatagaattgtaggggcacattttttcagg

SEQ ID NO: 50005 - DNA, 4143 bp, Zea Mays
ggcctagttaaaatgtagaaggtgctactctggggcttgaaccattgtgaatgtattcagtactagattacttgtccaaaattatcttccttttttagatgggaaccaacccatcacctggttaaaatgagtttggttcaggctctttgacgcttggaggaccaagagatgagtttggtcccaagaaacacaagtagactgatgggtatccaggcacctggcccagtcggcatcagtgtagatgattagctcatgggtggagcgtcgaaggtggaggtcgtagttgatagtactccaaagataccgaaggatctacttgaccacacccaagtgtggctcacgaagattgttgaacgacatatgcgatgtcgagcctggtgaaggtgagatactgataagcatcgctgcatcggcgaggctacggtaggcaatggggtcactgacaggagcgccatctctagagagcttggcctgcgtgtccaccgaggtcacacagggtttgtagttcagcatgctagcccgcttgaggatgtccaggatggcaggatgtactgccactactggaggaagaggcccttggagcgacgctcaacgacaattccctgaaagtgatgaaggggccccaaatccttcatggcgaactaatgctgaagagcggcggtgatccggtgtaggagagccgaagagcaggtagtgagcatgatgtcatcaacacagaggagcaggtatacagtgtcattaacacgtcgatagatgaattgagatgtgtccgacttggcctcgacaaaatcaagagagagcagatatgtggtgaagcgtctgtaccaagtgtgaggggcttgtttcagaccatagagggacttgttgagtttccatacaatatcaaggtgaacatgatcaacaaagccagtagattgattgcagtaggtctcagtgagattcctatgaagaaaggcattcttgacatccaattgatgaattggccaaaaacaggagagtaccaaagtgaggacggtacgaccggtagtaggcttcacgacaggattgaacatctcgttgtagtcaacatcagaatgtcgagtaaacccctggagaacccaatgggtcttgtaccgatccaaagagccatccaccttccgcttatgtgtccaaacccacttgccagtcactacattgccacttgggggatagggaattagatactaggtgtgattggcaagaagggcctgatactcttcctctgtagtacacaacgtcaataaggatcgagacatgcctatacgtgatgtggtagcaggcaccagaatgggactgagcgagtgatccaagtaaggaagtgatcatagcgcttgttgaggccgcagaggaggttgaggacgagcatgtgattgaagacagaagacgggctcctcgaggtcagagagggaggctgccatgcgcttcatttgacgacagtattcggtgacagagaggttcccttgcagaaagttcgaaaagcaacatcaaggtggagagcacgagcctcacggttgtcgaggaactgctcctcgatggcaacccaagcctaacgggcagtgccaccatgccaacatcctacaactcaacagtgacggtccccaaggatctacgagaggaccacactattcatctgccaccaggatgggatagtgagggatgcagcgttggtgaggacatggtcatctatagggcgtagcgctggacaatgtggctgggtatggagtggctttggcagtaaaagatatctacgctgatgcctttggagaaagaaatttgggctctaaccttgtgggcctgatggtaaaggatggacgacaaggaaaggtgaatgccaaaggttactacatttatgagaagggtgcgaagccaaagccagaccctagtgttaagcatgtgatcgaggagtaccgaaagcaggcaaacacaatgcctggtggaaagcctgttactttaatggatcaagatattttggagatgattttcttcccagttgtgaatgaggcatgcagggttatggatgaaaatgttgtaattcgagcttccgatcttgatattgcttctgttcttggaatgggctttcccaaatacagtttgaatttacttttttttccaggggtggtcttgtcttctgggctgacactgttggagcgccttacatacattcgaagctaagcaagtgggccgaaatgtatggtcccttcttcaaaccttcatcgtatttggaacaacgagctaaaagtggtgtaccattgagcgcaccaggaacatcacagcaaggttcggcgaggtcgcgcatgtgaggtgctgtccagcattgggaagaagaattcagaatacttgcggccgggatgagccatagacggctgcttcgcagatcaaaaacacctccttgaatacaaataggaggcacagaaatgatgaaaaataaatggttttgcatagctgtaacagttttggtgccttgaactgtaactatggcagagtttctgtgaacagagtggcatgcattaattatacttgaccactctatatgtcgctgtttgtataattttcaatacgtacaagaactaaaatatattattggatagtattttttataataaactcatctgttgctatactttatttaaatctacaaagaaaatttgactcgtacggatatcatgtcgatacctaccagggaacttaggacggcgtcgtcgtctcgaattaatcgcttgcactaagctggacggccgcccgctgtgatccagcgaacaaccaggacggccggtcatggcggcagggacgatgatgcgggtgacaatggaggtgggcacagacggggtggcgctcatcaccatgtgcaacccgccagtgaacgccctgcaccccgccatcttcgctggactctgggagaactacggcgaggccatggcccgtgacgacgtcaaggccatcgtgctcaaaggtgctcgagggaaattctgtggaggtttcgacatcaatacgttctcacaaattcatcggaccggagacatgtcgcttctgccagactctgttaagtttgcgtcttatatgatggaagagggcaaaaagccttccgttgcagccattcaaggccttgctctgggtggtggactagagttgacgatggcttgtcatgctcgaatatctacccctgaagctcaacttggattaccagagttaactcttggcataattcctggatctgggggaacccagcgtctaccgaggcttgtaggtctgcccaaagcaatacaaatgatgctgcaatcaaagttcattatgggggacgaaggaaaagaacaaggtcttattgatgccctttgctcccctgatgaattgataaagatgtcacgccattgtgccctggaaattgctaatggtggtagaccgtgggtaaaaccactcagcagaacagataagcttggctcaccatctgaagctcatgctgcattaagtatggcaagacagcaggtgaagaagattgcaagaaacatgccgcagtatcaagcctgccttgatgtaattgaagaaggtgtgctatttggaggccattcaggtgttttaaaggaatataaggttttcaaggagttagtgccatcaccaacagcaagggcacttgttcatatcttcttggcacagcgtttgagcacaaaggtgccaggtgtcactgatgttcacctaaaacctaggcaaattagaaaagttggcattattggtggtggtttgatgggctctggaattgcaactgcacttcttgttagcaacatatctgttgtgctcaaggaagtaaaccctcaggttctgcaaaggggacaaaaaacgatagcagctaatcttgaggacctggtcaaaaggggctcacttgcaaaggacaggataaataaggtcatgtcacttctgaaaggcactcttgattattcggattttaaggatgtcgatatggctattgaggccgttatagaggacattcctttgaagcaatcaacattttctgacattgagaagttctgcccaccacattgcatacttgcaacaaacacatctaccatcagtttgaatgttattggcaagaggacaaattctcaagatagaattgtaggggcacattttttcagg

SEQ ID NO: 50006 - DNA, 4110 bp, Zea Mays
ggcctagttaaaatgtagaaggtgctactctggggcttgaaccattgtgaatgtattcagtactagattacttgtccaaaattatcttccttttttagatgggaaccaacccatcacctggttaaaatgagtttggttcaggctctttgacgcttggaggaccaagagatgagtttggtcccaagaaacacaagtagactgatgggtatccaggcacctggcccagtcggcatcagtgtagatgattagctcatgggtggagcgtcgaaggtggaggtcgtagttgatagtactccaaagataccgaaggatctacttgaccacacccaagtgtggctcacgaagattgttgaacgacatatgcgatgtcgagcctggtgaaggtgagatactgataagcatcgctgcatcggcgaggctacggtaggcaatggggtcactgacaggagcgccatctctagagagcttggcctgcgtgtccaccgaggtcacacagggtttgtagttcagcatgctagcccgcttgaggatgtccaggatggcaggatgtactgccactactggaggaagaggcccttggagcgacgctcaacgacaattccctgaaagtgatgaaggggccccaaatccttcatggcgaactaatgctgaagagcggcggtgatccggtgtaggagagccgaagagcaggtagtgagcatgatgtcatcaacacagaggagcaggtatacagtgtcattaacacgtcgatagatgaattgagatgtgtccgacttggcctcgacaaaatcaagagagagcagatatgtggtgaagcgtctgtaccaagtgtgaggggcttgtttcagaccatagagggacttgttgagtttccatacaatatcaaggtgaacatgatcaacaaagccagtagattgattgcagtaggtctcagtgagattcctatgaagaaaggcattcttgacatccaattgatgaattggccaaaaacaggagagtaccaaagtgaggacggtacgaccggtagtaggcttcacgacaggattgaacatctcgttgtagtcaacatcagaatgtcgagtaaacccctggagaacccaatgggtcttgtaccgatccaaagagccatccaccttccgcttatgtgtccaaacccacttgccagtcactacattgccacttgggggatagggaattagatactaggtgtgattggcaagaagggcctgatactcttcctctgtagtacacaacgtcaataaggatcgagacatgcctatacgtgatgtggtagcaggcaccagaatgggactgagcgagtgatccaagtaaggaagtgatcatagcgcttgttgaggccgcagaggaggttgaggacgagcatgtgattgaagacagaagacgggctcctcgaggtcagagagggaggctgccatgcgcttcatttgacgacagtattcggtgacagagaggttcccttgcagaaagttcgaaaagcaacatcaaggtggagagcacgagcctcacggttgtcgaggaactgctcctcgatggcaacccaagcctaacgggcagtgccaccatgccaacatcctacaactcaacagtgacggtccccaaggatctacgagaggaccacactattcatctgccaccaggatgggatagtgagggatgcagcgttggtgaggacatggtcatctatagggcgtagcgctggacaatgtggctgggtatggagtggctttggcagtaaaagatatctacgctgatgcctttggagaaagaaatttgggctctaaccttgtgggcctgatggtaaaggatggacgacaaggaaaggtgaatgccaaaggttactacatttatgagaagggtgcgaagccaaagccagaccctagtgttaagcatgtgatcgaggagtaccgaaagcaggcaaacacaatgcctggtggaaagcctgttactttaatggatcaagatattttggagatgattttcttcccagttgtgaatgaggcatgcagggttatggatgaaaatgttgtaattcgagcttccgatcttgatattgcttctgttcttggaatgggctttcccaaatacaggggtggtcttgtcttctgggctgacactgttggagcgccttacatacattcgaagctaagcaagtgggccgaaatgtatggtcccttcttcaaaccttcatcgtatttggaacaacgagctaaaagtggtgtaccattggaacatcacagcaaggttcggcgaggtcgcgcatgtgaggtgctgtccagcattgggaagaagaattcagaatacttgcggccgggatgagccatagacggctgcttcgcagatcaaaaacacctccttgaatacaaataggaggcacagaaatgatgaaaaataaatggttttgcatagctgtaacagttttggtgccttgaactgtaactatggcagagtttctgtgaacagagtggcatgcattaattatacttgaccactctatatgtcgctgtttgtataattttcaatacgtacaagaactaaaatatattattggatagtattttttataataaactcatctgttgctatactttatttaaatctacaaagaaaatttgactcgtacggatatcatgtcgatacctaccagggaacttaggacggcgtcgtcgtctcgaattaatcgcttgcactaagctggacggccgcccgctgtgatccagcgaacaaccaggacggccggtcatggcggcagggacgatgatgcgggtgacaatggaggtgggcacagacggggtggcgctcatcaccatgtgcaacccgccagtgaacgccctgcaccccgccatcttcgctggactctgggagaactacggcgaggccatggcccgtgacgacgtcaaggccatcgtgctcaaaggtgctcgagggaaattctgtggaggtttcgacatcaatacgttctcacaaattcatcggaccggagacatgtcgcttctgccagactctgttaagtttgcgtcttatatgatggaagagggcaaaaagccttccgttgcagccattcaaggccttgctctgggtggtggactagagttgacgatggcttgtcatgctcgaatatctacccctgaagctcaacttggattaccagagttaactcttggcataattcctggatctgggggaacccagcgtctaccgaggcttgtaggtctgcccaaagcaatacaaatgatgctgcaatcaaagttcattatgggggacgaaggaaaagaacaaggtcttattgatgccctttgctcccctgatgaattgataaagatgtcacgccattgtgccctggaaattgctaatggtggtagaccgtgggtaaaaccactcagcagaacagataagcttggctcaccatctgaagctcatgctgcattaagtatggcaagacagcaggtgaagaagattgcaagaaacatgccgcagtatcaagcctgccttgatgtaattgaagaaggtgtgctatttggaggccattcaggtgttttaaaggaatataaggttttcaaggagttagtgccatcaccaacagcaagggcacttgttcatatcttcttggcacagcgtttgagcacaaaggtgccaggtgtcactgatgttcacctaaaacctaggcaaattagaaaagttggcattattggtggtggtttgatgggctctggaattgcaactgcacttcttgttagcaacatatctgttgtgctcaaggaagtaaaccctcaggttctgcaaaggggacaaaaaacgatagcagctaatcttgaggacctggtcaaaaggggctcacttgcaaaggacaggataaataaggtcatgtcacttctgaaaggcactcttgattattcggattttaaggatgtcgatatggctattgaggccgttatagaggacattcctttgaagcaatcaacattttctgacattgagaagttctgcccaccacattgcatacttgcaacaaacacatctaccatcagtttgaatgttattggcaagaggacaaattctcaagatagaattgtaggggcacattttttcagg

SEQ ID NO: 50007 - DNA, 2603 bp, Zea Mays
gggaggggcagttgatggtggccaggagaaagagagaaactggttttgataccatgttggaagccctaaccctaatcagggtgggctgtgtatatatattagaaaaggagtacatgggctgagccaaggtccataacccttatactgattacaataagaaatacaagcatctaacaattcttccttgctgtcctatagactccaagatgtggctgggtatggagtggctttggcagtaaaagatatctacgctgatgcctttggagaaagaaatttgggctctaaccttgtgggcctgatggtaaaggatggacgacaaggaaaggtgaatgccaaaggttactacatttatgagaagggtgcgaagccaaagccagaccctagtgttaagcatgtgatcgaggagtaccgaaagcaggcaaacacaatgcctggtggaaagcctgttactttaatggatcaagatattttggagatgattttcttcccagttgtgaatgaggcatgcagggttatggatgaaaatgttgtaattcgagcttccgatcttgatattgcttctgttcttggaatgggctttcccaaatacaggggtggtcttgtcttctgggctgacactgttggagcgccttacatacattcgaagctaagcaagtgggccgaaatgtatggtcccttcttcaaaccttcatcgtatttggaacaacgagctaaaagtggtgtaccattgagcgcaccaggaacatcacagcaaggttcggcgaggtcgcgcatgtgaggtgctgtccagcattgggaagaagaattcagaatacttgcggccgggatgagccatagacggctgcttcgcagatcaaaaacacctccttgaatacaaataggaggcacagaaatgatgaaaaataaatggttttgcatagctgtaacagttttggtgccttgaactgtaactatggcagagtttctgtgaacagagtggcatgcattaattatacttgaccactctatatgtcgctgtttgtataattttcaatacgtacaagaactaaaatatattattggatagtattttttataataaactcatctgttgctatactttatttaaatctacaaagaaaatttgactcgtacggatatcatgtcgatacctaccagggaacttaggacggcgtcgtcgtctcgaattaatcgcttgcactaagctggacggccgcccgctgtgatccagcgaacaaccaggacggccggtcatggcggcagggacgatgatgcgggtgacaatggaggtgggcacagacggggtggcgctcatcaccatgtgcaacccgccagtgaacgccctgcaccccgccatcttcgctggactctgggagaactacggcgaggccatggcccgtgacgacgtcaaggccatcgtgctcaaaggtgctcgagggaaattctgtggaggtttcgacatcaatacgttctcacaaattcatcggaccggagacatgtcgcttctgccagactctgttaagtttgcgtcttatatgatggaagagggcaaaaagccttccgttgcagccattcaaggccttgctctgggtggtggactagagttgacgatggcttgtcatgctcgaatatctacccctgaagctcaacttggattaccagagttaactcttggcataattcctggatctgggggaacccagcgtctaccgaggcttgtaggtctgcccaaagcaatacaaatgatgctgcaatcaaagttcattatgggggacgaaggaaaagaacaaggtcttattgatgccctttgctcccctgatgaattgataaagatgtcacgccattgtgccctggaaattgctaatggtggtagaccgtgggtaaaaccactcagcagaacagataagcttggctcaccatctgaagctcatgctgcattaagtatggcaagacagcaggtgaagaagattgcaagaaacatgccgcagtatcaagcctgccttgatgtaattgaagaaggtgtgctatttggaggccattcaggtgttttaaaggaatataaggttttcaaggagttagtgccatcaccaacagcaagggcacttgttcatatcttcttggcacagcgtttgagcacaaaggtgccaggtgtcactgatgttcacctaaaacctaggcaaattagaaaagttggcattattggtggtggtttgatgggctctggaattgcaactgcacttcttgttagcaacatatctgttgtgctcaaggaagtaaaccctcaggttctgcaaaggggacaaaaaacgatagcagctaatcttgaggacctggtcaaaaggggctcacttgcaaaggacaggataaataaggtcatgtcacttctgaaaggcactcttgattattcggattttaaggatgtcgatatggctattgaggccgttatagaggacattcctttgaagcaatcaacattttctgacattgagaagttctgcccaccacattgcatacttgcaacaaacacatctaccatcagtttgaatgttattggcaagaggacaaattctcaagatagaattgtaggggcacattttttcagg

SEQ ID NO: 50008 - DNA, 962 bp, Zea Mays
attaatcacggctaagagagagctcgagtccatactggcttttttttgcatccacaatgccgcagcttggcacatgttcattgcctggagctgcaatctatggcacttcaactaggagatttggaggtttggagtttcagcaacataaagttaatcacatctcatttggtcggaaagcgtctgttaaagcaacattgaaaactgtgagatgcaatgccactcaaacacaaagcgtccaaaagaaatcttcaagtgcaactattcagcgtgataagaaaggaaatgtacaagggccaaaactggatgacggaagcggtgggttccctccattccgctttggcaaaggtgggggtggtggtggaggcgggggaggtggcagcaactactttggcggattccttctcttctcatgtgtgttgctcttggactacctgaaggaattcgagaagtacctgcttgctcagaggcaccgagctggagatgatggcggcaacgggctgttgcaggcatgattgctttccgctggtctcactggcactagcagctactagtttctgatctgaagtgcttccttttgaacataacatgtgtctctgggttaaaatccaactgcaattgattgttctgggaacttgctctgccattgatccgtgtggtgtcaagtactgtggaaatcgtctgctgcgtccactcgaactttctcacctcgtcttcagcaaggttcataggaagttaggaacacagtggttaaaactccaagctcttcggaggaacttttttttggtcataataaggaaaacatctcctaggatgatgggaagttcatagtcagccgcggtcctgacattttaggggcctaagacaaaatttaaaatggaggaccttattatataaatattatcaatataaacactcaaaatacatcttaaaatgtatatatcaaataacaagtaaataaaaag

SEQ ID NO: 50009 - DNA, 1057 bp, Zea Mays
gtcaggatgagatgggacataacaatcccacacactagactgtttgattgagtgtgaaggttcagacgagaccgtctctaaaaaaaatattatcactcgaatgctgtcccggttcatccctcggaatcagactgacaataccgtcctcaggacaaggcacctcagaagcccttctcgtccgcgccgcctccttgaccccgctggccggcgagctgctcagcgcggcttttttttgcatccacaatgccgcagcttggcacatgttcattgcctggagctgcaatctatggcacttcaactaggagatttggaggtttggagtttcagcaacataaagttaatcacatctcatttggtcggaaagcgtctgttaaagcaacattgaaaactgtgagatgcaatgccactcaaacacaaagcgtccaaaagaaatcttcaagtgcaactattcagcgtgataagaaaggaaatgtacaagggccaaaactggatgacggaagcggtgggttccctccattccgctttggcaaaggaattcgagaagtacctgcttgctcagaggcaccgagctggagatgatggcggcaacgggctgttgcaggcatgattgctttccgctggtctcactggcactagcagctactagtttctgatctgaagtgcttccttttgaacataacatgtgtctctgggttaaaatccaactgcaattgattgttctgggaacttgctctgccattgatccgtgtggtgtcaagtactgtggaaatcgtctgctgcgtccactcgaactttctcacctcgtcttcagcaaggttcataggaagttaggaacacagtggttaaaactccaagctcttcggaggaacttttttttggtcataataaggaaaacatctcctaggatgatgggaagttcatagtcagccgcggtcctgacattttaggggcctaagacaaaatttaaaatggaggaccttattatataaatattatcaatataaacactcaaaatacatcttaaaatgtatatatcaaataacaagtaaataaaaag

SEQ ID NO: 50010 - DNA, 260 bp, Zea Mays
aaaaatattatcactcgaatgctgtcccggttcatccctcggaatcagactgacaataccgtcctcaggacaaggcacctcagaagcccttctcgtccgcgccgcctccttgaccccgctggccggcgagctgctcagcgcggcttttttttgcatccacaatgccgcagcttggcacatgttcattgcctggagctgcaatctatggcacttcaactaggagatttggaggtgaaatcaagtaggatttgtcagtatac

SEQ ID NO: 50011 - DNA, 343 bp, Zea Mays
aaaaatattatcactcgaatgctgtcccggttcatccctcggaatcagactgacaataccgtcctcaggacaaggcacctcagaagcccttctcgtccgcgccgcctccttgaccccgctggccggcgagctgctcagcgcggcttttttttgcatccacaatgccgcagcttggcacatgttcattgcctggagctgcaatctatggcacttcaactaggagatttggaggtttggagtttcagcaacataaagttaatcacatctcatttggtcggaaagcgtctgttaaagcaacattgaaaacatcatcataccaagatttgttactaaacgatcagct

SEQ ID NO: 50012 - DNA, 1184 bp, Zea Mays
aaaaatattatcactcgaatgctgtcccggttcatccctcggaatcagactgacaataccgtcctcaggacaaggcacctcagaagcccttctcgtccgcgccgcctccttgaccccgctggccggcgagctgctcagcgcggcttttttttgcatccacaatgccgcagcttggcacatgttcattgcctggagctgcaatctatggcacttcaactaggagatttggaggacccaaggtgaggattagtggacgactgctctgccgcgtctaaccacaaactccaccctgctcttcactggctcctagcttcacgctaccttcccaccaggctcagattgaaccatgtttggagtttcagcaacataaagttaatcacatctcatttggtcggaaagcgtctgttaaagcaacattgaaaactgtgagatgcaatgccactcaaacacaaagcgtccaaaagaaatcttcaagtgcaactattcagcgtgataagaaaggaaatgtacaagggccaaaactggatgacggaagcggtgggttccctccattccgctttggcaaaggtgggggtggtggtggaggcgggggaggtggcagcaactactttggcggattccttctcttctcatgtgtgttgctcttggactacctgaaggaattcgagaagtacctgcttgctcagaggcaccgagctggagatgatggcggcaacgggctgttgcaggcatgattgctttccgctggtctcactggcactagcagctactagtttctgatctgaagtgcttccttttgaacataacatgtgtctctgggttaaaatccaactgcaattgattgttctgggaacttgctctgccattgatccgtgtggtgtcaagtactgtggaaatcgtctgctgcgtccactcgaactttctcacctcgtcttcagcaaggttcataggaagttaggaacacagtggttaaaactccaagctcttcggaggaacttttttttggtcataataaggaaaacatctcctaggatgatgggaagttcatagtcagccgcggtcctgacattttaggggcctaagacaaaatttaaaatggaggaccttattatataaatattatcaatataaacactcaaaatacatcttaaaatgtatatatcaaataacaagtaaataaaaag

SEQ ID NO: 50013 - DNA, 1152 bp, Zea Mays
aaaaatattatcactcgaatgctgtcccggttcatccctcggaatcagactgacaataccgtcctcaggacaaggcacctcagaagcccttctcgtccgcgccgcctccttgaccccgctggccggcgagctgctcagcgcggcttttttttgcatccacaatgccgcagcttggcacatgttcattgcctggagctgcaatctatggcacttcaactaggagatttggaggtggctcgaaggaggttgcttgccttgttgccttaaaaccatgctccgaatatttcttctctctcctgtctcagtgttagtaaaggtttggagtttcagcaacataaagttaatcacatctcatttggtcggaaagcgtctgttaaagcaacattgaaaactgtgagatgcaatgccactcaaacacaaagcgtccaaaagaaatcttcaagtgcaactattcagcgtgataagaaaggaaatgtacaagggccaaaactggatgacggaagcggtgggttccctccattccgctttggcaaaggtgggggtggtggtggaggcgggggaggtggcagcaactactttggcggattccttctcttctcatgtgtgttgctcttggactacctgaaggaattcgagaagtacctgcttgctcagaggcaccgagctggagatgatggcggcaacgggctgttgcaggcatgattgctttccgctggtctcactggcactagcagctactagtttctgatctgaagtgcttccttttgaacataacatgtgtctctgggttaaaatccaactgcaattgattgttctgggaacttgctctgccattgatccgtgtggtgtcaagtactgtggaaatcgtctgctgcgtccactcgaactttctcacctcgtcttcagcaaggttcataggaagttaggaacacagtggttaaaactccaagctcttcggaggaacttttttttggtcataataaggaaaacatctcctaggatgatgggaagttcatagtcagccgcggtcctgacattttaggggcctaagacaaaatttaaaatggaggaccttattatataaatattatcaatataaacactcaaaatacatcttaaaatgtatatatcaaataacaagtaaataaaaag

SEQ ID NO: 50014 - DNA, 1001 bp, Zea Mays
cgacttttttgcgcaaaaattatctggcttccatgtgtacactcctttaccagatccgaccgacgaatgaaacttggcttttttttgcatccacaatgccgcagcttggcacatgttcattgcctggagctgcaatctatggcacttcaactaggagatttggaggtttggagtttcagcaacataaagttaatcacatctcatttggtcggaaagcgtctgttaaagcaacattgaaaactgtgagatgcaatgccactcaaacacaaagcgtccaaaagaaatcttcaagtgcaactattcagcgtgataagaaaggaaatgtacaagggccaaaactggatgacggaagcggtgggttccctccattccgctttggcaaaggtgggggtggtggtggaggcgggggaggtggcagcaactactttggcggattccttctcttctcatgtgtgttgctcttggactacctgaaggaattcgagaagtacctgcttgctcagaggcaccgagctggagatgatggcggcaacgggctgttgcaggcatgattgctttccgctggtctcactggcactagcagctactagtttctgatctgaagtgcttccttttgaacataacatgtgtctctgggttaaaatccaactgcaattgattgttctgggaacttgctctgccattgatccgtgtggtgtcaagtactgtggaaatcgtctgctgcgtccactcgaactttctcacctcgtcttcagcaaggttcataggaagttaggaacacagtggttaaaactccaagctcttcggaggaacttttttttggtcataataaggaaaacatctcctaggatgatgggaagttcatagtcagccgcggtcctgacattttaggggcctaagacaaaatttaaaatggaggaccttattatataaatattatcaatataaacactcaaaatacatcttaaaatgtatatatcaaataacaagtaaataaaaag

SEQ ID NO: 50015 - DNA, 1041 bp, Zea Mays
gaagaaaatcactcccatgcagtacattctgccttctgcgtggggagagagggacttatggattctgtttcttccctgtgcgttcatggacccaaggtgaggattagtggacgactgctctgccgcgtctaaccacaaactccaccctgctcttcactggctcctagcttcacgctaccttcccaccaggctcagattgaaccatgtttggagtttcagcaacataaagttaatcacatctcatttggtcggaaagcgtctgttaaagcaacattgaaaactgtgagatgcaatgccactcaaacacaaagcgtccaaaagaaatcttcaagtgcaactattcagcgtgataagaaaggaaatgtacaagggccaaaactggatgacggaagcggtgggttccctccattccgctttggcaaaggtgggggtggtggtggaggcgggggaggtggcagcaactactttggcggattccttctcttctcatgtgtgttgctcttggactacctgaaggaattcgagaagtacctgcttgctcagaggcaccgagctggagatgatggcggcaacgggctgttgcaggcatgattgctttccgctggtctcactggcactagcagctactagtttctgatctgaagtgcttccttttgaacataacatgtgtctctgggttaaaatccaactgcaattgattgttctgggaacttgctctgccattgatccgtgtggtgtcaagtactgtggaaatcgtctgctgcgtccactcgaactttctcacctcgtcttcagcaaggttcataggaagttaggaacacagtggttaaaactccaagctcttcggaggaacttttttttggtcataataaggaaaacatctcctaggatgatgggaagttcatagtcagccgcggtcctgacattttaggggcctaagacaaaatttaaaatggaggaccttattatataaatattatcaatataaacactcaaaatacatcttaaaatgtatatatcaaataacaagtaaataaaaag

SEQ ID NO: 50016 - DNA, 692 bp, Zea Mays
ctacattcagaaatgtacaagggccaaaactggatgacggaagcggtgggttccctccattccgctttggcaaaggtgggggtggtggtggaggcgggggaggtggcagcaactactttggcggattccttctcttctcatgtgtgttgctcttggactacctgaaggaattcgagaagtacctgcttgctcagaggcaccgagctggagatgatggcggcaacgggctgttgcaggcatgattgctttccgctggtctcactggcactagcagctactagtttctgatctgaagtgcttccttttgaacataacatgtgtctctgggttaaaatccaactgcaattgattgttctgggaacttgctctgccattgatccgtgtggtgtcaagtactgtggaaatcgtctgctgcgtccactcgaactttctcacctcgtcttcagcaaggttcataggaagttaggaacacagtggttaaaactccaagctcttcggaggaacttttttttggtcataataaggaaaacatctcctaggatgatgggaagttcatagtcagccgcggtcctgacattttaggggcctaagacaaaatttaaaatggaggaccttattatataaatattatcaatataaacactcaaaatacatcttaaaatgtatatatcaaataacaagtaaataaaaag

SEQ ID NO: 50017 - DNA, 2430 bp, Zea Mays
gtgatatacggtgtaccaagcttcttgttttgattgttcgtttacagtcgagaagatttggcgaatacgttgccgccaaaaccttatctcctttaaaacctacgctccacttgcttccctccgttcatggcagctctgccaccgccatggcctacctctccagtctccaccacgcgccttatccccgcctacttctccaccaccgctacctcttcttttctgcatcctccccacctcccgtcgtcactacacgacgccttgttcctacactggcatgccatggccgcgatctgctcgacgtaatgccctacagagacagcaggccctcaggaacggagggaagcagagcaggcccaggcggagcaccgcgtgtcacaaacagctcaactgtgcgaggaaacgccacagcacaggaggcacatatgccgatgtggcgggaaaggacccctggcacgccaaggacgtggaagaaaggggacagggttatgctacaagaacatgcggagggggagtcacaagaaaagagctggaggcgagggctgacacggagtttggagtcaaaagggcccatggtgaggaagagctggactagagacggaaatggaatgcgggcaaaagaatctggaaaggttggaaattcaagagatgagggtacaggaagaagaaacgcatgtaagaaaatgaagaaacccccggatggtgagtatgctggcaagctgagagttgagctggacatgtgctccaagagaggagatgtgatgggggcgatcactctgtatgattccgcagtcgaggaggggatcaagttggggcagcatcactacaatgtgctcctttatctgtgttcttcagcttctcttggttttgtgcaaccagcaaaaagtggtaatatgggtagtggtatcgccagtattggtcctgcacagaaacttgatccatcacccagcagaagcttgggaggttcagagggagacaatgcatatgcatctgaaagtcatgttcaagatcagggaaaaaacaaggccgatttgattccaggtggtttgaaggcacaaacagttagcataccagtagaagatgagcttggagactatgcacgtgcacgaggatttgagatatttgataaaatgtgctcagagaaagagagagttcaaatgagtgaggctgctctgaccgcaaaggcacgtatggcgttgtccatgggtgacagtgatatggcctttgagattgtgaaacagatgaaaggcctgggtttaaagccaaagttgcgctcatatggtcctgctttaacagcattttgcaacagtggtaatgttgaaaaagcatttgaagtagaagcccatatgttggaatctgggatcacacccgaagaagctgagttggagacacttctcagggctagtgtggttggccgacgcggagacaagaaatggcttgaaaagcatgggccttttgaggcagtcgtggatgctgccaatgttggcctgtttagccacaaacacctttctttgagtaaggttaattctgttgccgatgcaataaggctaaggtttacgtcaaaaaaatggcctttgatagttttacataacaagcatctcattggagagcgcatgaaaaaacttaatgatcacaagttggtacaaaagtggaagcaagaaaattcaatatatgcaacccctactggttcaaatgatgattggtactggctgtacgctgctatcagatgcaaatgcttgatcattaccaatgatgaaatgagagaccacacatttcagattttggaaaggaatttcttccccaagtggaaggaaaggcatcagtattgttttcactaacaggtacacttcactttggaagaccgctgcgtcacatttcaaatgccacctccatactcagttgttatacaggaatccgataaaggtcactggcatatccctgtctcggaggaaggcttgctagagaaggaccgaacctggctatgcgttacacggcagaattcacaggcacagtgactaacgaagctggagttgttcgatggcaaacattaacggtgtttttttttctgaacactcaagtcagtatcgcatccgccctctcttcgtcagtctgagaaacttcctctattaagtactcattatgatttctacatggtcttattcagttttgttactgaactgctgcatatgttgtaattctgtcttattcagttttgagctggtctacattttgtttagtaaactgatataggtaatacgattccctgctatcagaacaagatctctgctattttccgctcatcccaggatcaggaaataaccgcaaagctgacgagatactgtgcatactggcatagtcactttgcttccgttggtgaaatttttacgtccatatgacatgcatggaaaaaagaacaggcctgattgaattctt

SEQ ID NO: 50018 - DNA, 2392 bp, Zea Mays
cttcttgttttgattgttcgtttacagtcgagaagatttggcgaatacgttgccgccaaaaccttatctcctttaaaacctacgctccacttgcttccctccgttcatggcagctctgccaccgccatggcctacctctccagtctccaccacgcgccttatccccgcctacttctccaccaccgctacctcttcttttctgcatcctccccacctcccgtcgtcactacacgacgccttgttcctacactggcatgccatggccgcgatctgctcgacgtaatgccctacagagacagcaggccctcaggaacggagggaagcagagcaggcccaggcggagcaccgcgtgtcacaaacagctcaactgtgcgaggaaacgccacagcacaggaggcacatatgccgatgtggcgggaaaggacccctggcacgccaaggacgtggaagaaaggggacagggttatgctacaagaacatgcggagggggagtcacaagaaaagagctggaggcgagggctgacacggagtttggagtcaaaagggcccatggtgaggaagagctggactagagacggaaatggaatgcgggcaaaagaatctggaaaggttggaaattcaagagatgagggtacaggaagaagaaacgcatgtaagaaaatgaagaaacccccggatggtgagtatgctggcaagctgagagttgagctggacatgtgctccaagagaggagatgtgatgggggcgatcactctgtatgattccgcagtcgaggaggggatcaagttggggcagcatcactacaatgtgctcctttatctgtgttcttcagcttctcttggttttgtgcaaccagcaaaaagtggtaatatgggtagtggtatcgccagtattggtcctgcacagaaacttgatccatcacccagcagaagcttgggaggttcagagggagacaatgcatatgcatctgaaagtcatgttcaagatcagggaaaaaacaaggccgatttgattccaggtggtttgaaggcacaaacagttagcataccagtagaagatgagcttggagactatgcacgtgcacgaggatttgagatatttgataaaatgtgctcagagaaagagagagttcaaatgagtgaggctgctctgaccgcaaaggcacgtatggcgttgtccatgggtgacagtgatatggcctttgagattgtgaaacagatgaaaggcctgggtttaaagccaaagttgcgctcatatggtcctgctttaacagcattttgcaacagtggtaatgttgaaaaagcatttgaagtagaagcccatatgttggaatctgggatcacacccgaagaagctgagttggagacacttctcagggctagtgtggttggccgacgcggagacaagaaatggcttgaaaagcatgggccttttgaggcagtcgtggatgctgccaatgttggcctgtttagccacaaacacctttctttgagtaaggttaattctgttgccgatgcaataaggctaaggtttacgtcaaaaaaatggcctttgatagttttacataacaagcatctcattggagagcgcatgaaaaaacttaatgatcacaagttggtacaaaagtggaagcaagaaaattcaatatatgcaacccctactggttcaaatgatgattggtactggctgtacgctgctatcagatgcaaatgcttgatcattaccaatgatgaaatgagagaccacacatttcagattttggaaaggaatttcttccccaagtggaaggaaaggcatcaggtacacttcactttggaagaccgctgcgtcacatttcaaatgccacctccatactcagttgttatacaggaatccgataaaggtcactggcatatccctgtctcggaggaaggcttgctagagaaggaccgaacctggctatgcgttacacggcagaattcacaggcacagtgactaacgaagctggagttgttcgatggcaaacattaacggtgtttttttttctgaacactcaagtcagtatcgcatccgccctctcttcgtcagtctgagaaacttcctctattaagtactcattatgatttctacatggtcttattcagttttgttactgaactgctgcatatgttgtaattctgtcttattcagttttgagctggtctacattttgtttagtaaactgatataggtaatacgattccctgctatcagaacaagatctctgctattttccgctcatcccaggatcaggaaataaccgcaaagctgacgagatactgtgcatactggcatagtcactttgcttccgttggtgaaatttttacgtccatatgacatgcatggaaaaaagaacaggcctgattgaattctt

SEQ ID NO: 50019 - DNA, 2742 bp, Zea Mays
gaagatttggcgaatacgttgccgccaaaaccttatctcctttaaaacctacgctccacttgcttccctccgttcatggcagctctgccaccgccatggcctacctctccagtctccaccacgcgccttatccccgcctacttctccaccaccgctacctcttcttttctgcatcctccccacctcccgtcgtcactacacgacgccttgttcctacactggcatgccatggccgcgatctgctcgacgtaatgccctacagagacagcaggccctcaggaacggagggaagcagagcaggcccaggcggagcaccgcgtgtcacaaacagctcaactgtgcgaggaaacgccacagcacaggaggcacatatgccgatgtggcgggaaaggacccctggcacgccaaggacgtggaagaaaggggacagggttatgctacaagaacatgcggagggggagtcacaagaaaagagctggaggcgagggctgacacggagtttggagtcaaaagggcccatggtgaggaagagctggactagagacggaaatggaatgcgggcaaaagaatctggaaaggttggaaattcaagagatgagggtacaggaagaagaaacgcatgtaagaaaatgaagaaacccccggatggtgagtatgctggcaagctgagagttgagctggacatgtgctccaagagaggagatgtgatgggggcgatcactctgtatgattccgcagtcgaggaggggatcaagttggggcagcatcactacaatgtgctcctttatctgtgttcttcagcttctcttggttttgtgcaaccagcaaaaagtggtaatatgggtagtggtatcgccagtattggtcctgcacagaaacttgatccatcacccagcagaagcttgggaggttcagagggagacaatgcatatgcatctgaaagtcatgttcaagatcagggaaaaaacaaggccgatttgattccaggtggtttgaaggcacaaacagttagcataccagtagaagatgagcttggagactatgcacgtgcacgaggatttgagatatttgataaaatgtgctcagagaaagagagagttcaaatgagtgaggctgctctgaccgcaaaggcacgtatggcgttgtccatgggtgacagtgatatggcctttgagattgtgaaacagatgaaaggcctgggtttaaagccaaagttgcgctcatatggtcctgctttaacagcattttgcaacagtggtaatgttgaaaaagcatttgaagtagaagcccatatgttggaatctgggatcacacccgaagaagctgagttggagacacttctcagggctagtgtggttggccgacgcggagacaaggtatattatttgctgcataaatttaggactgctgtcagacaggtatcccattccacagctgaattgtttgaggcttggtttcggagcccaacagcatctaaagttggaaagagaaagtgggatgcaggtgctatagcgaaggctattgagaataatggagggggttggcatgggtttggttggttggggagagggaaatggacagtggcacactcaaatatcaacgagaatggtgtctgccttgcttgtggagaaaagctggctattatagatcttgacccaaaagaaacagaagattttgccacatttgtggcaaaattagctattaagagagagaggaaatcgaactttgagaacttccagaaatggcttgaaaagcatgggccttttgaggcagtcgtggatgctgccaatgttggcctgtttagccacaaacacctttctttgagtaaggttaattctgttgccgatgcaataaggctaaggtttacgtcaaaaaaatggcctttgatagttttacataacaagcatctcattggagagcgcatgaaaaaacttaatgatcacaagttggtacaaaagtggaagcaagaaaattcaatatatgcaacccctactggttcaaatgatgattggtactggctgtacgctgctatcagatgcaaatgcttgatcattaccaatgatgaaatgagagaccacacatttcagattttggaaaggaatttcttccccaagtggaaggaaaggcatcagtattgttttcactaacaggtacacttcactttggaagaccgctgcgtcacatttcaaatgccacctccatactcagttgttatacaggaatccgataaaggtcactggcatatccctgtctcggaggaaggcttgctagagaaggaccgaacctggctatgcgttacacggcagaattcacaggcacagtgactaacgaagctggagttgttcgatggcaaacattaacggtgtttttttttctgaacactcaagtcagtatcgcatccgccctctcttcgtcagtctgagaaacttcctctattaagtactcattatgatttctacatggtcttattcagttttgttactgaactgctgcatatgttgtaattctgtcttattcagttttgagctggtctacattttgtttagtaaactgatataggtaatacgattccctgctatcagaacaagatctctgctattttccgctcatcccaggatcaggaaataaccgcaaagctgacgagatactgtgcatactggcatagtcactttgcttccgttggtgaaatttttacgtccatatgacatgcatggaaaaaagaacaggcctgattgaattctt

SEQ ID NO: 50020 - DNA, 2655 bp, Zea Mays
gaagatttggcgaatacgttgccgccaaaaccttatctcctttaaaacctacgctccacttgcttccctccgttcatggcagctctgccaccgccatggcctacctctccagtctccaccacgcgccttatccccgcctacttctccaccaccgctacctcttcttttctgcatcctccccacctcccgtcgtcactacacgacgccttgttcctacactggcatgccatggccgcgatctgctcgacgtaatgccctacagagacagcaggccctcaggaacggagggaagcagagcaggcccaggcggagcaccgcgtgtcacaaacagctcaactgtgcgaggaaacgccacagcacaggaggcacatatgccgatgtggcgggaaaggacccctggcacgccaaggacgtggaagaaaggggacagggttatgctacaagaacatgcggagggggagtcacaagaaaagagctggaggcgagggctgacacggagtttggagtcaaaagggcccatggtgaggaagagctggactagagacggaaatggaatgcgggcaaaagaatctggaaaggttggaaattcaagagatgagggtacaggaagaagaaacgcatgtaagaaaatgaagaaacccccggatggtgagtatgctggcaagctgagagttgagctggacatgtgctccaagagaggagatgtgatgggggcgatcactctgtatgattccgcagtcgaggaggggatcaagttggggcagcatcactacaatgtgctcctttatctgtgttcttcagcttctcttggttttgtgcaaccagcaaaaagtggtaatatgggtagtggtatcgccagtattggtcctgcacagaaacttgatccatcacccagcagaagcttgggaggttcagagggagacaatgcatatgcatctgaaagtcatgttcaagatcagggaaaaaacaaggccgatttgattccaggtggtttgaaggcacaaacagttagcataccagtagaagatgagcttggagactatgcacgtgcacgaggatttgagatatttgataaaatgtgctcagagaaagagagagttcaaatgagtgaggctgctctgaccgcaaaggcacgtatggcgttgtccatgggtgacagtgatatggcctttgagattgtgaaacagatgaaaggcctgggtttaaagccaaagttgcgctcatatggtcctgctttaacagcattttgcaacagtggtaatgttgaaaaagcatttgaagtagaagcccatatgttggaatctgggatcacacccgaagaagctgagttggagacacttctcagggctagtgtggttggccgacgcggagacaaggtatattatttgctgcataaatttaggactgctgtcagacaggtatcccattccacagctgaattgtttgaggcttggtttcggagcccaacagcatctaaagttggaaagagaaagtgggatgcaggtgctatagcgaaggctattgagaataatggagggggttggcatgggtttggttggttggggagagggaaatggacagtggcacactcaaatatcaacgagaatggtgtctgccttgcttgtggagaaaagctggctattatagatcttgacccaaaagaaacagaagattttgccacatttgtggcaaaattagctattaagagagagaggaaatcgaactttgagaacttccagaaatggcttgaaaagcatgggccttttgaggcagtcgtggatgctgccaatgttggcctgtttagccacaaacacctttctttgagtaaggttaattctgttgccgatgcaataaggctaaggtttacgtcaaaaaaatggcctttgatagttttacataacaagcatctcattggagagcgcatgaaaaaacttaatgatcacaagttggtacaaaagtggaagcaagaaaattcaatatatgcaacccctactggttcaaatgatgattggtactggctgtacgctgctatcagatgcaaatgcttgatcattaccaatgatgaaatgagagaccacacatttcagattttggaaaggaatttcttccccaagtggaaggaaaggcatcaggaatccgataaaggtcactggcatatccctgtctcggaggaaggcttgctagagaaggaccgaacctggctatgcgttacacggcagaattcacaggcacagtgactaacgaagctggagttgttcgatggcaaacattaacggtgtttttttttctgaacactcaagtcagtatcgcatccgccctctcttcgtcagtctgagaaacttcctctattaagtactcattatgatttctacatggtcttattcagttttgttactgaactgctgcatatgttgtaattctgtcttattcagttttgagctggtctacattttgtttagtaaactgatataggtaatacgattccctgctatcagaacaagatctctgctattttccgctcatcccaggatcaggaaataaccgcaaagctgacgagatactgtgcatactggcatagtcactttgcttccgttggtgaaatttttacgtccatatgacatgcatggaaaaaagaacaggcctgattgaattctt

SEQ ID NO: 50021 - DNA, 2728 bp, Zea Mays
aagatttggcgaatacgttgccgccaaaaccttatctcctttaaaacctacgctccacttgcttccctccgttcatggcagctctgccaccgccatggcctacctctccagtctccaccacgcgccttatccccgcctacttctccaccaccgctacctcttcttttctgcatcctccccacctcccgtcgtcactacacgacgccttgttcctacactggcatgccatggccgcgatctgctcgacgtaatgccctacagagacagcaggccctcaggaacggagggaagcagagcaggcccaggcggagcaccgcgtgtcacaaacagctcaactgtgcgaggaaacgccacagcacaggaggcacatatgccgatgtggcgggaaaggacccctggcacgccaaggacgtggaagaaaggggacagggttatgctacaagaacatgcggagggggagtcacaagaaaagagctggaggcgagggctgacacggagtttggagtcaaaagggcccatggtgaggaagagctggactagagacggaaatggaatgcgggcaaaagaatctggaaaggttggaaattcaagagatgagggtacaggaagaagaaacgcatgtaagaaaatgaagaaacccccggatggtgagtatgctggcaagctgagagttgagctggacatgtgctccaagagaggagatgtgatgggggcgatcactctgtatgattccgcagtcgaggaggggatcaagttggggcagcatcactacaatgtgctcctttatctgtgttcttcagcttctcttggttttgtgcaaccagcaaaaagtggtaatatgggtagtggtatcgccagtattggtcctgcacagaaacttgatccatcacccagcagaagcttgggaggttcagagggagacaatgcatatgcatctgaaagtcatgttcaagatcagggaaaaaacaaggccgatttgattccaggtggtttgaaggcacaaacagttagcataccagtagaagatgagcttggagactatgcacgtgcacgaggatttgagatatttgataaaatgtgctcagagaaagagagagttcaaatgagtgaggctgctctgaccgcaaaggcacgtatggcgttgtccatgggtgacagtgatatggcctttgagattgtgaaacagatgaaaggcctgggtttaaagccaaagttgcgctcatatggtcctgctttaacagcattttgcaacagtggtaatgttgaaaaagcatttgaagtagaagcccatatgttggaatctgggatcacacccgaagaagctgagttggagacacttctcagggctagtgtggttggccgacgcggagacaaggtatattatttgctgcataaatttaggactgctgtcagacaggtatcccattccacagctgaattgtttgaggcttggtttcggagcccaacagcatctaaagttggaaagagaaagtgggatgcaggtgctatagcgaaggctattgagaataatggagggggttggcatgggtttggttggttggggagagggaaatggacagtggcacactcaaatatcaacgagaatggtgtctgccttgcttgtggagaaaagctggctattatagatcttgacccaaaagaaacagaagattttgccacatttgtggcaaaattagctattaagagagagaggaaatcgaactttgagaacttccagaaatggcttgaaaagcatgggccttttgaggcagtcgtggatgctgccaatgttggcctgtttagccacaaacacctttctttgagtaaggttaattctgttgccgatgcaataaggctaaggtttacgtcaaaaaaatggcctttgatagttttacataacaagcatctcattggagagcgcatgaaaaaacttaatgatcacaagttggtacaaaagtggaagcaagaaaattcaatatatgcaacccctactggttcaaatgatgattgttcaggtactggctgtacgctgctatcagatgcaaatgcttgatcattaccaatgatgaaatgagagaccacacatttcagattttggaaaggaatttcttccccaagtggaaggaaaggcatcaggtacacttcactttggaagaccgctgcgtcacatttcaaatgccacctccatactcagttgttatacaggaatccgataaaggtcactggcatatccctgtctcggaggaaggcttgctagagaaggaccgaacctggctatgcgttacacggcagaattcacaggcacagtgactaacgaagctggagttgttcgatggcaaacattaacggtgtttttttttctgaacactcaagtcagtatcgcatccgccctctcttcgtcagtctgagaaacttcctctattaagtactcattatgatttctacatggtcttattcagttttgttactgaactgctgcatatgttgtaattctgtcttattcagttttgagctggtctacattttgtttagtaaactgatataggtaatacgattccctgctatcagaacaagatctctgctattttccgctcatcccaggatcaggaaataaccgcaaagctgacgagatactgtgcatactggcatagtcactttgcttccgttggtgaaatttttacgtccatatgacatgcatggaaaaaagaacaggcctgattgaattctt

SEQ ID NO: 50022 - DNA, 2282 bp, Zea Mays
cgaatacgttgccgccaaaaccttatctcctttaaaacctacgctccacttgcttccctccgttcatggcagctctgccaccgccatggcctacctctccagtctccaccacgcgccttatccccgcctacttctccaccaccgctacctcttcttttctgcatcctccccacctcccgtcgtcactacacgacgccttgttcctacactggcatgccatggccgcgatctgctcgacgtaatgccctacagagacagcaggccctcaggaacggagggaagcagagcaggcccaggcggagcaccgcgtgtcacaaacagctcaactgtgcgaggaaacgccacagcacaggaggcacatatgccgatgtggcgggaaaggacccctggcacgccaaggacgtggaagaaaggggacagggttatgctacaagaacatgcggagggggagtcacaagaaaagagctggaggcgagggctgacacggagtttggagtcaaaagggcccatggtgaggaagagctggactagagacggaaatggaatgcgggcaaaagaatctggaaaggttggaaattcaagagatgagggtacaggaagaagaaacgcatgtaagaaaatgaagaaacccccggatggtgagtatgctggcaagctgagagttgagctggacatgtgctccaagagaggagatgtgatgggggcgatcactctgtatgattccgcagtcgaggaggggatcaagttggggcagcatcactacaatgtgctcctttatctgtgttcttcagcttctcttggttttgtgcaaccagcaaaaagtggtaatatgggtagtggtatcgccagtattggtcctgcacagaaacttgatccatcacccagcagaagcttgggaggttcagagggagacaatgcatatgcatctgaaagtcatgttcaagatcagggaaaaaacaaggccgatttgattccaggtggtttgaaggcacaaacagttagcataccagtagaagatgagcttggagactatgcacgtgcacgaggatttgagatatttgataaaatgtgctcagagaaagagagagttcaaatgagtgaggctgctctgaccgcaaaggcacgtatggcgttgtccatgggtgacagtgatatggcctttgagattgtgaaacagatgaaaggcctgggtttaaagccaaagttgcgctcatatggtcctgctttaacagcattttgcaacagtggtaatgttgaaaaagcatttgaagtagaagcccatatgttggaatctgggatcacacccgaagaagctgagttggagacacttctcagggctagtgtggttggccgacgcggagacaagaaatggcttgaaaagcatgggccttttgaggcagtcgtggatgctgccaatgttggcctgtttagccacaaacacctttctttgagtaaggttaattctgttgccgatgcaataaggctaaggtttacgtcaaaaaaatggcctttgatagttttacataacaagcatctcattggagagcgcatgaaaaaacttaatgatcacaagttggtacaaaagtggaagcaagaaaattcaatatatgcaacccctactggttcaaatgatgattggtactggctgtacgctgctatcagatgcaaatgcttgatcattaccaatgatgaaatgagagaccacacatttcagattttggaaaggaatttcttccccaagtggaaggaaaggcatcaggaatccgataaaggtcactggcatatccctgtctcggaggaaggcttgctagagaaggaccgaacctggctatgcgttacacggcagaattcacaggcacagtgactaacgaagctggagttgttcgatggcaaacattaacggtgtttttttttctgaacactcaagtcagtatcgcatccgccctctcttcgtcagtctgagaaacttcctctattaagtactcattatgatttctacatggtcttattcagttttgttactgaactgctgcatatgttgtaattctgtcttattcagttttgagctggtctacattttgtttagtaaactgatataggtaatacgattccctgctatcagaacaagatctctgctattttccgctcatcccaggatcaggaaataaccgcaaagctgacgagatactgtgcatactggcatagtcactttgcttccgttggtgaaatttttacgtccatatgacatgcatggaaaaaagaacaggcctgattgaattctt

SEQ ID NO: 50023 - DNA, 2646 bp, Zea Mays
gaatacgttgccgccaaaaccttatctcctttaaaacctacgctccacttgcttccctccgttcatggcagctctgccaccgccatggcctacctctccagtctccaccacgcgccttatccccgcctacttctccaccaccgctacctcttcttttctgcatcctccccacctcccgtcgtcactacacgacgccttgttcctacactggcatgccatggccgcgatctgctcgacgtaatgccctacagagacagcaggccctcaggaacggagggaagcagagcaggcccaggcggagcaccgcgtgtcacaaacagctcaactgtgcgaggaaacgccacagcacaggaggcacatatgccgatgtggcgggaaaggacccctggcacgccaaggacgtggaagaaaggggacagggttatgctacaagaacatgcggagggggagtcacaagaaaagagctggaggcgagggctgacacggagtttggagtcaaaagggcccatggtgaggaagagctggactagagacggaaatggaatgcgggcaaaagaatctggaaaggttggaaattcaagagatgagggtacaggaagaagaaacgcatgtaagaaaatgaagaaacccccggatggtgagtatgctggcaagctgagagttgagctggacatgtgctccaagagaggagatgtgatgggggcgatcactctgtatgattccgcagtcgaggaggggatcaagttggggcagcatcactacaatgtgctcctttatctgtgttcttcagcttctcttggttttgtgcaaccagcaaaaagtggtaatatgggtagtggtatcgccagtattggtcctgcacagaaacttgatccatcacccagcagaagcttgggaggttcagagggagacaatgcatatgcatctgaaagtcatgttcaagatcagggaaaaaacaaggccgatttgattccaggtggtttgaaggcacaaacagttagcataccagtagaagatgagcttggagactatgcacgtgcacgaggatttgagatatttgataaaatgtgctcagagaaagagagagttcaaatgagtgaggctgctctgaccgcaaaggcacgtatggcgttgtccatgggtgacagtgatatggcctttgagattgtgaaacagatgaaaggcctgggtttaaagccaaagttgcgctcatatggtcctgctttaacagcattttgcaacagtggtaatgttgaaaaagcatttgaagtagaagcccatatgttggaatctgggatcacacccgaagaagctgagttggagacacttctcagggctagtgtggttggccgacgcggagacaaggtatattatttgctgcataaatttaggactgctgtcagacaggtatcccattccacagctgaattgtttgaggcttggtttcggagcccaacagcatctaaagttggaaagagaaagtgggatgcaggtgctatagcgaaggctattgagaataatggagggggttggcatgggtttggttggttggggagagggaaatggacagtggcacactcaaatatcaacgagaatggtgtctgccttgcttgtggagaaaagctggctattatagatcttgacccaaaagaaacagaagattttgccacatttgtggcaaaattagctattaagagagagaggaaatcgaactttgagaacttccaggttaattctgttgccgatgcaataaggctaaggtttacgtcaaaaaaatggcctttgatagttttacataacaagcatctcattggagagcgcatgaaaaaacttaatgatcacaagttggtacaaaagtggaagcaagaaaattcaatatatgcaacccctactggttcaaatgatgattgttcaggtactggctgtacgctgctatcagatgcaaatgcttgatcattaccaatgatgaaatgagagaccacacatttcagattttggaaaggaatttcttccccaagtggaaggaaaggcatcagtattgttttcactaacaggtacacttcactttggaagaccgctgcgtcacatttcaaatgccacctccatactcagttgttatacaggaatccgataaaggtcactggcatatccctgtctcggaggaaggcttgctagagaaggaccgaacctggctatgcgttacacggcagaattcacaggcacagtgactaacgaagctggagttgttcgatggcaaacattaacggtgtttttttttctgaacactcaagtcagtatcgcatccgccctctcttcgtcagtctgagaaacttcctctattaagtactcattatgatttctacatggtcttattcagttttgttactgaactgctgcatatgttgtaattctgtcttattcagttttgagctggtctacattttgtttagtaaactgatataggtaatacgattccctgctatcagaacaagatctctgctattttccgctcatcccaggatcaggaaataaccgcaaagctgacgagatactgtgcatactggcatagtcactttgcttccgttggtgaaatttttacgtccatatgacatgcatggaaaaaagaacaggcctgattgaattctt

SEQ ID NO: 50024 - DNA, 2129 bp, Zea Mays
gccgccaaaaccttatctcctttaaaacctacgctccacttgcttccctccgttcatggcagctctgccaccgccatggcctacctctccagtctccaccacgcgccttatccccgcctacttctccaccaccgctacctcttcttttctgcatcctccccacctcccgtcgtcactacacgacgccttgttcctacactggcatgccatggccgcgatctgctcgacgtaatgccctacagagacagcaggccctcaggaacggagggaagcagagcaggcccaggcggagcaccgcgtgtcacaaacagctcaactgtgcgaggaaacgccacagcacaggaggcacatatgccgatgtggcgggaaaggacccctggcacgccaaggacgtggaagaaaggggacagggttatgctacaagaacatgcggagggggagtcacaagaaaagagctggaggcgagggctgacacggagtttggagtcaaaagggcccatggtgaggaagagctggactagagacggaaatggaatgcgggcaaaagaatctggaaaggttggaaattcaagagatgagggtacaggaagaagaaacgcatgtaagaaaatgaagaaacccccggatggtgagtatgctggcaagctgagagttgagctggacatgtgctccaagagaggagatgtgatgggggcgatcactctgtatgattccgcagtcgaggaggggatcaagttggggcagcatcactacaatgtgctcctttatctgtgttcttcagcttctcttggttttgtgcaaccagcaaaaagtggtaatatgggtagtggtatcgccagtattggtcctgcacagaaacttgatccatcacccagcagaagcttgggaggttcagagggagacaatgcatatgcatctgaaagtcatgttcaagatcagggaaaaaacaaggccgatttgattccaggtggtttgaaggcacaaacagttagcataccagtagaagatgagcttggagactatgcacgtgcacgaggatttgagatatttgataaaatgtgctcagagaaagagagagttcaaatgagtgaggctgctctgaccgcaaaggcacgtatggcgttgtccatgggtgacagtgatatggcctttgagattgtgaaacagatgaaaggcctgggtttaaagccaaagttgcgctcatatggtcctgctttaacagcattttgcaacagtggtaatgttgaaaaagcatttgaagtagaagcccatatgttggaatctgggatcacacccgaagaagctgagttggagacacttctcagggctagtgtggttggccgacgcggagacaaggtatattatttgctgcataaatttaggactgctgtcagacaggtatcccattccacagctgaattgtttgaggcttggtttcggagcccaacagcatctaaagttggaaagagaaagtgggatgcaggtgctatagcgaaggctattgagaataatggagggggttggcatgggtttggttggttggggagagggaaatggacagtggcacactcaaatatcaacgagaatggtgtctgccttgcttgtggagaaaagctggctattatagatcttgacccaaaagaaacagaagattttgccacatttgtggcaaaattagctattaagagagagaggaaatcgaactttgagaacttccagaaatggcttgaaaagcatgggccttttgaggcagtcgtggatgctgccaatgttggcctgtttagccacaaacacctttctttgagtaaggttaattctgttgccgatgcaataaggctaaggtttacgtcaaaaaaatggcctttgatagttttacataacaagcatctcattggagagcgcatgaaaaaacttaatgatcacaagttggtacaaaagtggaagcaagaaaattcaatatatgcaacccctactggttcaaatgatgattgttcaggtactggctgtacgctgctatcagatgcaaatgcttgatcattaccaatgatgaaatgagagaccacacatttcagattttggaaaggaatttcttccccaagtggaaggaaaggcatcagtattgttttcac

SEQ ID NO: 50025 - DNA, 2536 bp, Zea Mays
ctccgttcatggcagctctgccaccgccatggcctacctctccagtctccaccacgcgccttatccccgcctacttctccaccaccgctacctcttcttttctgcatcctccccacctcccgtcgtcactacacgacgccttgttcctacactggcatgccatggccgcgatctgctcgacgtaatgccctacagagacagcaggccctcaggaacggagggaagcagagcaggcccaggcggagcaccgcgtgtcacaaacagctcaactgtgcgaggaaacgccacagcacaggaggcacatatgccgatgtggcgggaaaggacccctggcacgccaaggacgtggaagaaaggggacagggttatgctacaagaacatgcggagggggagtcacaagaaaagagctggaggcgagggctgacacggagtttggagtcaaaagggcccatggtgaggaagagctggactagagacggaaatggaatgcgggcaaaagaatctggaaaggttggaaattcaagagatgagggtacaggaagaagaaacgcatgtaagaaaatgaagaaacccccggatggtgagtatgctggcaagctgagagttgagctggacatgtgctccaagagaggagatgtgatgggggcgatcactctgtatgattccgcagtcgaggaggggatcaagttggggcagcatcactacaatgtgctcctttatctgtgttcttcagcttctcttggttttgtgcaaccagcaaaaagtggtaatatgggtagtggtatcgccagtattggtcctgcacagaaacttgatccatcacccagcagaagcttgggaggttcagagggagacaatgcatatgcatctgaaagtcatgttcaagatcagggaaaaaacaaggccgatttgattccaggtggtttgaaggcacaaacagttagcataccagtagaagatgagcttggagactatgcacgtgcacgaggatttgagatatttgataaaatgtgctcagagaaagagagagttcaaatgagtgaggctgctctgaccgcaaaggcacgtatggcgttgtccatgggtgacagtgatatggcctttgagattgtgaaacagatgaaaggcctgggtttaaagccaaagttgcgctcatatggtcctgctttaacagcattttgcaacagtggtaatgttgaaaaagcatttgaagtagaagcccatatgttggaatctgggatcacacccgaagaagctgagttggagacacttctcagggctagtgtggttggccgacgcggagacaaggtatattatttgctgcataaatttaggactgctgtcagacaggtatcccattccacagctgaattgtttgaggcttggtttcggagcccaacagcatctaaagttggaaagagaaagtgggatgcaggtgctatagcgaaggctattgagaataatggagggggttggcatgggtttggttggttggggagagggaaatggacagtggcacactcaaatatcaacgagaatggtgtctgccttgcttgtggagaaaagctggctattatagatcttgacccaaaagaaacagaagattttgccacatttgtggcaaaattagctattaagagagagaggaaatcgaactttgagaacttccagaaatggcttgaaaagcatgggccttttgaggcagtcgtggatgctgccaatgttggcctgtttagccacaaacacctttctttgagtaaggttaattctgttgccgatgcaataaggctaaggtttacgtcaaaaaaatggcctttgatagttttacataacaagcatctcattggagagcgcatgaaaaaacttaatgatcacaagttggtacaaaagtggaagcaagaaaattcaatatatgcaacccctactggttcaaatgatgattggtacacttcactttggaagaccgctgcgtcacatttcaaatgccacctccatactcagttgttatacaggaatccgataaaggtcactggcatatccctgtctcggaggaaggcttgctagagaaggaccgaacctggctatgcgttacacggcagaattcacaggcacagtgactaacgaagctggagttgttcgatggcaaacattaacggtgtttttttttctgaacactcaagtcagtatcgcatccgccctctcttcgtcagtctgagaaacttcctctattaagtactcattatgatttctacatggtcttattcagttttgttactgaactgctgcatatgttgtaattctgtcttattcagttttgagctggtctacattttgtttagtaaactgatataggtaatacgattccctgctatcagaacaagatctctgctattttccgctcatcccaggatcaggaaataaccgcaaagctgacgagatactgtgcatactggcatagtcactttgcttccgttggtgaaatttttacgtccatatgacatgcatggaaaaaagaacaggcctgattgaattctt

SEQ ID NO: 50026 - DNA, 1917 bp, Zea Mays
ctccagtctccaccacgcgccttatccccgcctacttctccaccaccgctacctcttcttttctgcatcctccccacctcccgtcgtcactacacgacgccttgttcctacactggcatgccatggccgcgatctgctcgacgtaatgccctacagagacagcaggccctcaggaacggagggaagcagagcaggcccaggcggagcaccgcgtgtcacaaacagctcaactgtgcgaggaaacgccacagcacaggaggcacatatgccgatgtggcgggaaaggacccctggcacgccaaggacgtggaagaaaggggacagggttatgctacaagaacatgcggagggggagtcacaagaaaagagctggaggcgagggctgacacggagtttggagtcaaaagggcccatggtgaggaagagctggactagagacggaaatggaatgcgggcaaaagaatctggaaaggttggaaattcaagagatgagggtacaggaagaagaaacgcatgtaagaaaatgaagaaacccccggatggtgagtatgctggcaagctgagagttgagctggacatgtgctccaagagaggagatgtgatgggggcgatcactctgtatgattccgcagtcgaggaggggatcaagttggggcagcatcactacaatgtgctcctttatctgtgttcttcagcttctcttggttttgtgcaaccagcaaaaagtggtaatatgggtagtggtatcgccagtattggtcctgcacagaaacttgatccatcacccagcagaagcttgggaggttcagagggagacaatgcatatgcatctgaaagtcatgttcaagatcagggaaaaaacaaggccgatttgattccaggtggtttgaaggcacaaacagttagcataccagtagaagatgagcttggagactatgcacgtgcacgaggatttgagatatttgataaaatgtgctcagagaaagagagagttcaaatgagtgaggctgctctgaccgcaaaggcacgtatggcgttgtccatgggtgacagtgatatggcctttgagattgtgaaacagatgaaaggcctgggtttaaagccaaagttgcgctcatatggtcctgctttaacagcattttgcaacagtggtaatgttgaaaaagcatttgaagtagaagcccatatgttggaatctgggatcacacccgaagaagctgagttggagacacttctcagggctagtgtggttggccgacgcggagacaaggtatattatttgctgcataaatttaggactgctgtcagacaggtatcccattccacagctgaattgtttgaggcttggtttcggagcccaacagcatctaaagttggaaagagaaagtgggatgcaggtgctatagcgaaggctattgagaataatggagggggttggcatgggtttggttggttggggagagggaaatggacagtggcacactcaaatatcaacgagaatggtgtctgccttgcttgtggagaaaagctggctattatagatcttgacccaaaagaaacagaagattttgccacatttgtggcaaaattagctattaagagagagaggaaatcgaactttgagaacttccagaaatggcttgaaaagcatgggccttttgaggcagtcgtggatgctgccaatgttggcctgtttagccacaaacacctttctttgagtaaggttaattctgttgccgatgcaataaggctaaggtttacgtcaaaaaaatggcctttgatagttttacataacaagcatctcattggagagcgcatgaaaaaacttaatgatcacaagttggtacaaaagtggaagcaagaaaattcaatatatgcaacccctactggttcaaatgatgattgtattgttttcac

SEQ ID NO: 50027 - DNA, 2320 bp, Zea Mays
gtctgaggcgccacttactcgtgctacggaacagttggcgcgtgagcgagtttcttaactcctcgccattggaatcggagtcgtgcttcagccgcagcttgtggtggaatcggagcttcttatccgagagcagacatggagcagagtagtgatgggttgccaatcagccagcggagggctaacagttcaacaaaacactcaagcaagtcagatgaggttgctgaagacatgttgcagagtaatataccacatgaaactgtgagactgtgccaaggtgtggaatcagaagagatagagggacctcctcacaagaaaattgtccagaacttcacggagagcagtagttccaaaaataaaaaacacagatggtcatcagaggaagatgaggcactaaagcaaatggtaaaaaaatatgggacgaaaaactggcgaactattgcatgtgctatacctggccgaaatgccaactcatgcctttcaagatggaagtaccttctagacccagcaataaacaaagagccttggtcgcaacaggaggaactaagattgatccgtgcgcagcaagtttatggaaacaaatggtgtaaaatggtcaaacatttcccagggaggacaaatgatgcactcaaagaacattggagaagtcctatgaaaagaaaactggattcatatttggcctcaggattgctcgaacatgttccagacctgcaagatgatgtatcatttccacagacacagaacaatcaatcagatattccaaaggactgcaaagctgcatctgatagaaatagattttcatcacgtttatcaacagaccccaaacttaaacaagagctcacagaactggatgaaaatgaaatgagaatggccaaatcacagcagtgtgcaggaacaagaaagaagctggcttttctgtcaactccagtggagctcaagagtgttgtaccgcatgaaaccaccaaacattgccaagatatggaaccagaaaagacagagggcccactgtgcaagagaaattcccactgcatcaaggatggaagtagtttgaaaattcccgaaagtaccaaaggcaaatggaagatgaaattctcattaaaatggttaccaaacatgggaaaaactggcaaactgtagcatttgctatacctggccgagaagcaaaacaatgccaaatcagatggacacgcagtcttgacccagcaataaagaaacaggattggtcagaacaggaggatctaaaattgattcgagctcatcaaatatatggaagtcagtggcttaaaatggtcaaacatttccctgggaggacaaatcatgcactcaaagaacactggagaaatcgtatcaaaggaaaactgaatttttatttagcctcaggattgctagaacaagttccggacctggaagaaggtggtatatcagttccagagagcagtcagtcagaaattccgaaggacagtcagggttcagctgacaggagtggaccgccaccagttttacgagcacagcccaaatctaaaccggaactcccagaaaacgctggtacatcaggagaaggaacttctgattccattcgtcttaaagggcccaacgcccatccaaccgaagtttctgaaaaggtattggctaaatcaaagcagcgtgccagagccagaaggagattggattttctgtcaaccccagtggagctcaaattgtgcactgctgcggcaagttgtcaaaggcctccccagaaaatggatcaaccgggtccagtggccgagaacatctctccgtcagatgcatgtcaagacatttcacagaatgttccaccagagcgtgcggatgccatcacaccgctggctgctagtaaccaccattcaccagcgacaccagttgatccattctctctcgaaatgcatgaggcgaacgcatcagatcttctggacatgtcctactgtgatggcttgataatcgattctcctcgtgatccacatgacggtagcctcatgtagaagaaaaagttaccaacgcaaaatgacacttttaatagcaagagacgatggactgtcttcctgaaatccagcaactccctgtataaaaatcgtgttgcatgttggatggaacttgtatcttgtcttggcaaaaataattgcattgctgttctgttaatgcccctaactggtttggagagcatttttcttttgcaggtttgaagagcattttgaggggtgttgtaggtcaaattgaacaccatactcgaatgactcgtgttgttggtaactgaatcaataaaatatatgcatgtaaaaattcataatgttcatgtgctagaagccac

SEQ ID NO: 50028 - DNA, 2496 bp, Zea Mays
gccacttactcgtgctacggaacagttggcgcgtgagcgagtttcttaactcctcgccattggaatcggagtcgtgtattctctcacaccatcctgctcctgctcctgctcctgctcccttcccatccggtctccctttcttttcgcggcctcgcctcgcctcgcctcgcctcgccggcggcctggtggtcgcggtctcgctccagcaccgataaagcccacctcgagttctgctctgctccaccccccggcttcagccgcagcttgtggtggaatcggagcttcttatccgagagcagacatggagcagagtagtgatgggttgccaatcagccagcggagggctaacagttcaacaaaacactcaagcaagtcagatgaggttgctgaagacatgttgcagagtaatataccacatgaaactgtgagactgtgccaaggtgtggaatcagaagagatagagggacctcctcacaagaaaattgtccagaacttcacggagagcagtagttccaaaaataaaaaacacagatggtcatcagaggaagatgaggcactaaagcaaatggtaaaaaaatatgggacgaaaaactggcgaactattgcatgtgctatacctggccgaaatgccaactcatgcctttcaagatggaagtaccttctagacccagcaataaacaaagagccttggtcgcaacaggaggaactaagattgatccgtgcgcagcaagtttatggaaacaaatggtgtaaaatggtcaaacatttcccagggaggacaaatgatgcactcaaagaacattggagaagtcctatgaaaagaaaactggattcatatttggcctcaggattgctcgaacatgttccagacctgcaagatgatgtatcatttccacagacacagaacaatcaatcagatattccaaaggactgcaaagctgcatctgatagaaatagattttcatcacgtttatcaacagaccccaaacttaaacaagagctcacagaactggatgaaaatgaaatgagaatggccaaatcacagcagtgtgcaggaacaagaaagaagctggcttttctgtcaactccagtggagctcaagagtgttgtaccgcatgaaaccaccaaacattgccaagatatggaaccagaaaagacagagggcccactgtgcaagagaaattcccactgcatcaaggatggaagtagtttgaaaattcccgaaagtaccaaaggcaaatggttagcagaggaaaatgaaattctcattaaaatggttaccaaacatgggaaaaactggcaaactgtagcatttgctatacctggccgagaagcaaaacaatgccaaatcagatggacacgcagtcttgacccagcaataaagaaacaggattggtcagaacaggaggatctaaaattgattcgagctcatcaaatatatggaagtcagtggcttaaaatggtcaaacatttccctgggaggacaaatcatgcactcaaagaacactggagaaatcgtatcaaaggaaaactgaatttttatttagcctcaggattgctagaacaagttccggacctggaagaaggtggtatatcagttccagagagcagtcagtcagaaattccgaaggacagtcagggttcagctgacaggagtggaccgccaccagttttacgagcacagcccaaatctaaaccggaactcccagaaaacgctggtacatcaggagaaggaacttctgattccattcgtcttaaagggcccaacgcccatccaaccgaagtttctgaaaaggtattggctaaatcaaagcagcgtgccagagccagaaggagattggattttctgtcaaccccagtggagctcaaattgtgcactgctgcggcaagttgtcaaaggcctccccagaaaatggatcaaccgggtccagtggccgagaacatctctccgtcagatgcatgtcaagacatttcacagaatgttccaccagagcgtgcggatgccatcacaccgctggctgctagtaaccaccattcaccagcgacaccagttgatccattctctctcgaaatgcatgaggcgaacgcatcagatcttctggacatgtcctactgtgatggcttgataatcgattctcctcgtgatccacatgacggtagcctcatgtagaagaaaaagttaccaacgcaaaatgacacttttaatagcaagagacgatggactgtcttcctgaaatccagcaactccctgtataaaaatcgtgttgcatgttggatggaacttgtatcttgtcttggcaaaaataattgcattgctgttctgttaatgcccctaactggtttggagagcatttttcttttgcaggtttgaagagcattttgaggggtgttgtaggtcaaattgaacaccatactcgaatgactcgtgttgttggtaactgaatcaataaaatatatgcatgtaaaaattcataatgttcatgtgctagaagccac

SEQ ID NO: 50029 - DNA, 2483 bp, Zea Mays
gccacttactcgtgctacggaacagttggcgcgtgagcgagtttcttaactcctcgccattggaatcggagtcgtgtattctctcacaccatcctgctcctgctcctgctcctgctcccttcccatccggtctccctttcttttcgcggcctcgcctcgcctcgcctcgcctcgccggcggcctggtggtcgcggtctcgctccagcaccgataaagcccacctcgagttctgctctgctccaccccccggcttcagccgcagcttgtggtggaatcggagcttcttatccgagagcagacatggagcagagtagtgatgggttgccaatcagccagcggagggctaacagttcaacaaaacactcaagcaagtcagatgaggttgctgaagacatgttgcagagtaatataccacatgaaactgtgagactgtgccaaggtgtggaatcagaagagatagagggacctcctcacaagaaaattgtccagaacttcacggagagcagtagttccaaaaataaaaaacacagatggtcatcagaggaagatgaggcactaaagcaaatggtaaaaaaatatgggacgaaaaactggcgaactattgcatgtgctatacctggccgaaatgccaactcatgcctttcaagatggaagtaccttctagacccagcaataaacaaagagccttggtcgcaacaggaggaactaagattgatccgtgcgcagcaagtttatggaaacaaatggtgtaaaatggtcaaacatttcccagggaggacaaatgatgcactcaaagaacattggagaagtcctatgaaaagaaaactggattcatatttggcctcaggattgctcgaacatgttccagacctgcaagatgatgtatcatttccacagacacagaacaatcaatcagatattccaaaggactgcaaagctgcatctgatagaaatagattttcatcacgtttatcaacagaccccaaacttaaacaagagctcacagaactggatgaaaatgaaatgagaatggccaaatcacagcagtgtgcaggaacaagaaagaagctggcttttctgtcaactccagtggagctcaagagtgttgtaccgcatgaaaccaccaaacattgccaagatatggaaccagaaaagacagagggcccactgtgcaagagaaattcccactgcatcaaggatggaagtagtttgaaaattcccgaaagtaccaaaggcaaatggatgaaattctcattaaaatggttaccaaacatgggaaaaactggcaaactgtagcatttgctatacctggccgagaagcaaaacaatgccaaatcagatggacacgcagtcttgacccagcaataaagaaacaggattggtcagaacaggaggatctaaaattgattcgagctcatcaaatatatggaagtcagtggcttaaaatggtcaaacatttccctgggaggacaaatcatgcactcaaagaacactggagaaatcgtatcaaaggaaaactgaatttttatttagcctcaggattgctagaacaagttccggacctggaagaaggtggtatatcagttccagagagcagtcagtcagaaattccgaaggacagtcagggttcagctgacaggagtggaccgccaccagttttacgagcacagcccaaatctaaaccggaactcccagaaaacgctggtacatcaggagaaggaacttctgattccattcgtcttaaagggcccaacgcccatccaaccgaagtttctgaaaaggtattggctaaatcaaagcagcgtgccagagccagaaggagattggattttctgtcaaccccagtggagctcaaattgtgcactgctgcggcaagttgtcaaaggcctccccagaaaatggatcaaccgggtccagtggccgagaacatctctccgtcagatgcatgtcaagacatttcacagaatgttccaccagagcgtgcggatgccatcacaccgctggctgctagtaaccaccattcaccagcgacaccagttgatccattctctctcgaaatgcatgaggcgaacgcatcagatcttctggacatgtcctactgtgatggcttgataatcgattctcctcgtgatccacatgacggtagcctcatgtagaagaaaaagttaccaacgcaaaatgacacttttaatagcaagagacgatggactgtcttcctgaaatccagcaactccctgtataaaaatcgtgttgcatgttggatggaacttgtatcttgtcttggcaaaaataattgcattgctgttctgttaatgcccctaactggtttggagagcatttttcttttgcaggtttgaagagcattttgaggggtgttgtaggtcaaattgaacaccatactcgaatgactcgtgttgttggtaactgaatcaataaaatatatgcatgtaaaaattcataatgttcatgtgctagaagccac

SEQ ID NO: 50030 - DNA, 2401 bp, Zea Mays
cttactcgtgctacggaacagttggcgcgtgagcgagtttcttaactcctcgccattggaatcggagtcgtgcttcagccgcagcttgtggtggaatcggagcttcttatccgagagcagacatggagcagagtagtgatgggttgccaatcagccagcggagggctaacagttcaacaaaacactcaagcaagtcagatgaggttgctgaagacatgttgcagagtaatataccacatgaaactgtgagactgtgccaaggtgtggaatcagaagagatagagggacctcctcacaagaaaattgtccagaacttcacggagagcagtagttccaaaaataaaaaacacagatggtcatcagaggaaagttgtttagactataatatttatcattcacattgtattttatacttattcaaaatagaaacaaattaattttccttccaggaagatgaggcactaaagcaaatggtaaaaaaatatgggacgaaaaactggcgaactattgcatgtgctatacctggccgaaatgccaactcatgcctttcaagatggaagtaccttctagacccagcaataaacaaagagccttggtcgcaacaggaggaactaagattgatccgtgcgcagcaagtttatggaaacaaatggtgtaaaatggtcaaacatttcccagggaggacaaatgatgcactcaaagaacattggagaagtcctatgaaaagaaaactggattcatatttggcctcaggattgctcgaacatgttccagacctgcaagatgatgtatcatttccacagacacagaacaatcaatcagatattccaaaggactgcaaagctgcatctgatagaaatagattttcatcacgtttatcaacagaccccaaacttaaacaagagctcacagaactggatgaaaatgaaatgagaatggccaaatcacagcagtgtgcaggaacaagaaagaagctggcttttctgtcaactccagtggagctcaagagtgttgtaccgcatgaaaccaccaaacattgccaagatatggaaccagaaaagacagagggcccactgtgcaagagaaattcccactgcatcaaggatggaagtagtttgaaaattcccgaaagtaccaaaggcaaatggttagcagaggaaaatgaaattctcattaaaatggttaccaaacatgggaaaaactggcaaactgtagcatttgctatacctggccgagaagcaaaacaatgccaaatcagatggacacgcagtcttgacccagcaataaagaaacaggattggtcagaacaggaggatctaaaattgattcgagctcatcaaatatatggaagtcagtggcttaaaatggtcaaacatttccctgggaggacaaatcatgcactcaaagaacactggagaaatcgtatcaaaggaaaactgaatttttatttagcctcaggattgctagaacaagttccggacctggaagaaggtggtatatcagttccagagagcagtcagtcagaaattccgaaggacagtcagggttcagctgacaggagtggaccgccaccagttttacgagcacagcccaaatctaaaccggaactcccagaaaacgctggtacatcaggagaaggaacttctgattccattcgtcttaaagggcccaacgcccatccaaccgaagtttctgaaaaggtattggctaaatcaaagcagcgtgccagagccagaaggagattggattttctgtcaaccccagtggagctcaaattgtgcactgctgcggcaagttgtcaaaggcctccccagaaaatggatcaaccgggtccagtggccgagaacatctctccgtcagatgcatgtcaagacatttcacagaatgttccaccagagcgtgcggatgccatcacaccgctggctgctagtaaccaccattcaccagcgacaccagttgatccattctctctcgaaatgcatgaggcgaacgcatcagatcttctggacatgtcctactgtgatggcttgataatcgattctcctcgtgatccacatgacggtagcctcatgtagaagaaaaagttaccaacgcaaaatgacacttttaatagcaagagacgatggactgtcttcctgaaatccagcaactccctgtataaaaatcgtgttgcatgttggatggaacttgtatcttgtcttggcaaaaataattgcattgctgttctgttaatgcccctaactggtttggagagcatttttcttttgcaggtttgaagagcattttgaggggtgttgtaggtcaaattgaacaccatactcgaatgactcgtgttgttggtaactgaatcaataaaatatatgcatgtaaaaattcataatgttcatgtgctagaagccac

SEQ ID NO: 50031 - DNA, 2327 bp, Zea Mays
tactcgtgctacggaacagttggcgcgtgagcgagtttcttaactcctcgccattggaatcggagtcgtgcttcagccgcagcttgtggtggaatcggagcttcttatccgagagcagacatggagcagagtagtgatgggttgccaatcagccagcggagggctaacagttcaacaaaacactcaagcaagtcagatgaggttgctgaagacatgttgcagagtaatataccacatgaaactgtgagactgtgccaaggtgtggaatcagaagagatagagggacctcctcacaagaaaattgtccagaacttcacggagagcagtagttccaaaaataaaaaacacagatggtcatcagaggaagatgaggcactaaagcaaatggtaaaaaaatatgggacgaaaaactggcgaactattgcatgtgctatacctggccgaaatgccaactcatgcctttcaagatggaagtaccttctagacccagcaataaacaaagagccttggtcgcaacaggaggaactaagattgatccgtgcgcagcaagtttatggaaacaaatggtgtaaaatggtcaaacatttcccagggaggacaaatgatgcactcaaagaacattggagaagtcctatgaaaagaaaactggattcatatttggcctcaggattgctcgaacatgttccagacctgcaagatgatgtatcatttccacagacacagaacaatcaatcagatattccaaaggactgcaaagctgcatctgatagaaatagattttcatcacgtttatcaacagaccccaaacttaaacaagagctcacagaactggatgaaaatgccaaaatctcagaaatgagaatggccaaatcacagcagtgtgcaggaacaagaaagaagctggcttttctgtcaactccagtggagctcaagagtgttgtaccgcatgaaaccaccaaacattgccaagatatggaaccagaaaagacagagggcccactgtgcaagagaaattcccactgcatcaaggatggaagtagtttgaaaattcccgaaagtaccaaaggcaaatggttagcagaggaaaatgaaattctcattaaaatggttaccaaacatgggaaaaactggcaaactgtagcatttgctatacctggccgagaagcaaaacaatgccaaatcagatggacacgcagtcttgacccagcaataaagaaacaggattggtcagaacaggaggatctaaaattgattcgagctcatcaaatatatggaagtcagtggcttaaaatggtcaaacatttccctgggaggacaaatcatgcactcaaagaacactggagaaatcgtatcaaaggaaaactgaatttttatttagcctcaggattgctagaacaagttccggacctggaagaaggtggtatatcagttccagagagcagtcagtcagaaattccgaaggacagtcagggttcagctgacaggagtggaccgccaccagttttacgagcacagcccaaatctaaaccggaactcccagaaaacgctggtacatcaggagaaggaacttctgattccattcgtcttaaagggcccaacgcccatccaaccgaagtttctgaaaaggtattggctaaatcaaagcagcgtgccagagccagaaggagattggattttctgtcaaccccagtggagctcaaattgtgcactgctgcggcaagttgtcaaaggcctccccagaaaatggatcaaccgggtccagtggccgagaacatctctccgtcagatgcatgtcaagacatttcacagaatgttccaccagagcgtgcggatgccatcacaccgctggctgctagtaaccaccattcaccagcgacaccagttgatccattctctctcgaaatgcatgaggcgaacgcatcagatcttctggacatgtcctactgtgatggcttgataatcgattctcctcgtgatccacatgacggtagcctcatgtagaagaaaaagttaccaacgcaaaatgacacttttaatagcaagagacgatggactgtcttcctgaaatccagcaactccctgtataaaaatcgtgttgcatgttggatggaacttgtatcttgtcttggcaaaaataattgcattgctgttctgttaatgcccctaactggtttggagagcatttttcttttgcaggtttgaagagcattttgaggggtgttgtaggtcaaattgaacaccatactcgaatgactcgtgttgttggtaactgaatcaataaaatatatgcatgtaaaaattcataatgttcatgtgctagaagccac

SEQ ID NO: 50032 - DNA, 2623 bp, Zea Mays
cggaacagttggcgcgtgagcgagtttcttaactcctcgccattggaatcggagtcgtgtattctctcacaccatcctgctcctgctcctgctcctgctcccttcccatccggtctccctttcttttcgcggcctcgcctcgcctcgcctcgcctcgccggcggcctggtggtcgcggtctcgctccagcaccgataaagcccacctcgagttctgctctgctccaccccccggcttcagccgcagcttgtggtggaatcggagcttcttatccgagagcagacatggagcagagtagtgatgggttgccaatcagccagcggagggctaacagttcaacaaaacactcaagcaagtcagatgaggttgctgaagacatgttgcagagtaatataccacatgaaactgtgagactgtgccaaggtgtggaatcagaagagatagagggacctcctcacaagaaaattgtccagaacttcacggagagcagtagttccaaaaataaaaaacacagatggtcatcagaggaagatgaggcactaaagcaaatggtaaaaaaatatgggacgaaaaactggcgaactattgcatgtgctatacctggccgaaatgccaactcatgcctttcaagatggaagtaccttctagacccagcaataaacaaagagccttggtcgcaacaggaggaactaagattgatccgtgcgcagcaagtttatggaaacaaatggtgtaaaatggtcaaacatttcccagggaggacaaatgatgcactcaaagaacattggagaagtcctatgaaaagaaaactggattcatatttggcctcaggattgctcgaacatgttccagacctgcaagatgatgtatcatttccacagacacagaacaatcaatcagatattccaaaggactgcaaagctgcatctgatagaaatagattttcatcacgtttatcaacagaccccaaacttaaacaagagctcacagaactggatgaaaatggtaatacatcagcaagaaaaagctctgacttattctatgctaaagcacctgatacccattcagccaaaatctcagaaatgagaatggccaaatcacagcagtgtgcaggaacaagaaagaagctggcttttctgtcaactccagtggagctcaagagtgttgtaccgcatgaaaccaccaaacattgccaagatatggaaccagaaaagacagagggcccactgtgcaagagaaattcccactgcatcaaggatggaagtagtttgaaaattcccgaaagtaccaaaggcaaatggttagcagaggaaaatgaaattctcattaaaatggttaccaaacatgggaaaaactggcaaactgtagcatttgctatacctggccgagaagcaaaacaatgccaaatcagactgcattcaaatgttcattagaactgcatgccttttcttcactttgtgctgatgggccttccatatagatggacacgcagtcttgacccagcaataaagaaacaggattggtcagaacaggaggatctaaaattgattcgagctcatcaaatatatggaagtcagtggcttaaaatggtcaaacatttccctgggaggacaaatcatgcactcaaagaacactggagaaatcgtatcaaaggaaaactgaatttttatttagcctcaggattgctagaacaagttccggacctggaagaaggtggtatatcagttccagagagcagtcagtcagaaattccgaaggacagtcagggttcagctgacaggagtggaccgccaccagttttacgagcacagcccaaatctaaaccggaactcccagaaaacgctggtacatcaggagaaggaacttctgattccattcgtcttaaagggcccaacgcccatccaaccgaagtttctgaaaaggtattggctaaatcaaagcagcgtgccagagccagaaggagattggattttctgtcaaccccagtggagctcaaattgtgcactgctgcggcaagttgtcaaaggcctccccagaaaatggatcaaccgggtccagtggccgagaacatctctccgtcagatgcatgtcaagacatttcacagaatgttccaccagagcgtgcggatgccatcacaccgctggctgctagtaaccaccattcaccagcgacaccagttgatccattctctctcgaaatgcatgaggcgaacgcatcagatcttctggacatgtcctactgtgatggcttgataatcgattctcctcgtgatccacatgacggtagcctcatgtagaagaaaaagttaccaacgcaaaatgacacttttaatagcaagagacgatggactgtcttcctgaaatccagcaactccctgtataaaaatcgtgttgcatgttggatggaacttgtatcttgtcttggcaaaaataattgcattgctgttctgttaatgcccctaactggtttggagagcatttttcttttgcaggtttgaagagcattttgaggggtgttgtaggtcaaattgaacaccatactcgaatgactcgtgttgttggtaactgaatcaataaaatatatgcatgtaaaaattcataatgttcatgtgctagaagccac

SEQ ID NO: 50033 - DNA, 2407 bp, Zea Mays
cggaacagttggcgcgtgagcgagtttcttaactcctcgccattggaatcggagtcgtgtattctctcacaccatcctgctcctgctcctgctcctgctcccttcccatccggtctccctttcttttcgcggcctcgcctcgcctcgcctcgcctcgccggcggcctggtggtcgcggtctcgctccagcaccgataaagcccacctcgagttctgctctgctccaccccccggcttcagccgcagcttgtggtggaatcggagcttcttatccgagagcagacatggagcagagtagtgatgggttgccaatcagccagcggagggctaacagttcaacaaaacactcaagcaagtcagatgaggttgctgaagacatggaagatgaggcactaaagcaaatggtaaaaaaatatgggacgaaaaactggcgaactattgcatgtgctatacctggccgaaatgccaactcatgcctttcaagatggaagtaccttctagacccagcaataaacaaagagccttggtcgcaacaggaggaactaagattgatccgtgcgcagcaagtttatggaaacaaatggtgtaaaatggtcaaacatttcccagggaggacaaatgatgcactcaaagaacattggagaagtcctatgaaaagaaaactggattcatatttggcctcaggattgctcgaacatgttccagacctgcaagatgatgtatcatttccacagacacagaacaatcaatcagatattccaaaggactgcaaagctgcatctgatagaaatagattttcatcacgtttatcaacagaccccaaacttaaacaagagctcacagaactggatgaaaatggtaatacatcagcaagaaaaagctctgacttattctatgctaaagcacctgatacccattcagccaaaatctcagaaatgagaatggccaaatcacagcagtgtgcaggaacaagaaagaagctggcttttctgtcaactccagtggagctcaagagtgttgtaccgcatgaaaccaccaaacattgccaagatatggaaccagaaaagacagagggcccactgtgcaagagaaattcccactgcatcaaggatggaagtagtttgaaaattcccgaaagtaccaaaggcaaatggttagcagaggaaaatgaaattctcattaaaatggttaccaaacatgggaaaaactggcaaactgtagcatttgctatacctggccgagaagcaaaacaatgccaaatcagatggacacgcagtcttgacccagcaataaagaaacaggattggtcagaacaggaggatctaaaattgattcgagctcatcaaatatatggaagtcagtggcttaaaatggtcaaacatttccctgggaggacaaatcatgcactcaaagaacactggagaaatcgtatcaaaggaaaactgaatttttatttagcctcaggattgctagaacaagttccggacctggaagaaggtggtatatcagttccagagagcagtcagtcagaaattccgaaggacagtcagggttcagctgacaggagtggaccgccaccagttttacgagcacagcccaaatctaaaccggaactcccagaaaacgctggtacatcaggagaaggaacttctgattccattcgtcttaaagggcccaacgcccatccaaccgaagtttctgaaaaggtattggctaaatcaaagcagcgtgccagagccagaaggagattggattttctgtcaaccccagtggagctcaaattgtgcactgctgcggcaagttgtcaaaggcctccccagaaaatggatcaaccgggtccagtggccgagaacatctctccgtcagatgcatgtcaagacatttcacagaatgttccaccagagcgtgcggatgccatcacaccgctggctgctagtaaccaccattcaccagcgacaccagttgatccattctctctcgaaatgcatgaggcgaacgcatcagatcttctggacatgtcctactgtgatggcttgataatcgattctcctcgtgatccacatgacggtagcctcatgtagaagaaaaagttaccaacgcaaaatgacacttttaatagcaagagacgatggactgtcttcctgaaatccagcaactccctgtataaaaatcgtgttgcatgttggatggaacttgtatcttgtcttggcaaaaataattgcattgctgttctgttaatgcccctaactggtttggagagcatttttcttttgcaggtttgaagagcattttgaggggtgttgtaggtcaaattgaacaccatactcgaatgactcgtgttgttggtaactgaatcaataaaatatatgcatgtaaaaattcataatgttcatgtgctagaagccac

SEQ ID NO: 50034 - DNA, 2668 bp, Zea Mays
cggaacagttggcgcgtgagcgagtttcttaactcctcgccattggaatcggagtcgtgtattctctcacaccatcctgctcctgctcctgctcctgctcccttcccatccggtctccctttcttttcgcggcctcgcctcgcctcgcctcgcctcgccggcggcctggtggtcgcggtctcgctccagcaccgataaagcccacctcgagttctgctctgctccaccccccggcttcagccgcagcttgtggtggaatcggagcttcttatccgagagcagacatggagcagagtagtgatgggttgccaatcagccagcggagggctaacagttcaacaaaacactcaagcaagtcagatgaggttgctgaagacatgttgcagagtaatataccacatgaaactgtgagactgtgccaaggtgtggaatcagaagagatagagggacctcctcacaagaaaattgtccagaacttcacggagagcagtagttccaaaaataaaaaacacagatggtcatcagaggaagatgaggcactaaagcaaatggtaaaaaaatatgggacgaaaaactggcgaactattgcatgtgctatacctggccgaaatgccaactcatgcctttcaagatggaagtaccttctagacccagcaataaacaaagagccttggtcgcaacaggaggaactaagattgatccgtgcgcagcaagtttatggaaacaaatggtgtaaaatggtcaaacatttcccagggaggacaaatgatgcactcaaagaacattggagaagtcctatgaaaagaaaactggattcatatttggcctcaggattgctcgaacatgttccagacctgcaagatgatgtatcatttccacagacacagaacaatcaatcagatattccaaaggactgcaaagctgcatctgatagaaatagattttcatcacgtttatcaacagaccccaaacttaaacaagagctcacagaactggatgaaaatggtaatacatcagcaagaaaaagctctgacttattctatgctaaagcacctgatacccattcagccaaaatctcagaaatgagaatggccaaatcacagcagtgtgcaggaacaagaaagaagctggcttttctgtcaactccagtggagctcaagagtgttgtaccgcatgaaaccaccaaacattgccaagatatggaaccagaaaagacagctatatgattatacctgggccaattccaagccatatttctttcacacactgctggagggcccactgtgcaagagaaattcccactgcatcaaggatggaagtagtttgaaaattcccgaaagtaccaaaggcaaatggaagatgaaattctcattaaaatggttaccaaacatgggaaaaactggcaaactgtagcatttgctatacctggccgagaagcaaaacaatgccaaatcagactgcattcaaatgttcattagaactgcatgccttttcttcactttgtgctgatgggccttccatatagatggacacgcagtcttgacccagcaataaagaaacaggattggtcagaacaggaggatctaaaattgattcgagctcatcaaatatatggaagtcagtggcttaaaatggtcaaacatttccctgggaggacaaatcatgcactcaaagaacactggagaaatcgtatcaaaggaaaactgaatttttatttagcctcaggattgctagaacaagttccggacctggaagaaggtggtatatcagttccagagagcagtcagtcagaaattccgaaggacagtcagggttcagctgacaggagtggaccgccaccagttttacgagcacagcccaaatctaaaccggaactcccagaaaacgctggtacatcaggagaaggaacttctgattccattcgtcttaaagggcccaacgcccatccaaccgaagtttctgaaaaggtattggctaaatcaaagcagcgtgccagagccagaaggagattggattttctgtcaaccccagtggagctcaaattgtgcactgctgcggcaagttgtcaaaggcctccccagaaaatggatcaaccgggtccagtggccgagaacatctctccgtcagatgcatgtcaagacatttcacagaatgttccaccagagcgtgcggatgccatcacaccgctggctgctagtaaccaccattcaccagcgacaccagttgatccattctctctcgaaatgcatgaggcgaacgcatcagatcttctggacatgtcctactgtgatggcttgataatcgattctcctcgtgatccacatgacggtagcctcatgtagaagaaaaagttaccaacgcaaaatgacacttttaatagcaagagacgatggactgtcttcctgaaatccagcaactccctgtataaaaatcgtgttgcatgttggatggaacttgtatcttgtcttggcaaaaataattgcattgctgttctgttaatgcccctaactggtttggagagcatttttcttttgcaggtttgaagagcattttgaggggtgttgtaggtcaaattgaacaccatactcgaatgactcgtgttgttggtaactgaatcaataaaatatatgcatgtaaaaattcataatgttcatgtgctagaagccac

SEQ ID NO: 50035 - DNA, 2596 bp, Zea Mays
cggaacagttggcgcgtgagcgagtttcttaactcctcgccattggaatcggagtcgtgtattctctcacaccatcctgctcctgctcctgctcctgctcccttcccatccggtctccctttcttttcgcggcctcgcctcgcctcgcctcgcctcgccggcggcctggtggtcgcggtctcgctccagcaccgataaagcccacctcgagttctgctctgctccaccccccggcttcagccgcagcttgtggtggaatcggagcttcttatccgagagcagacatggagcagagtagtgatgggttgccaatcagccagcggagggctaacagttcaacaaaacactcaagcaagtcagatgaggttgctgaagacatgttgcagagtaatataccacatgaaactgtgagactgtgccaaggtgtggaatcagaagagatagagggacctcctcacaagaaaattgtccagaacttcacggagagcagtagttccaaaaataaaaaacacagatggtcatcagaggaagatgaggcactaaagcaaatggtaaaaaaatatgggacgaaaaactggcgaactattgcatgtgctatacctggccgaaatgccaactcatgcctttcaagatggaagtaccttctagacccagcaataaacaaagagccttggtcgcaacaggaggaactaagattgatccgtgcgcagcaagtttatggaaacaaatggtgtaaaatggtcaaacatttcccagggaggacaaatgatgcactcaaagaacattggagaagtcctatgaaaagaaaactggattcatatttggcctcaggattgctcgaacatgttccagacctgcaagatgatgtatcatttccacagacacagaacaatcaatcagatattccaaaggactgcaaagctgcatctgatagaaatagattttcatcacgtttatcaacagaccccaaacttaaacaagagctcacagaactggatgaaaatgaaatgagaatggccaaatcacagcagtgtgcaggaacaagaaagaagctggcttttctgtcaactccagtggagctcaagagtgttgtaccgcatgaaaccaccaaacattgccaagatatggaaccagaaaagacagctatatgattatacctgggccaattccaagccatatttctttcacacactgctgggtactttgtagcataatagtttgcatatgatctcttcttgcatcattatgattttattgctgagggcccactgtgcaagagaaattcccactgcatcaaggatggaagtagtttgaaaattcccgaaagtaccaaaggcaaatggttagcagaggaaaatgaaattctcattaaaatggttaccaaacatgggaaaaactggcaaactgtagcatttgctatacctggccgagaagcaaaacaatgccaaatcagatggacacgcagtcttgacccagcaataaagaaacaggattggtcagaacaggaggatctaaaattgattcgagctcatcaaatatatggaagtcagtggcttaaaatggtcaaacatttccctgggaggacaaatcatgcactcaaagaacactggagaaatcgtatcaaaggaaaactgaatttttatttagcctcaggattgctagaacaagttccggacctggaagaaggtggtatatcagttccagagagcagtcagtcagaaattccgaaggacagtcagggttcagctgacaggagtggaccgccaccagttttacgagcacagcccaaatctaaaccggaactcccagaaaacgctggtacatcaggagaaggaacttctgattccattcgtcttaaagggcccaacgcccatccaaccgaagtttctgaaaaggtattggctaaatcaaagcagcgtgccagagccagaaggagattggattttctgtcaaccccagtggagctcaaattgtgcactgctgcggcaagttgtcaaaggcctccccagaaaatggatcaaccgggtccagtggccgagaacatctctccgtcagatgcatgtcaagacatttcacagaatgttccaccagagcgtgcggatgccatcacaccgctggctgctagtaaccaccattcaccagcgacaccagttgatccattctctctcgaaatgcatgaggcgaacgcatcagatcttctggacatgtcctactgtgatggcttgataatcgattctcctcgtgatccacatgacggtagcctcatgtagaagaaaaagttaccaacgcaaaatgacacttttaatagcaagagacgatggactgtcttcctgaaatccagcaactccctgtataaaaatcgtgttgcatgttggatggaacttgtatcttgtcttggcaaaaataattgcattgctgttctgttaatgcccctaactggtttggagagcatttttcttttgcaggtttgaagagcattttgaggggtgttgtaggtcaaattgaacaccatactcgaatgactcgtgttgttggtaactgaatcaataaaatatatgcatgtaaaaattcataatgttcatgtgctagaagccac

SEQ ID NO: 50036 - DNA, 2524 bp, Zea Mays
cggaacagttggcgcgtgagcgagtttcttaactcctcgccattggaatcggagtcgtgtattctctcacaccatcctgctcctgctcctgctcctgctcccttcccatccggtctccctttcttttcgcggcctcgcctcgcctcgcctcgcctcgccggcggcctggtggtcgcggtctcgctccagcaccgataaagcccacctcgagttctgctctgctccaccccccggcttcagccgcagcttgtggtggaatcggagcttcttatccgagagcagacatggagcagagtagtgatgggttgccaatcagccagcggagggctaacagttcaacaaaacactcaagcaagtcagatgaggttgctgaagacatgttgcagagtaatataccacatgaaactgtgagactgtgccaaggtgtggaatcagaagagatagagggacctcctcacaagaaaattgtccagaacttcacggagagcagtagttccaaaaataaaaaacacagatggtcatcagaggaagatgaggcactaaagcaaatggtaaaaaaatatgggacgaaaaactggcgaactattgcatgtgctatacctggccgaaatgccaactcatgcctttcaagatggaagtaccttctagacccagcaataaacaaagagccttggtcgcaacaggaggaactaagattgatccgtgcgcagcaagtttatggaaacaaatggtgtaaaatggtcaaacatttcccagggaggacaaatgatgcactcaaagaacattggagaagtcctatgaaaagaaaactggattcatatttggcctcaggattgctcgaacatgttccagacctgcaagatgatgtatcatttccacagacacagaacaatcaatcagatattccaaaggactgcaaagctgcatctgatagaaatagattttcatcacgtttatcaacagaccccaaacttaaacaagagctcacagaactggatgaaaatgaaatgagaatggccaaatcacagcagtgtgcaggaacaagaaagaagctggcttttctgtcaactccagtggagctcaagagtgttgtaccgcatgaaaccaccaaacattgccaagatatggaaccagaaaagacagctatatgattatacctgggccaattccaagccatatttctttcacacactgctggagggcccactgtgcaagagaaattcccactgcatcaaggatggaagtagtttgaaaattcccgaaagtaccaaaggcaaatggaagatgaaattctcattaaaatggttaccaaacatgggaaaaactggcaaactgtagcatttgctatacctggccgagaagcaaaacaatgccaaatcagatggacacgcagtcttgacccagcaataaagaaacaggattggtcagaacaggaggatctaaaattgattcgagctcatcaaatatatggaagtcagtggcttaaaatggtcaaacatttccctgggaggacaaatcatgcactcaaagaacactggagaaatcgtatcaaaggaaaactgaatttttatttagcctcaggattgctagaacaagttccggacctggaagaaggtggtatatcagttccagagagcagtcagtcagaaattccgaaggacagtcagggttcagctgacaggagtggaccgccaccagttttacgagcacagcccaaatctaaaccggaactcccagaaaacgctggtacatcaggagaaggaacttctgattccattcgtcttaaagggcccaacgcccatccaaccgaagtttctgaaaaggtattggctaaatcaaagcagcgtgccagagccagaaggagattggattttctgtcaaccccagtggagctcaaattgtgcactgctgcggcaagttgtcaaaggcctccccagaaaatggatcaaccgggtccagtggccgagaacatctctccgtcagatgcatgtcaagacatttcacagaatgttccaccagagcgtgcggatgccatcacaccgctggctgctagtaaccaccattcaccagcgacaccagttgatccattctctctcgaaatgcatgaggcgaacgcatcagatcttctggacatgtcctactgtgatggcttgataatcgattctcctcgtgatccacatgacggtagcctcatgtagaagaaaaagttaccaacgcaaaatgacacttttaatagcaagagacgatggactgtcttcctgaaatccagcaactccctgtataaaaatcgtgttgcatgttggatggaacttgtatcttgtcttggcaaaaataattgcattgctgttctgttaatgcccctaactggtttggagagcatttttcttttgcaggtttgaagagcattttgaggggtgttgtaggtcaaattgaacaccatactcgaatgactcgtgttgttggtaactgaatcaataaaatatatgcatgtaaaaattcataatgttcatgtgctagaagccac

SEQ ID NO: 50037 - DNA, 2534 bp, Zea Mays
cggaacagttggcgcgtgagcgagtttcttaactcctcgccattggaatcggagtcgtgtattctctcacaccatcctgctcctgctcctgctcctgctcccttcccatccggtctccctttcttttcgcggcctcgcctcgcctcgcctcgcctcgccggcggcctggtggtcgcggtctcgctccagcaccgataaagcccacctcgagttctgctctgctccaccccccggcttcagccgcagcttgtggtggaatcggagcttcttatccgagagcagacatggagcagagtagtgatgggttgccaatcagccagcggagggctaacagttcaacaaaacactcaagcaagtcagatgaggttgctgaagacatgttgcagagtaatataccacatgaaactgtgagactgtgccaaggtgtggaatcagaagagatagagggacctcctcacaagaaaattgtccagaacttcacggagagcagtagttccaaaaataaaaaacacagatggtcatcagaggaagatgaggcactaaagcaaatggtaaaaaaatatgggacgaaaaactggcgaactattgcatgtgctatacctggccgaaatgccaactcatgcctttcaagatggaagtaccttctagacccagcaataaacaaagagccttggtcgcaacaggaggaactaagattgatccgtgcgcagcaagtttatggaaacaaatggtgtaaaatggtcaaacatttcccagggaggacaaatgatgcactcaaagaacattggagaagtcctatgaaaagaaaactggattcatatttggcctcaggattgctcgaacatgttccagacctgcaagatgatgtatcatttccacagacacagaacaatcaatcagatattccaaaggactgcaaagctgcatctgatagaaatagattttcatcacgtttatcaacagaccccaaacttaaacaagagctcacagaactggatgaaaatgaaatgagaatggccaaatcacagcagtgtgcaggaacaagaaagaagctggcttttctgtcaactccagtggagctcaagagtgttgtaccgcatgaaaccaccaaacattgccaagatatggaaccagaaaagacagctatatgattatacctgggccaattccaagccatatttctttcacacactgctggagggcccactgtgcaagagaaattcccactgcatcaaggatggaagtagtttgaaaattcccgaaagtaccaaaggcaaatggttagcagaggaaaatgaaattctcattaaaatggttaccaaacatgggaaaaactggcaaactgtagcatttgctatacctggccgagaagcaaaacaatgccaaatcagatggacacgcagtcttgacccagcaataaagaaacaggattggtcagaacaggaggatctaaaattgattcgagctcatcaaatatatggaagtcagtggcttaaaatggtcaaacatttccctgggaggacaaatcatgcactcaaagaacactggagaaatcgtatcaaaggaaaactgaatttttatttagcctcaggattgctagaacaagttccggacctggaagaaggtggtatatcagttccagagagcagtcagtcagaaattccgaaggacagtcagggttcagctgacaggagtggaccgccaccagttttacgagcacagcccaaatctaaaccggaactcccagaaaacgctggtacatcaggagaaggaacttctgattccattcgtcttaaagggcccaacgcccatccaaccgaagtttctgaaaaggtattggctaaatcaaagcagcgtgccagagccagaaggagattggattttctgtcaaccccagtggagctcaaattgtgcactgctgcggcaagttgtcaaaggcctccccagaaaatggatcaaccgggtccagtggccgagaacatctctccgtcagatgcatgtcaagacatttcacagaatgttccaccagagcgtgcggatgccatcacaccgctggctgctagtaaccaccattcaccagcgacaccagttgatccattctctctcgaaatgcatgaggcgaacgcatcagatcttctggacatgtcctactgtgatggcttgataatcgattctcctcgtgatccacatgacggtagcctcatgtagaagaaaaagttaccaacgcaaaatgacacttttaatagcaagagacgatggactgtcttcctgaaatccagcaactccctgtataaaaatcgtgttgcatgttggatggaacttgtatcttgtcttggcaaaaataattgcattgctgttctgttaatgcccctaactggtttggagagcatttttcttttgcaggtttgaagagcattttgaggggtgttgtaggtcaaattgaacaccatactcgaatgactcgtgttgttggtaactgaatcaataaaatatatgcatgtaaaaattcataatgttcatgtgctagaagccac

SEQ ID NO: 50038 - DNA, 2796 bp, Zea Mays
cggaatgcagatccgccaggacctggattgattccttcttctgtgatcaatcaaaagcttcagccgcagcttgtggtggaatcggagcttcttatccgagagcagacatggagcagagtagtgatgggttgccaatcagccagcggagggctaacagttcaacaaaacactcaagcaagtcagatgaggttgctgaagacatgttgcagagtaatataccacatgaaactgtgagactgtgccaaggtgtggaatcagaagagatagagggacctcctcacaagaaaattgtccagaacttcacggagagcagtagttccaaaaataaaaaacacagatggtcatcagaggaagatgaggcactaaagcaaatggtaaaaaaatatgggacgaaaaactggcgaactattgcatgtgctatacctggccgaaatgccaactcatgcctttcaagatggaagtaccttctagacccagcaataaacaaagagccttggtcgcaacaggaggaactaagattgatccgtgcgcagcaagtttatggaaacaaatggtgtaaaatggtcaaacatttcccagggaggacaaatgatgcactcaaagaacattggagaagtcctatgaaaagaaaactggattcatatttggcctcaggattgctcgaacatgttccagacctgcaagatgatgtatcatttccacagacacagaacaatcaatcagatattccaaaggactgcaaagctgcatctgatagaaatagattttcatcacgtttatcaacagaccccaaacttaaacaagagctcacagaactggatgaaaatgaaatgagaatggccaaatcacagcagtgtgcaggaacaagaaagaagctggcttttctgtcaactccagtggagctcaagagtgttgtaccgcatgaaaccaccaaacattgccaagatatggaaccagaaaagacaggtagaagttagaatgcaccttcatttttagtagtactaaagtagttggagttccatttattgaagaagattcagctattcctgcttatgtatacaagtttgactttactataaggtgcatctatctagtggaagatactacctccagtcacatacacacaaatgctacctaacactctctttctcgatttcagcataaaatgcttcgtcaaagttgaatgcgatttcccaagtttaactattcttttttatgcagctatatgattatacctgggccaattccaagccatatttctttcacacactgctgggtactttgtagcataatagtttgcatatgatctcttcttgcatcattatgattttattgctggtacatatacctcatggtcagctttcatatataactatcataactatcatctcttgtgttggttaaattttattgttatattcacatcgtggaatgtaagtgtatgtatttagttttttttatatcaagcagagggcccactgtgcaagagaaattcccactgcatcaaggatggaagtagtttgaaaattcccgaaagtaccaaaggcaaatggaagatgaaattctcattaaaatggttaccaaacatgggaaaaactggcaaactgtagcatttgctatacctggccgagaagcaaaacaatgccaaatcagatggacacgcagtcttgacccagcaataaagaaacaggattggtcagaacaggaggatctaaaattgattcgagctcatcaaatatatggaagtcagtggcttaaaatggtcaaacatttccctgggaggacaaatcatgcactcaaagaacactggagaaatcgtatcaaaggaaaactgaatttttatttagcctcaggattgctagaacaagttccggacctggaagaaggtggtatatcagttccagagagcagtcagtcagaaattccgaaggacagtcagggttcagctgacaggagtggaccgccaccagttttacgagcacagcccaaatctaaaccggaactcccagaaaacgctggtacatcaggagaaggaacttctgattccattcgtcttaaagggcccaacgcccatccaaccgaagtttctgaaaaggtattggctaaatcaaagcagcgtgccagagccagaaggagattggattttctgtcaaccccagtggagctcaaattgtgcactgctgcggcaagttgtcaaaggcctccccagaaaatggatcaaccgggtccagtggccgagaacatctctccgtcagatgcatgtcaagacatttcacagaatgttccaccagagcgtgcggatgccatcacaccgctggctgctagtaaccaccattcaccagcgacaccagttgatccattctctctcgaaatgcatgaggcgaacgcatcagatcttctggacatgtcctactgtgatggcttgataatcgattctcctcgtgatccacatgacggtagcctcatgtagaagaaaaagttaccaacgcaaaatgacacttttaatagcaagagacgatggactgtcttcctgaaatccagcaactccctgtataaaaatcgtgttgcatgttggatggaacttgtatcttgtcttggcaaaaataattgcattgctgttctgttaatgcccctaactggtttggagagcatttttcttttgcaggtttgaagagcattttgaggggtgttgtaggtcaaattgaacaccatactcgaatgactcgtgttgttggtaactgaatcaataaaatatatgcatgtaaaaattcataatgttcatgtgctagaagccac

SEQ ID NO: 50039 - DNA, 2935 bp, Zea Mays
ggattgattccttcttctgtgatcaatcaaaagcttcagccgcagcttgtggtggaatcggagcttcttatccgagagcagacatggagcagagtagtgatgggttgccaatcagccagcggagggctaacagttcaacaaaacactcaagcaagtcagatgaggttgctgaagacatgttgcagagtaatataccacatgaaactgtgagactgtgccaaggtgtggaatcagaagagatagagggacctcctcacaagaaaattgtccagaacttcacggagagcagtagttccaaaaataaaaaacacagatggtcatcagaggaaagttgtttagactataatatttatcattcacattgtattttatacttattcaaaatagaaacaaattaattttccttccaggaagatgaggcactaaagcaaatggtaaaaaaatatgggacgaaaaactggcgaactattgcatgtgctatacctggccgaaatgccaactcatgcctttcaagatggaagtaccttctagacccagcaataaacaaagagccttggtcgcaacaggaggaactaagattgatccgtgcgcagcaagtttatggaaacaaatggtgtaaaatggtcaaacatttcccagggaggacaaatgatgcactcaaagaacattggagaagtcctatgaaaagaaaactggattcatatttggcctcaggattgctcgaacatgttccagacctgcaagatgatgtatcatttccacagacacagaacaatcaatcagatattccaaaggactgcaaagctgcatctgatagaaatagattttcatcacgtttatcaacagaccccaaacttaaacaagagctcacagaactggatgaaaatgaaatgagaatggccaaatcacagcagtgtgcaggaacaagaaagaagctggcttttctgtcaactccagtggagctcaagagtgttgtaccgcatgaaaccaccaaacattgccaagatatggaaccagaaaagacaggtagaagttagaatgcaccttcatttttagtagtactaaagtagttggagttccatttattgaagaagattcagctattcctgcttatgtatacaagtttgactttactataaggtgcatctatctagtggaagatactacctccagtcacatacacacaaatgctacctaacactctctttctcgatttcagcataaaatgcttcgtcaaagttgaatgcgatttcccaagtttaactattcttttttatgcagctatatgattatacctgggccaattccaagccatatttctttcacacactgctgggtactttgtagcataatagtttgcatatgatctcttcttgcatcattatgattttattgctggtacatatacctcatggtcagctttcatatataactatcataactatcatctcttgtgttggttaaattttattgttatattcacatcgtggaatgtaagtgtatgtatttagttttttttatatcaagcagagggcccactgtgcaagagaaattcccactgcatcaaggatggaagtagtttgaaaattcccgaaagtaccaaaggcaaatggttagcagaggaaaatgaaattctcattaaaatggttaccaaacatgggaaaaactggcaaactgtagcatttgctatacctggccgagaagcaaaacaatgccaaatcagactgcattcaaatgttcattagaactgcatgccttttcttcactttgtgctgatgggccttccatatagatggacacgcagtcttgacccagcaataaagaaacaggattggtcagaacaggaggatctaaaattgattcgagctcatcaaatatatggaagtcagtggcttaaaatggtcaaacatttccctgggaggacaaatcatgcactcaaagaacactggagaaatcgtatcaaaggaaaactgaatttttatttagcctcaggattgctagaacaagttccggacctggaagaaggtggtatatcagttccagagagcagtcagtcagaaattccgaaggacagtcagggttcagctgacaggagtggaccgccaccagttttacgagcacagcccaaatctaaaccggaactcccagaaaacgctggtacatcaggagaaggaacttctgattccattcgtcttaaagggcccaacgcccatccaaccgaagtttctgaaaaggtattggctaaatcaaagcagcgtgccagagccagaaggagattggattttctgtcaaccccagtggagctcaaattgtgcactgctgcggcaagttgtcaaaggcctccccagaaaatggatcaaccgggtccagtggccgagaacatctctccgtcagatgcatgtcaagacatttcacagaatgttccaccagagcgtgcggatgccatcacaccgctggctgctagtaaccaccattcaccagcgacaccagttgatccattctctctcgaaatgcatgaggcgaacgcatcagatcttctggacatgtcctactgtgatggcttgataatcgattctcctcgtgatccacatgacggtagcctcatgtagaagaaaaagttaccaacgcaaaatgacacttttaatagcaagagacgatggactgtcttcctgaaatccagcaactccctgtataaaaatcgtgttgcatgttggatggaacttgtatcttgtcttggcaaaaataattgcattgctgttctgttaatgcccctaactggtttggagagcatttttcttttgcaggtttgaagagcattttgaggggtgttgtaggtcaaattgaacaccatactcgaatgactcgtgttgttggtaactgaatcaataaaatatatgcatgtaaaaattcataatgttcatgtgctagaagccac

SEQ ID NO: 50040 - DNA, 2274 bp, Zea Mays
tgattccttcttctgtgatcaatcaaaagcttcagccgcagcttgtggtggaatcggagcttcttatccgagagcagacatggagcagagtagtgatgggttgccaatcagccagcggagggctaacagttcaacaaaacactcaagcaagtcagatgaggttgctgaagacatgttgcagagtaatataccacatgaaactgtgagactgtgccaaggtgtggaatcagaagagatagagggacctcctcacaagaaaattgtccagaacttcacggagagcagtagttccaaaaataaaaaacacagatggtcatcagaggaagatgaggcactaaagcaaatggtaaaaaaatatgggacgaaaaactggcgaactattgcatgtgctatacctggccgaaatgccaactcatgcctttcaagatggaagtaccttctagacccagcaataaacaaagagccttggtcgcaacaggaggaactaagattgatccgtgcgcagcaagtttatggaaacaaatggtgtaaaatggtcaaacatttcccagggaggacaaatgatgcactcaaagaacattggagaagtcctatgaaaagaaaactggattcatatttggcctcaggattgctcgaacatgttccagacctgcaagatgatgtatcatttccacagacacagaacaatcaatcagatattccaaaggactgcaaagctgcatctgatagaaatagattttcatcacgtttatcaacagaccccaaacttaaacaagagctcacagaactggatgaaaatgaaatgagaatggccaaatcacagcagtgtgcaggaacaagaaagaagctggcttttctgtcaactccagtggagctcaagagtgttgtaccgcatgaaaccaccaaacattgccaagatatggaaccagaaaagacagagggcccactgtgcaagagaaattcccactgcatcaaggatggaagtagtttgaaaattcccgaaagtaccaaaggcaaatggttagcagaggaaaatgaaattctcattaaaatggttaccaaacatgggaaaaactggcaaactgtagcatttgctatacctggccgagaagcaaaacaatgccaaatcagatggacacgcagtcttgacccagcaataaagaaacaggattggtcagaacaggaggatctaaaattgattcgagctcatcaaatatatggaagtcagtggcttaaaatggtcaaacatttccctgggaggacaaatcatgcactcaaagaacactggagaaatcgtatcaaaggaaaactgaatttttatttagcctcaggattgctagaacaagttccggacctggaagaaggtggtatatcagttccagagagcagtcagtcagaaattccgaaggacagtcagggttcagctgacaggagtggaccgccaccagttttacgagcacagcccaaatctaaaccggaactcccagaaaacgctggtacatcaggagaaggaacttctgattccattcgtcttaaagggcccaacgcccatccaaccgaagtttctgaaaaggtattggctaaatcaaagcagcgtgccagagccagaaggagattggattttctgtcaaccccagtggagctcaaattgtgcactgctgcggcaagttgtcaaaggcctccccagaaaatggatcaaccgggtccagtggccgagaacatctctccgtcagatgcatgtcaagacatttcacagaatgttccaccagagcgtgcggatgccatcacaccgctggctgctagtaaccaccattcaccagcgacaccagttgatccattctctctcgaaatgcatgaggcgaacgcatcagatcttctggacatgtcctactgtgatggcttgataatcgattctcctcgtgatccacatgacggtagcctcatgtagaagaaaaagttaccaacgcaaaatgacacttttaatagcaagagacgatggactgtcttcctgaaatccagcaactccctgtataaaaatcgtgttgcatgttggatggaacttgtatcttgtcttggcaaaaataattgcattgctgttctgttaatgcccctaactggtttggagagcatttttcttttgcaggtttgaagagcattttgaggggtgttgtaggtcaaattgaacaccatactcgaatgactcgtgttgttggtaactgaatcaataaaatatatgcatgtaaaaattcataatgttcatgtgctagaagccac

SEQ ID NO: 50041 - DNA, 2367 bp, Zea Mays
ttccttcttctgtgatcaatcaaaagcttcagccgcagcttgtggtggaatcggagcttcttatccgagagcagacatggagcagagtagtgatgggttgccaatcagccagcggagggctaacagttcaacaaaacactcaagcaagtcagatgaggttgctgaagacatgttgcagagtaatataccacatgaaactgtgagactgtgccaaggtgtggaatcagaagagatagagggacctcctcacaagaaaattgtccagaacttcacggagagcagtagttccaaaaataaaaaacacagatggtcatcagaggaaagttgtttagactataatatttatcattcacattgtattttatacttattcaaaatagaaacaaattaattttccttccaggaagatgaggcactaaagcaaatggtaaaaaaatatgggacgaaaaactggcgaactattgcatgtgctatacctggccgaaatgccaactcatgcctttcaagatggaagtaccttctagacccagcaataaacaaagagccttggtcgcaacaggaggaactaagattgatccgtgcgcagcaagtttatggaaacaaatggtgtaaaatggtcaaacatttcccagggaggacaaatgatgcactcaaagaacattggagaagtcctatgaaaagaaaactggattcatatttggcctcaggattgctcgaacatgttccagacctgcaagatgatgtatcatttccacagacacagaacaatcaatcagatattccaaaggactgcaaagctgcatctgatagaaatagattttcatcacgtttatcaacagaccccaaacttaaacaagagctcacagaactggatgaaaatgccaaaatctcagaaatgagaatggccaaatcacagcagtgtgcaggaacaagaaagaagctggcttttctgtcaactccagtggagctcaagagtgttgtaccgcatgaaaccaccaaacattgccaagatatggaaccagaaaagacagagggcccactgtgcaagagaaattcccactgcatcaaggatggaagtagtttgaaaattcccgaaagtaccaaaggcaaatggttagcagaggaaaatgaaattctcattaaaatggttaccaaacatgggaaaaactggcaaactgtagcatttgctatacctggccgagaagcaaaacaatgccaaatcagatggacacgcagtcttgacccagcaataaagaaacaggattggtcagaacaggaggatctaaaattgattcgagctcatcaaatatatggaagtcagtggcttaaaatggtcaaacatttccctgggaggacaaatcatgcactcaaagaacactggagaaatcgtatcaaaggaaaactgaatttttatttagcctcaggattgctagaacaagttccggacctggaagaaggtggtatatcagttccagagagcagtcagtcagaaattccgaaggacagtcagggttcagctgacaggagtggaccgccaccagttttacgagcacagcccaaatctaaaccggaactcccagaaaacgctggtacatcaggagaaggaacttctgattccattcgtcttaaagggcccaacgcccatccaaccgaagtttctgaaaaggtattggctaaatcaaagcagcgtgccagagccagaaggagattggattttctgtcaaccccagtggagctcaaattgtgcactgctgcggcaagttgtcaaaggcctccccagaaaatggatcaaccgggtccagtggccgagaacatctctccgtcagatgcatgtcaagacatttcacagaatgttccaccagagcgtgcggatgccatcacaccgctggctgctagtaaccaccattcaccagcgacaccagttgatccattctctctcgaaatgcatgaggcgaacgcatcagatcttctggacatgtcctactgtgatggcttgataatcgattctcctcgtgatccacatgacggtagcctcatgtagaagaaaaagttaccaacgcaaaatgacacttttaatagcaagagacgatggactgtcttcctgaaatccagcaactccctgtataaaaatcgtgttgcatgttggatggaacttgtatcttgtcttggcaaaaataattgcattgctgttctgttaatgcccctaactggtttggagagcatttttcttttgcaggtttgaagagcattttgaggggtgttgtaggtcaaattgaacaccatactcgaatgactcgtgttgttggtaactgaatcaataaaatatatgcatgtaaaaattcataatgttcatgtgctagaagccac

SEQ ID NO: 50042 - DNA, 2333 bp, Zea Mays
cttcttctgtgatcaatcaaaagcttcagccgcagcttgtggtggaatcggagcttcttatccgagagcagacatggagcagagtagtgatgggttgccaatcagccagcggagggctaacagttcaacaaaacactcaagcaagtcagatgaggttgctgaagacatgttgcagagtaatataccacatgaaactgtgagactgtgccaaggtgtggaatcagaagagatagagggacctcctcacaagaaaattgtccagaacttcacggagagcagtagttccaaaaataaaaaacacagatggtcatcagaggaagatgaggcactaaagcaaatggtaaaaaaatatgggacgaaaaactggcgaactattgcatgtgctatacctggccgaaatgccaactcatgcctttcaagatggaagtaccttctagacccagcaataaacaaagagccttggtcgcaacaggaggaactaagattgatccgtgcgcagcaagtttatggaaacaaatggtgtaaaatggtcaaacatttcccagggaggacaaatgatgcactcaaagaacattggagaagtcctatgaaaagaaaactggattcatatttggcctcaggattgctcgaacatgttccagacctgcaagatgatgtatcatttccacagacacagaacaatcaatcagatattccaaaggactgcaaagctgcatctgatagaaatagattttcatcacgtttatcaacagaccccaaacttaaacaagagctcacagaactggatgaaaatggtaatacatcagcaagaaaaagctctgacttattctatgctaaagcacctgatacccattcagccaaaatctcagaaatgagaatggccaaatcacagcagtgtgcaggaacaagaaagaagctggcttttctgtcaactccagtggagctcaagagtgttgtaccgcatgaaaccaccaaacattgccaagatatggaaccagaaaagacagagggcccactgtgcaagagaaattcccactgcatcaaggatggaagtagtttgaaaattcccgaaagtaccaaaggcaaatggaagatgaaattctcattaaaatggttaccaaacatgggaaaaactggcaaactgtagcatttgctatacctggccgagaagcaaaacaatgccaaatcagatggacacgcagtcttgacccagcaataaagaaacaggattggtcagaacaggaggatctaaaattgattcgagctcatcaaatatatggaagtcagtggcttaaaatggtcaaacatttccctgggaggacaaatcatgcactcaaagaacactggagaaatcgtatcaaaggaaaactgaatttttatttagcctcaggattgctagaacaagttccggacctggaagaaggtggtatatcagttccagagagcagtcagtcagaaattccgaaggacagtcagggttcagctgacaggagtggaccgccaccagttttacgagcacagcccaaatctaaaccggaactcccagaaaacgctggtacatcaggagaaggaacttctgattccattcgtcttaaagggcccaacgcccatccaaccgaagtttctgaaaaggtattggctaaatcaaagcagcgtgccagagccagaaggagattggattttctgtcaaccccagtggagctcaaattgtgcactgctgcggcaagttgtcaaaggcctccccagaaaatggatcaaccgggtccagtggccgagaacatctctccgtcagatgcatgtcaagacatttcacagaatgttccaccagagcgtgcggatgccatcacaccgctggctgctagtaaccaccattcaccagcgacaccagttgatccattctctctcgaaatgcatgaggcgaacgcatcagatcttctggacatgtcctactgtgatggcttgataatcgattctcctcgtgatccacatgacggtagcctcatgtagaagaaaaagttaccaacgcaaaatgacacttttaatagcaagagacgatggactgtcttcctgaaatccagcaactccctgtataaaaatcgtgttgcatgttggatggaacttgtatcttgtcttggcaaaaataattgcattgctgttctgttaatgcccctaactggtttggagagcatttttcttttgcaggtttgaagagcattttgaggggtgttgtaggtcaaattgaacaccatactcgaatgactcgtgttgttggtaactgaatcaataaaatatatgcatgtaaaaattcataatgttcatgtgctagaagccac

SEQ ID NO: 50043 - DNA, 2114 bp, Zea Mays
gtaaaggtcagctaagagttgcgcttaattccctcaagcggtacatatgccctgtaccatgttttcaggccttcactatcaagagggacctcctcacaagaaaattgtccagaacttcacggagagcagtagttccaaaaataaaaaacacagatggtcatcagaggaagatgaggcactaaagcaaatggtaaaaaaatatgggacgaaaaactggcgaactattgcatgtgctatacctggccgaaatgccaactcatgcctttcaagatggaagtaccttctagacccagcaataaacaaagagccttggtcgcaacaggaggaactaagattgatccgtgcgcagcaagtttatggaaacaaatggtgtaaaatggtcaaacatttcccagggaggacaaatgatgcactcaaagaacattggagaagtcctatgaaaagaaaactggattcatatttggcctcaggattgctcgaacatgttccagacctgcaagatgatgtatcatttccacagacacagaacaatcaatcagatattccaaaggactgcaaagctgcatctgatagaaatagattttcatcacgtttatcaacagaccccaaacttaaacaagagctcacagaactggatgaaaatgcagtgtgcaggaacaagaaagaagctggcttttctgtcaactccagtggagctcaagagtgttgtaccgcatgaaaccaccaaacattgccaagatatggaaccagaaaagacagttttttttatatcaagcagagggcccactgtgcaagagaaattcccactgcatcaaggatggaagtagtttgaaaattcccgaaagtaccaaaggcaaatggttagcagaggaaaatgaaattctcattaaaatggttaccaaacatgggaaaaactggcaaactgtagcatttgctatacctggccgagaagcaaaacaatgccaaatcagatggacacgcagtcttgacccagcaataaagaaacaggattggtcagaacaggaggatctaaaattgattcgagctcatcaaatatatggaagtcagtggcttaaaatggtcaaacatttccctgggaggacaaatcatgcactcaaagaacactggagaaatcgtatcaaaggaaaactgaatttttatttagcctcaggattgctagaacaagttccggacctggaagaaggtggtatatcagttccagagagcagtcagtcagaaattccgaaggacagtcagggttcagctgacaggagtggaccgccaccagttttacgagcacagcccaaatctaaaccggaactcccagaaaacgctggtacatcaggagaaggaacttctgattccattcgtcttaaagggcccaacgcccatccaaccgaagtttctgaaaaggtattggctaaatcaaagcagcgtgccagagccagaaggagattggattttctgtcaaccccagtggagctcaaattgtgcactgctgcggcaagttgtcaaaggcctccccagaaaatggatcaaccgggtccagtggccgagaacatctctccgtcagatgcatgtcaagacatttcacagaatgttccaccagagcgtgcggatgccatcacaccgctggctgctagtaaccaccattcaccagcgacaccagttgatccattctctctcgaaatgcatgaggcgaacgcatcagatcttctggacatgtcctactgtgatggcttgataatcgattctcctcgtgatccacatgacggtagcctcatgtagaagaaaaagttaccaacgcaaaatgacacttttaatagcaagagacgatggactgtcttcctgaaatccagcaactccctgtataaaaatcgtgttgcatgttggatggaacttgtatcttgtcttggcaaaaataattgcattgctgttctgttaatgcccctaactggtttggagagcatttttcttttgcaggtttgaagagcattttgaggggtgttgtaggtcaaattgaacaccatactcgaatgactcgtgttgttggtaactgaatcaataaaatatatgcatgtaaaaattcataatgttcatgtgctagaagccac

SEQ ID NO: 50044 - DNA, 2240 bp, Zea Mays
atgccctgtaccatgttttcaggccttcactatcaagagggacctcctcacaagaaaattgtccagaacttcacggagagcagtagttccaaaaataaaaaacacagatggtcatcagaggaagatgaggcactaaagcaaatggtaaaaaaatatgggacgaaaaactggcgaactattgcatgtgctatacctggccgaaatgccaactcatgcctttcaagatggaagtaccttctagacccagcaataaacaaagagccttggtcgcaacaggaggaactaagattgatccgtgcgcagcaagtttatggaaacaaatggtgtaaaatggtcaaacatttcccagggaggacaaatgatgcactcaaagaacattggagaagtcctatgaaaagaaaactggattcatatttggcctcaggattgctcgaacatgttccagacctgcaagatgatgtatcatttccacagacacagaacaatcaatcagatattccaaaggactgcaaagctgcatctgatagaaatagattttcatcacgtttatcaacagaccccaaacttaaacaagagctcacagaactggatgaaaatgccaaaatctcagaaatgagaatggccaaatcacagcagtgtgcaggaacaagaaagaagctggcttttctgtcaactccagtggagctcaagagtgttgtaccgcatgaaaccaccaaacattgccaagatatggaaccagaaaagacagagggcccactgtgcaagagaaattcccactgcatcaaggatggaagtagtttgaaaattcccgaaagtaccaaaggcaaatggttagcagaggaaagttgtttggacaaaaaaaaattatataatgtcaacttgggcttgtttcatcatgactactgagaaaaaaatactttcttccaggaagatgaaattctcattaaaatggttaccaaacatgggaaaaactggcaaactgtagcatttgctatacctggccgagaagcaaaacaatgccaaatcagactgcattcaaatgttcattagaactgcatgccttttcttcactttgtgctgatgggccttccatatagatggacacgcagtcttgacccagcaataaagaaacaggattggtcagaacaggaggatctaaaattgattcgagctcatcaaatatatggaagtcagtggcttaaaatggtcaaacatttccctgggaggacaaatcatgcactcaaagaacactggagaaatcgtatcaaaggaaaactgaatttttatttagcctcaggattgctagaacaagttccggacctggaagaaggtggtatatcagttccagagagcagtcagtcagaaattccgaaggacagtcagggttcagctgacaggagtggaccgccaccagttttacgagcacagcccaaatctaaaccggaactcccagaaaacgctggtacatcaggagaaggaacttctgattccattcgtcttaaagggcccaacgcccatccaaccgaagtttctgaaaaggtattggctaaatcaaagcagcgtgccagagccagaaggagattggattttctgtcaaccccagtggagctcaaattgtgcactgctgcggcaagttgtcaaaggcctccccagaaaatggatcaaccgggtccagtggccgagaacatctctccgtcagatgcatgtcaagacatttcacagaatgttccaccagagcgtgcggatgccatcacaccgctggctgctagtaaccaccattcaccagcgacaccagttgatccattctctctcgaaatgcatgaggcgaacgcatcagatcttctggacatgtcctactgtgatggcttgataatcgattctcctcgtgatccacatgacggtagcctcatgtagaagaaaaagttaccaacgcaaaatgacacttttaatagcaagagacgatggactgtcttcctgaaatccagcaactccctgtataaaaatcgtgttgcatgttggatggaacttgtatcttgtcttggcaaaaataattgcattgctgttctgttaatgcccctaactggtttggagagcatttttcttttgcaggtttgaagagcattttgaggggtgttgtaggtcaaattgaacaccatactcgaatgactcgtgttgttggtaactgaatcaataaaatatatgcatgtaaaaattcataatgttcatgtgctagaagccac

SEQ ID NO: 50045 - DNA, 1119 bp, Zea Mays
aacctccttattcttcgtcgtcaattcacgtcgcgttcgcgaccttctcgtcgaccccgacgatttatcttccaattgcgcgctagttgcgttgaactcggaagctacctgtcacgctcgatcctggaggtctttgtctcgtcatcgtttcagcgaattccaaggtggttttaggtaagttgattcgctactccttttattttgttttaataaatggattgatagatatgtaggtcgcgacaatttttattaatttagcatatatatattgtgatgttcgatttagataaataggtaaatcaagtaattaagatacatagtttaaagagttaataaaaaactaggaaaaaatagattttctagtgtaacatgtaatttggttaatgaatatagtcgatgccctgctgtgatatccatggtgcttaatgcttgattttaagtgtttcatcctttttagtgtagattatctaaattatactcgtatactcgtgctcatacatgtgcatcgtgcatctcatgaggtacgttaattaatcgagcgatgcggaagacaagccaagtcgaccccaagcgcggactactccgcatggtggtgttgatggacgaacccacctaatcaagtgttaggacaaggatgatcgtcaagtggacgtcgtctaacaaacactaacgtagtgtttattccaggcaatccccggtgaagagcctgtggagctttgccacttttgtgcaaaggtggttcccaagcaggaggaagaaccgaaaatagaagcgtgttgctgtggatggtgctaagtgccagtgggctcggccttcttataagtctcagtaactcttctatacttcttattgaggatggtcacttaagctagcatatatttcaaacttataaataatttataatatttcaaagtatatttctttgaatcacctttgtaatcactccaatcttgtacactgtaaacttgatgtaacttgtaaaatttggtaataagatttccgctgcaaaaatgttggtgtgtgatttgtgtttacttaatcttgcgatcttggttgttagtggttcatccgaggtccttggggcactcggacagatcctgttaagttatttggtgcaca

SEQ ID NO: 50046 - DNA, 901 bp, Zea Mays
cagtcgccggctgatctttttctccagcgaccaagctccagtccggcgctcatctctctctgctcgccttctccaatcgtcgcgcagcccgtggaaaacgcgtcggcagcgctcagcaatccttatcttcagccgtgcgttcttcttctttgcgcagcaagtcatctgctctctggatattttcagcgctaagcaatccttatctccagccgtgtgttcttcttctttgcgcagcaaatcatctgctcgatctccctcttgtttctctgttggcgcgcacctagatcttcttccccacgcgcgcagccatcctctgctcggtgcttcctcagtcgcgccctgaggttcttcccgcccagctcagccgctccctcctctccttccctgctcgcccccgcctccttggttctcctcgccggcgccctgccttttcccaaccgcgccggtcgctgctttccccgacctcgccggcgctcctccctctgcccgttgccatggccgtcgtgagctcgcccccaacgtcgagctcggctttgagctccctccctgctcggctctgccctcaacgccggccatttcctgctccaaccgtcgcgccccaagcttctctaatcgagcgtcgtgtggtcgcctgaccgcgctcctcctcggcctctgcttctcggtagcgcccctgcatcctccctcgccggtgacagctcctgcgtgcgcgcgatggccgcaatgaagacgctacgtgcgctggtgtccgaagtccgaactcgccctggtcatggcgcttgccgcttggcttctccagccgcgcgtggaacgcgctccctgccagtgtcgttttctgctctgccgttggcataacatcgtttgttgttgctagttgatgcaacgttgccgtgcttcgacg

SEQ ID NO: 50047 - DNA, 1095 bp, Zea Mays
aggccctttgaaatgccgaaagagagccgttccctgttgccgaaagcccgaaactagtcttccctcctgctggcggcgtgcggagggccggaggccgggtcgacaagaggagatgacgttggcggcggggctgggttacgccctgatcgcgctgggccccgccttctccctcttctccggcgtcgtcgtcaggaagcccttcctcgtcctcaccctcctctctagcaccttattttggcttataagtttgatagtcctctcgggaatatggagaggatttcttcctataaagtcaggagcttggtgggcatatgtgattctgatccttacatctgtcgcattgcaagaaggcactcgtcttgtgttttggatgctttacaagaaaatggaagagatgctagatgcttttgctgatagaatatctaagccacgtcttagattgactgacaagatgctgatttctttagctggtggtttaggccatggagtggctcatgcagtctttttctgtctcagtcttttgactccagcgtttggtcgagccacattttatactgaaagcccttattgcacttggattcttggtcatccatacattctcaatgattattgcttttaatgcatatgacgagggaaagaaaagtgatcaagtctttgttccagtaattcatttggctgctgctgcgatgacacttgttaacctcgccccaggaggctgtctcattggtaccccgctgttgttggtcatggctgcgctgaccttgcagcactgctggcgagtggcatgccggagattaactgagcaccggcatcagcagcataacagcagctagttgtaggcttgccatcatgtaattttcccatgtatgtttgactgaatcttctgatgtactatgacagtaaaaatcaggttctgagtcgtgtcgtgtagttagacgaggggttattatagtttgactcgatgttttgcatatgcagtatgtcctccctttcctggagcacttttatatctatctatctatataaccatgattgttaaaaggtccaacttttggtctggttatagccaattttaaactattcaaccagcaagct

SEQ ID NO: 50048 - DNA, 2825 bp, Zea Mays
ctcaactcaagtgcctccccgtggcagttcaaagaaaaactaaaaaaagaaacaagaaaaagacagaggcggaggaaaaccaacccgaacagacaggggcgatcagaaaagacaagcagcgtcgtcacaacacaattcagaaatcgtcaagtcctatcgtgctcgccgaaagaccgccgcctcgaacggctcgacacgacgaccttcgctctctccgccaccgaatccaccacaaaaaccaccatatccacttgttggccggccggtcaagaagaccaaggacaagggagaaacgaggggtttagttgggcgcgcgggcgatctcttcagtaaggcgttgtgtggtggtggtgtttggacggagcggagatgtcgtcggcgatggtggagcgggcaaccagcgatatgctcatcggcccggactgggcgatgaacttggagatctgtgacatcctcaaccgcgaacccggacaagcaaaagatgtggtaaagtccctcaagaaacgcattgcacacaagaacccaaaagtccaacttcttgctctcacgttgctggagacgatgataaaaaattgtggggacgttgtgcatatggttgttgctgagagagacatacttcatgagatggtcaagatagtaaagaaaaggcatgattatcatgttaaagagaagattctcacgctgatagatacttggcaagaagtttttggtggtgcacgtgcaagatatccacaatattatgcagcatatgaggagctcttgcgtgctggagtggtatttcctcaaagattgaatggttctgtgccaatcatcactcctccacagactcagcctctccaaaactatccctcatctttacacatttcacagcaggaggaacttgaattaccagtttcagatttccctgcattaagccttacagaaattcagaacgcacgtggcatcatggatgttctttcagagatgctggatgctttagatccaggtaacagagagatttcaggggcttagacaggatgtcattgcagaccttgtggatcaatgccgttcttacaagcaaagagtagtgcagcttgtcaacagtacctcgaacgaggagttgctcaaccagggtctttctttgaatgatgatatgcagcgtgttctggcaaaacatgatgctattgatgcaggtctagcagttcgagtggagaagccgaaatctctgcagtcccaaattggaagttcttcaacaagaaagccagataccatggaagaaacaattcagaggccttcagcaagtacaactgccaccagtcagtctccctttgggattttagcacttcctgcacctccatccagtagttcaaaagcacctgcaatacctgcttctagtatcgacctacttagtggagatgattatgtcaaacccgaacctgcaaactccctagcacttgttcctgtcactgaatattcagctgcagacaagaatgtcttagcttttgctgatatgtttgaacaaaatacagccaacaatagcaaccataaccttccatattcttttctatcttcgacttcaaattctactatctctacatcacaaacatatcatgcaccggtgcgacctgtattgcctcagcattcagctgcttatccaaatggggccagatccaatgccattgtaccttatgatcagcaggcccaatcgaactctacaggttcgcggaatgggcaaacagcctatggaggaaatcaccaaaagcaagcactaaattatggcacaggtgatcaaaatggagacattccaccagcaccatggggaactaagagatccactaacccatttgacgacgatcagcttggtggaatggcagtgcaaccaaaaggcatgcaaccccaaccagtgcaacccagtcagcatgggaacaaattcatgtcagcaccaccaatgccgaggggacagccaggaagaatgcagttgcaacaggtgcctggtgctcagcttggcgctctacaaccaacacaggctacactgaacatgcagtacaggggcatgcatccatcgatgcaaatgaatcatggaatgggcatgtattcccaaccaacgttcggaggatattatggaatgaaccaaacacagctttacggcgttcatatgtctggttatggatatggtcagcaatctgggggctactatattccgaatgctgcatatgcctatactagtgcaaacgaacttgcccagaggatgaatgacctttcagttcaaaacggtgatccaaatggagccgcagcaaataagcagagcagacctgaggatgcactctttggtgatctcttgagcatcgccaagatgaagcaaaacaaacctgcagctggcaaggttggcggctaagtttgagtaaagaaggtacataattttatcttaattgccagcagcagaaacctttcctgacagcgcatataattattttgccacgttctatgcaatgccagatggcttctcgatgtaagctcatttggtagaaattcatattgggaactggagattaggatgcttgtggggagcctcatagcaaatatgtctataactctactatatatgaaattcttgagttctcagtagcaatatgtattgtcataatttccctctgcaaatattaaggcagaatcagagattcctgttctccctagccatatacccctgttcttttccacttatttcttcttcataacagttctagttcagattaactagtcgggatagtaatatgttagtcagtacgtttttttaactactgtcgattaggaaatgatgtttcaactttatattattagactttgac

SEQ ID NO: 50049 - DNA, 2609 bp, Zea Mays
aaaagacagaggcggaggaaaaccaacccgaacagacaggggcgatcagaaaagacaagcagcgtcgtcacaacacaattcagaaatcgtcaagtcctatcgtgctcgccgaaagaccgccgcctcgaacggctcgacacgacgaccttcgctctctccgccaccgaatccaccacaaaaaccaccatatccacttgttggccggccggtcaagaagaccaaggacaagggagaaacgaggggtttagttgggcgcgcgggcgatctcttcagtaaggcgttgtgtggtggtggtgtttggacggagcggagatgtcgtcggcgatggtggagcgggcaaccagcgatatgctcatcggcccggactgggcgatgaacttggagatctgtgacatcctcaaccgcgaacccggacaagcaaaagatgtggtaaagtccctcaagaaacgcattgcacacaagaacccaaaagtccaacttcttgctctcacgttgctggagacgatgataaaaaattgtggggacgttgtgcatatggttgttgctgagagagacatacttcatgagatggtcaagatagtaaagaaaaggcatgattatcatgttaaagagaagattctcacgctgatagatacttggcaagaagtttttggtggtgcacgtgcaagatatccacaatattatgcagcatatgaggagctcttgccttacagaaattcagaacgcacgtggcatcatggatgttctttcagagatgctggatgctttagatccaggtaacagagaggggcttagacaggatgtcattgcagaccttgtggatcaatgccgttcttacaagcaaagagtagtgcagcttgtcaacagtacctcgaacgaggagttgctcaaccagggtctttctttgaatgatgatatgcagcgtgttctggcaaaacatgatgctattgatgcaggtctagcagttcgagtggagaagccgaaatctctgcagtcccaaattggaagttcttcaacaagaaagccagataccatggaagaaacaattcagaggccttcagcaagtacaactgccaccagtcagtctccctttgggattttagcacttcctgcacctccatccagtagttcaaaagcacctgcaatacctgcttctagtatcgacctacttagtggagatgattatgtcaaacccgaacctgcaaactccctagcacttgttcctgtcactgaatattcagctgcagacaagaatgtcttagcttttgctgatatgtttgaacaaaatacagccaacaatagcaaccataaccttccatattcttttctatcttcgacttcaaattctactatctctacatcacaaacatatcatgcaccggtgcgacctgtattgcctcagcattcagctgcttatccaaatggggccagatccaatgccattgtaccttatgatcagcaggcccaatcgaactctacaggttcgcggaatgggcaaacagcctatggaggaaatcaccaaaagcaagcactaaattatggcacaggtgatcaaaatggagacattccaccagcaccatggggaactaagagatccactaacccatttgacgacgatcagcttggtggaatggcagtgcaaccaaaaggcatgcaaccccaaccagtgcaacccagtcagcatgggaacaaattcatgtcagcaccaccaatgccgaggggacagccaggaagaatgcagttgcaacaggtgcctggtgctcagcttggcgctctacaaccaacacaggctacactgaacatgcagtacaggggcatgcatccatcgatgcaaatgaatcatggaatgggcatgtattcccaaccaacgttcggaggatattatggaatgaaccaaacacagctttacggcgttcatatgtctggttatggatatggtcagcaatctgggggctactatattccgaatgctgcatatgcctatactagtgcaaacgaacttgcccagaggatgaatgacctttcagttcaaaacggtgatccaaatggagccgcagcaaataagcagagcagacctgaggatgcactctttggtgatctcttgagcatcgccaagatgaagcaaaacaaacctgcagctggcaaggttggcggctaagtttgagtaaagaaggtacataattttatcttaattgccagcagcagaaacctttcctgacagcgcatataattattttgccacgttctatgcaatgccagatggcttctcgatgtaagctcatttggtagaaattcatattgggaactggagattaggatgcttgtggggagcctcatagcaaatatgtctataactctactatatatgaaattcttgagttctcagtagcaatatgtattgtcataatttccctctgcaaatattaaggcagaatcagagattcctgttctccctagccatatacccctgttcttttccacttatttcttcttcataacagttctagttcagattaactagtcgggatagtaatatgttagtcagtacgtttttttaactactgtcgattaggaaatgatgtttcaactttatattattagactttgac

SEQ ID NO: 50050 - DNA, 2728 bp, Zea Mays
gaacagacaggggcgatcagaaaagacaagcagcgtcgtcacaacacaattcagaaatcgtcaagtcctatcgtgctcgccgaaagaccgccgcctcgaacggctcgacacgacgaccttcgctctctccgccaccgaatccaccacaaaaaccaccatatccacttgttggccggccggtcaagaagaccaaggacaagggagaaacgaggggtttagttgggcgcgcgggcgatctcttcagtaaggcgttgtgtggtggtggtgtttggacggagcggagatgtcgtcggcgatggtggagcgggcaaccagcgatatgctcatcggcccggactgggcgatgaacttggagatctgtgacatcctcaaccgcgaacccggacaagcaaaagatgtggtaaagtccctcaagaaacgcattgcacacaagaacccaaaagtccaacttcttgctctcacgttgctggagacgatgataaaaaattgtggggacgttgtgcatatggttgttgctgagagagacatacttcatgagatggtcaagatagtaaagaaaaggcatgattatcatgttaaagagaagattctcacgctgatagatacttggcaagaagtttttggtggtgcacgtgcaagatatccacaatattatgcagcatatgaggagctcttgcgtgctggagtggtatttcctcaaagattgaatggttctgtgccaatcatcactcctccacagactcagcctctccaaaactatccctcatctttacacatttcacagcaggaggaacttgaattaccagtttcagatttccctgcattaagccttacagaaattcagaacgcacgtggcatcatggatgttctttcagagatgctggatgctttagatccagatttcaggggcttagacaggatgtcattgcagaccttgtggatcaatgccgttcttacaagcaaagagtagtgcagcttgtcaacagtacctcgaacgaggagttgctcaaccagggtctttctttgaatgatgatatgcagcgtgttctggcaaaacatgatgctattgatgcaggtctagcagttcgagtggagaagccgaaatctctgcagtcccaaattggaagttcttcaacaagaaagccagataccatggaagaaacaattcagaggccttcagcaagtacaactgccaccagtcagtctccctttgggattttagcacttcctgcacctccatccagtagttcaaaagcacctgcaatacctgcttctagtatcgacctacttagtggagatgattatgtcaaacccgaacctgcaaactccctagcacttgttcctgtcactgaatattcagctgcagacaagaatgtcttagcttttgctgatatgtttgaacaaaatacagccaacaatagcaaccataaccttccatattcttttctatcttcgacttcaaattctactatctctacatcacaaacatatcatgcaccggtgcgacctgtattgcctcagcattcagctgcttatccaaatggggccagatccaatgccattgtaccttatgatcagcaggcccaatcgaactctacaggttcgcggaatgggcaaacagcctatggaggaaatcaccaaaagcaagcactaaattatggcacaggtgatcaaaatggagacattccaccagcaccatggggaactaagagatccactaacccatttgacgacgatcagcttggtggaatggcagtgcaaccaaaaggcatgcaaccccaaccagtgcaacccagtcagcatgggaacaaattcatgtcagcaccaccaatgccgaggggacagccaggaagaatgcagttgcaacaggtgcctggtgctcagcttggcgctctacaaccaacacaggctacactgaacatgcagtacaggggcatgcatccatcgatgcaaatgaatcatggaatgggcatgtattcccaaccaacgttcggaggatattatggaatgaaccaaacacagctttacggcgttcatatgtctggttatggatatggtcagcaatctgggggctactatattccgaatgctgcatatgcctatactagtgcaaacgaacttgcccagaggatgaatgacctttcagttcaaaacggtgatccaaatggagccgcagcaaataagcagagcagacctgaggatgcactctttggtgatctcttgagcatcgccaagatgaagcaaaacaaacctgcagctggcaaggttggcggctaagtttgagtaaagaaggtacataattttatcttaattgccagcagcagaaacctttcctgacagcgcatataattattttgccacgttctatgcaatgccagatggcttctcgatgtaagctcatttggtagaaattcatattgggaactggagattaggatgcttgtggggagcctcatagcaaatatgtctataactctactatatatgaaattcttgagttctcagtagcaatatgtattgtcataatttccctctgcaaatattaaggcagaatcagagattcctgttctccctagccatatacccctgttcttttccacttatttcttcttcataacagttctagttcagattaactagtcgggatagtaatatgttagtcagtacgtttttttaactactgtcgattaggaaatgatgtttcaactttatattattagactttgac

SEQ ID NO: 50051 - DNA, 2653 bp, Zea Mays
gaacagacaggggcgatcagaaaagacaagcagcgtcgtcacaacacaattcagaaatcgtcaagtcctatcgtgctcgccgaaagaccgccgcctcgaacggctcgacacgacgaccttcgctctctccgccaccgaatccaccacaaaaaccaccatatccacttgttggccggccggtcaagaagaccaaggacaagggagaaacgaggggtttagttgggcgcgcgggcgatctcttcagtaaggcgttgtgtggtggtggtgtttggacggagcggagatgtcgtcggcgatggtggagcgggcaaccagcgatatgctcatcggcccggactgggcgatgaacttggagatctgtgacatcctcaaccgcgaacccggttgctggagacgatgataaaaaattgtggggacgttgtgcatatggttgttgctgagagagacatacttcatgagatggtcaagatagtaaagaaaaggcatgattatcatgttaaagagaagattctcacgctgatagatacttggcaagaagtttttggtggtgcacgtgcaagatatccacaatattatgcagcatatgaggagctcttgcgtgctggagtggtatttcctcaaagattgaatggttctgtgccaatcatcactcctccacagactcagcctctccaaaactatccctcatctttacacatttcacagcaggaggaacttgaattaccagtttcagatttccctgcattaagccttacagaaattcagaacgcacgtggcatcatggatgttctttcagagatgctggatgctttagatccaggtaacagagaggggcttagacaggatgtcattgcagaccttgtggatcaatgccgttcttacaagcaaagagtagtgcagcttgtcaacagtacctcgaacgaggagttgctcaaccagggtctttctttgaatgatgatatgcagcgtgttctggcaaaacatgatgctattgatgcaggtctagcagttcgagtggagaagccgaaatctctgcagtcccaaattggaagttcttcaacaagaaagccagataccatggaagaaacaattcagaggccttcagcaagtacaactgccaccagtcagtctccctttgggattttagcacttcctgcacctccatccagtagttcaaaagcacctgcaatacctgcttctagtatcgacctacttagtggagatgattatgtcaaacccgaacctgcaaactccctagcacttgttcctgtcactgaatattcagctgcagacaagaatgtcttagcttttgctgatatgtttgaacaaaatacagccaacaatagcaaccataaccttccatattcttttctatcttcgacttcaaattctactatctctacatcacaaacatatcatgcaccggtgcgacctgtattgcctcagcattcagctgcttatccaaatggggccagatccaatgccattgtaccttatgatcagcaggcccaatcgaactctacaggttcgcggaatgggcaaacagcctatggaggaaatcaccaaaagcaagcactaaattatggcacaggtgatcaaaatggagacattccaccagcaccatggggaactaagagatccactaacccatttgacgacgatcagcttggtggaatggcagtgcaaccaaaaggcatgcaaccccaaccagtgcaacccagtcagcatgggaacaaattcatgtcagcaccaccaatgccgaggggacagccaggaagaatgcagttgcaacaggtgcctggtgctcagcttggcgctctacaaccaacacaggctacactgaacatgcagtacaggggcatgcatccatcgatgcaaatgaatcatggaatgggcatgtattcccaaccaacgttcggaggatattatggaatgaaccaaacacagctttacggcgttcatatgtctggttatggatatggtcagcaatctgggggctactatattccgaatgctgcatatgcctatactagtgcaaacgaacttgcccagaggatgaatgacctttcagttcaaaacggtgatccaaatggagccgcagcaaataagcagagcagacctgaggatgcactctttggtgatctcttgagcatcgccaagatgaagcaaaacaaacctgcagctggcaaggttggcggctaagtttgagtaaagaaggtacataattttatcttaattgccagcagcagaaacctttcctgacagcgcatataattattttgccacgttctatgcaatgccagatggcttctcgatgtaagctcatttggtagaaattcatattgggaactggagattaggatgcttgtggggagcctcatagcaaatatgtctataactctactatatatgaaattcttgagttctcagtagcaatatgtattgtcataatttccctctgcaaatattaaggcagaatcagagattcctgttctccctagccatatacccctgttcttttccacttatttcttcttcataacagttctagttcagattaactagtcgggatagtaatatgttagtcagtacgtttttttaactactgtcgattaggaaatgatgtttcaactttatattattagactttgac

SEQ ID NO: 50052 - DNA, 2441 bp, Zea Mays
gaagagcaccagcacggcaacgagaaggagcagcgccgactggcgacgagaagatgctcttactaccatgagttctgttgcaggacacacatgacaagcaaaagatgtggtaaagtccctcaagaaacgcattgcacacaagaacccaaaagtccaacttcttgctctcacgttgctggagacgatgataaaaaattgtggggacgttgtgcatatggttgttgctgagagagacatacttcatgagatggtcaagatagtaaagaaaaggcatgattatcatgttaaagagaagattctcacgctgatagatacttggcaagaagtttttggtggtgcacgtgcaagatatccacaatattatgcagcatatgaggagctcttgcgtgctggagtggtatttcctcaaagattgaatggttctgtgccaatcatcactcctccacagactcagcctctccaaaactatccctcatctttacacatttcacagcaggaggaacttgaattaccagtttcagatttccctgcattaagccttacagaaattcagaacgcacgtggcatcatggatgttctttcagagatgctggatgctttagatccaggtaacagagaggggcttagacaggatgtcattgcagaccttgtggatcaatgccgttcttacaagcaaagagtagtgcagcttgtcaacagtacctcgaacgaggagttgctcaaccagggtctttctttgaatgatgatatgcagcgtgttctggcaaaacatgatgctattgatgcaggtctagcagttcgagtggagaagccgaaatctctgcagtcccaaattggaagttcttcaacaagaaagccagataccatggaagaaacaattcagaggccttcagcaagtacaactgccaccagtcagtctccctttgggattttagcacttcctgcacctccatccagtagttcaaaagcacctgcaatacctgcttctagtatcgacctacttagtggagatgattatgtcaaacccgaacctgcaaactccctagcacttgttcctgtcactgaatattcagctgcagacaagaatgtcttagcttttgctgatatgtttgaacaaaatacagccaacaatagcaaccataaccttccatattcttttctatcttcgacttcaaattctactatctctacatcacaaacatatcatgcaccggtgcgacctgtattgcctcagcattcagctgcttatccaaatggggccagatccaatgccattgtaccttatgatcagcaggcccaatcgaactctacaggttcgcggaatgggcaaacagcctatggaggaaatcaccaaaagcaagcactaaattatggcacaggtgatcaaaatggagacattccaccagcaccatggggaactaagagatccactaacccatttgacgacgatcagcttggtggaatggcagtgcaaccaaaaggcatgcaaccccaaccagtgcaacccagtcagcatgggaacaaattcatgtcagcaccaccaatgccgaggggacagccaggaagaatgcagttgcaacaggtgcctggtgctcagcttggcgctctacaaccaacacaggctacactgaacatgcagtacaggggcatgcatccatcgatgcaaatgaatcatggaatgggcatgtattcccaaccaacgttcggaggatattatggaatgaaccaaacacagctttacggcgttcatatgtctggttatggatatggtcagcaatctgggggctactatattccgaatgctgcatatgcctatactagtgcaaacgaacttgcccagaggatgaatgacctttcagttcaaaacggtgatccaaatggagccgcagcaaataagcagagcagacctgaggatgcactctttggtgatctcttgagcatcgccaagatgaagcaaaacaaacctgcagctggcaaggttggcggctaagtttgagtaaagaaggtacataattttatcttaattgccagcagcagaaacctttcctgacagcgcatataattattttgccacgttctatgcaatgccagatggcttctcgatgtaagctcatttggtagaaattcatattgggaactggagattaggatgcttgtggggagcctcatagcaaatatgtctataactctactatatatgaaattcttgagttctcagtagcaatatgtattgtcataatttccctctgcaaatattaaggcagaatcagagattcctgttctccctagccatatacccctgttcttttccacttatttcttcttcataacagttctagttcagattaactagtcgggatagtaatatgttagtcagtacgtttttttaactactgtcgattaggaaatgatgtttcaactttatattattagactttgac

SEQ ID NO: 50053 - DNA, 2245 bp, Zea Mays
gacgagaagatgctcttactaccatgagttctgttgcaggacacacatgacaagcaaaagatgtggtaaagtccctcaagaaacgcattgcacacaagaacccaaaagtccaacttcttgctctcacgttgctggagacgatgataaaaaattgtggggacgttgtgcatatggttgttgctgagagagacatacttcatgagatggtcaagatagtaaagaaaaggcatgattatcatgttaaagagaagattctcacgctgatagatacttggcaagaagtttttggtggtgcacgtgcaagatatccacaatattatgcagcatatgaggagctcttgccttacagaaattcagaacgcacgtggcatcatggatgttctttcagagatgctggatgctttagatccaggtaacagagaggggcttagacaggatgtcattgcagaccttgtggatcaatgccgttcttacaagcaaagagtagtgcagcttgtcaacagtacctcgaacgaggagttgctcaaccagggtctttctttgaatgatgatatgcagcgtgttctggcaaaacatgatgctattgatgcaggtctagcagttcgagtggagaagccgaaatctctgcagtcccaaattggaagttcttcaacaagaaagccagataccatggaagaaacaattcagaggccttcagcaagtacaactgccaccagtcagtctccctttgggattttagcacttcctgcacctccatccagtagttcaaaagcacctgcaatacctgcttctagtatcgacctacttagtggagatgattatgtcaaacccgaacctgcaaactccctagcacttgttcctgtcactgaatattcagctgcagacaagaatgtcttagcttttgctgatatgtttgaacaaaatacagccaacaatagcaaccataaccttccatattcttttctatcttcgacttcaaattctactatctctacatcacaaacatatcatgcaccggtgcgacctgtattgcctcagcattcagctgcttatccaaatggggccagatccaatgccattgtaccttatgatcagcaggcccaatcgaactctacaggttcgcggaatgggcaaacagcctatggaggaaatcaccaaaagcaagcactaaattatggcacaggtgatcaaaatggagacattccaccagcaccatggggaactaagagatccactaacccatttgacgacgatcagcttggtggaatggcagtgcaaccaaaaggcatgcaaccccaaccagtgcaacccagtcagcatgggaacaaattcatgtcagcaccaccaatgccgaggggacagccaggaagaatgcagttgcaacaggtgcctggtgctcagcttggcgctctacaaccaacacaggctacactgaacatgcagtacaggggcatgcatccatcgatgcaaatgaatcatggaatgggcatgtattcccaaccaacgttcggaggatattatggaatgaaccaaacacagctttacggcgttcatatgtctggttatggatatggtcagcaatctgggggctactatattccgaatgctgcatatgcctatactagtgcaaacgaacttgcccagaggatgaatgacctttcagttcaaaacggtgatccaaatggagccgcagcaaataagcagagcagacctgaggatgcactctttggtgatctcttgagcatcgccaagatgaagcaaaacaaacctgcagctggcaaggttggcggctaagtttgagtaaagaaggtacataattttatcttaattgccagcagcagaaacctttcctgacagcgcatataattattttgccacgttctatgcaatgccagatggcttctcgatgtaagctcatttggtagaaattcatattgggaactggagattaggatgcttgtggggagcctcatagcaaatatgtctataactctactatatatgaaattcttgagttctcagtagcaatatgtattgtcataatttccctctgcaaatattaaggcagaatcagagattcctgttctccctagccatatacccctgttcttttccacttatttcttcttcataacagttctagttcagattaactagtcgggatagtaatatgttagtcagtacgtttttttaactactgtcgattaggaaatgatgtttcaactttatattattagactttgac

SEQ ID NO: 50054 - DNA, 445 bp, Zea Mays
cccagcccgataaaaaacctagaatgccgaaagcgtcaatctatctgtctcgcgagacctagctgcggggtgcgggtggcggtgagctaaggacgggccagcggtgagttgtaggcgggcaggccgacgatgaggtgcaggcgggcatgcaggccggcgatgagctgcgggcgagcgggctcccagtgaggacgacttcgggcgtgatgctggcgaggacgagggcaggcgcccgaccgtcgcgcggagtagtgcgtgcgccctaccgctggtgaggagtgcgggcgagctgccgtcgagaaggtgtgcgggcggtctgctgacgaaaaggaagtgctcatcagctggaagaggtgctgaaagcaaggatttgagtgcttgaagtgcgtgaaaaaatattactcgcatgtatgctagccgttggcgtaacacccagctgatggag

SEQ ID NO: 50055 - DNA, 2409 bp, Zea Mays
cctacatcgcttgcttttctcaagtcacagggccggcccagcccaaaatccttttcaccgctacgacctccgtgctccggcgatgcagcggatttcgctacgacttctgcgctcctcctacaccgccgcctccgcctccctctccaccacctcctcctccctccgcggcctggcagtatcccatggcggttggaccacccgaccgtcgctgcagcctccggtgcgaaccgcggcgccggtcgacctcaccaggtggccgccgcggaggggttactcccagttcgcgagcgggttcaccccgctgaagccgaagccgctgggatccatcctcgacatcgaacgcgccaagggcctctcccccgaccacctcgtcgccgcatgggatgacgtcagtccccgccccctcattagtcatttcattcggtttttttgtggtttgtgtgttataagaattgaggagatcccctctgacggccgtcgtaggtaagcatcaaaatgtgatattctgtcgtgcgtgtttgatacttattttaagcaccgtgcctgtaacgaattttctgtgtgcgcgactgcgggtatctgaatgatctgttgaagggaagagatgaaaggatataaacgtccattctaatcgcagaccttttcaattgcaaatgaaggtgtttgataaagtggaagtttagacttcaattattacattgctaatggaagaacatgccggcgaagcatgcaagtagatttattcccttaccacgtttgaagaggaaaaaaaagaaatagtggtgatattttgaagctgtggtaaaattggccgtttcgaaaagttatgttgaacttaacttataattaggataaagtgtgctatagaatctcaacggttgtgatgtgatctccacagcatcattctagctacgtatttggttttcagttccaacttccaaggatatctgtatttgacagcattgtgcaactgtcatgtcactctagtgacatctctgattttgcttgtttggactaagtaatgaagggatttggaaagtggctagtattcattggaaagttaaacagcattagcacaatacttttagaaacattgcattttgttatggcttcaattatacattgcattagagaaactttatttgttgaagattgaactggcattgtagttatactcagcaaaattctcacaggtgattcttagtaaccatctttttgtgctgttagatgcatacatgattttcatgtgtccgtacttgtgtgtgcgtgttgggggatattctctgatctttttgaacttctatattcataaggatgacattttagtttccattccaactctattatttgtcctgtctaaccccaaaagaaagatcaagaacaataattttcagtttaatatgaaattgataatgtttattattatttttcgttcttctgcatcagtcatgcaaatttttatacttgtcctgatgttttatgttcgtgacttttttttttgaatattagtatcatttaggaaggggtcatataggtgcatctatgaaagcaaaactttaccatctcttggaacaaagatcagcttcatgccgtcactttgttattccgttgtggaagggaagtggatacactactatgttcatgcaagatgccatacatggtattcacaggacttgaagactataaagcacgaggcactcaagcaagtccttactacacagtcactcattacacagagtttgctgagaccaaggacactgtgcttattcgaggagatgttgtttttaccagcaaactaaccgattcagaggcaaagactcttctagagactgctcactcgttctacctgaatgatgtgagatacagactcgtggagcgcttcaacaaagagactcatgattttgagttcggggacgtccttaaagtgcttgacatgccaaccatgtgacccagtttaattcccaaccaatagcaaatattcctagagaacattgattttctgtcacctcaaatcctcaatttagcacgggagattgctttcttgcatcatcagaggcagtaagatggagccactggatatcgtcctgccttcgctcattgagcattccgtgtggattttgttgcactgattacaccatagacaattttgctgtttttttaagcagttgatgattttcagggatgtgagacataagttatattttttgctatatcattgtacccattaggtccataatgacattttgtaccatcttgatgtatttcccctgaatatttttgtggaaaccataaaccaatttgtttgtagacttgtggctaaccgatggcagatcaaacaaaaggtcatcgtgggctagtgctagaatcacctagttttattgccgaagttagcagatacctttggtgctt

SEQ ID NO: 50056 - DNA, 1981 bp, Zea Mays
aaaggcccccagagtcacatgagcgtcaccgatatgaatcgcaaagcatggaaaatacagctcacaaaatcagctccactcctgcctgcaatcttgcattgagtaaccaccgaaaaacatatgcaaactgctctcacatgcaatgcaatgcaatgcgtgaggctttgcaccttgcagcgagcgtcggaagtatatgcgtgttcgccggaatcctgcattcctacagggggaaagtgccagggccaagggcgaacgcggcggaatgcgcagcgcgcagcctccagaggctataaaaacctgcctcgtcctagctagctagtcacacgtctcattcaagcgctctgccggccagcctagtgctctcggctttctttcatctccctccttttgccacttgctgtagctttaatttgcctggcactttgcacgttgtggccggccggggcctgtgcttccattggtcggcagcaagcaagcaaggctagctagcgtccgtggatcagtcatgggcagccagaggcagaggcaccgagcggtcactggcctcccggcggcgggcgcgcggatgctggccctgctgtgcgcgtcgtcgtgggtgctggtgctcacgacggcgcagaactacagcgccatcttcaacttcggcgactcgatcaccgacaccggcaacctgtgcaccagcggcaggccgtcgcagatcaccttcacgcagcccccctacggcgagacctacttcggcacgccgacgtgccgctgctccgacggccgcgtcgtcgtcgacttcctgagcacccagttcgggctgccgttcctgccgccgtccaagtcgagcagcgcggacttcaggcagggcgccaacatggcgatcacgggcgccacggccatggacgcccccttcttccgctcgctcgggctctccgacaagatctggaacaacgggcccatcagctttcagctgcagtggttccagcagatcgccacctccgtctgcggacagactcgctgctcactgcggctggccgggcaggctgcaagagctacctgggcaactccctgttcgtgttcggcgagttcggcggcaacgactacaacgccatgatcttcggcggctactccatcgagcaggccaggaaatacgtccccaagatcgtcaacaccatctcgaggggcatcgataaactgatcgccatgggcgcgaccgacatcgtcgtccccggggtgcttcccatcgggtgcttccccatctatctgaccatctaccagagctccaacggcagcgactacgacagtctcggctgcctcaacagcttcaacgacctgtccacgtaccacaactccctgctccagaagagggtggacatcatccagagccggcacaggaagacggcgcgcatcatgtacgccgacttctactccgccgtctacgacatggtccgcaacccacagagctacgggttcagctcggtgttcgagacgtgctgcggatcaggcggcggcaagtacaactaccagaacagcgcgcggtgcggcatggcgggcgccgccgcgtgctctagcccggcgtcgcacctcagctgggacggcatccacctcacggaggccgcgtacaagcacatcaccgacgcctggctcagggggccgtactgccgcccgcccatcctgcacaactaatccacagtgcatatggacatgctggaccggcggccggcagcgcgttgtcttttttataaataatttatttattattcgtacaagctttggttggatccatcggggcgccgggggttattaattatagcattggttggtcctttcgttatatttgaccatatattttttttgtttggggtaaggtgtttattatattttgcgttgctaaagaaaaagagctgacgatggcaaagtgtacgtggaatacgatgataatgccatgattatttatagtccttagcaatgatctaaatgacgagttatgatattt

SEQ ID NO: 50057 - DNA, 538 bp, Zea Mays
ggcaactgagggttcagctcggtgttcgagacgtgctgcggatcaggcggcggcaagtacaactaccagaacagcgcgcggtgcggcatggcgggcgccgccgcgtgctctagcccggcgtcgcacctcagctgggacggcatccacctcacggaggccgcgtacaagcacatcaccgacgcctggctcagggggccgtactgccgcccgcccatcctgcacaactaatccacagtgcatatggacatgctggaccggcggccggcagcgcgttgtcttttttataaataatttatttattattcgtacaagctttggttggatccatcggggcgccgggggttattaattatagcattggttggtcctttcgttatatttgaccatatattttttttgtttggggtaaggtgtttattatattttgcgttgctaaagaaaaagagctgacgatggcaaagtgtacgtggaatacgatgataatgccatgattatttatagtccttagcaatgatctaaatgacgagttatgatattt

SEQ ID NO: 50058 - DNA, 1479 bp, Zea Mays
gcgatatggttgattttcaatctacaggggatgtagggaatagcgcatccatcaccgagatgggcaacctggttcctgagccatcctacgtggaagcagaagaggctagattatggagtgttgctactatgaattgcttagaatttgatgcctggaccacagttgttgaggagatggacaaaaatgctgaggttatgcatgctacaagattacttgtgttctgactgccaccatgtagcaacattgaggaatcagagggtccgctttgggccctcaatttgttgctaaaccacttgcacctgataaccctccactgaaggtatgcccctaagtcaaaatcctagcaatgcacaaaaatgcatttgtctatcttttgtatttaatatgccttgccatttccaagatatagtcctaaacattttatcatgcttgatttctaggtaacatttattgacaacatcgatcctggtgggattgatcatcaaattgctcaactaggacctgaactggcaactagctactcttgtaattgtcatttctaaggtacataaagatcccaaactttcttattttgttgatattctcccagctgcaccatgagcttataagtagctgcagttcttggttttgcattgctttaccagggacaaaattatgtagccctttgttactggttgagttaatgcttctgttagtacaccagtcagatctatttgaatcttgtatgcttgattgtgcaaatttattaactgcatagcttgtcagtcattgtaacattgccttcaaatataccccagtgattttgaaattttaggcaacaaagaatatagttacattgcaatgcgacaaacttgtttgcatcatggctggatattggaggtaaagcattatcggacaatcatttagtttggcttagttacaggtgctttttaagtggtaacgcaagttgcagttcacacaaataacacctttgaatgtaatgtgttatcacacaaggctccagtgagttgtgttctatttgtttcttttctatttggtagtataatacttaatctttatgtttttgatgcacctgctaggcgctagcagtaccaaatattcctgttagtatgacagtcacatatttttaagtcttttatatttgattgtgcaattgtattgactgtatagctcgctcaatcgtcgcaacattgcctacaaatatgccatgtgagttgaaaattttaggcaacaaaaaaggggttacattaaaatgtgatgtatcatgtatatattgttgggcctgcatgttgtgatcttcaagggcacaacaacttagatgaacccaagttgaatatgattatgtatcctctcttactgttctatattagattacttcacagttgttgaatgatatttcgatggtcatatttgaatgttgtttgttatggaagaaagatgatattttggcactatacggtaccaagttttattatcttg

SEQ ID NO: 50059 - DNA, 3833 bp, Zea Mays
ggttgattttcaatctacaggggatgtagggaatagcgcatccatcaccgagatgggcaacctggttcctgagccatcctacgtggaagaagaggctagattatggagtgttgctactatgaattgcttagaatttgatgcctggaccacagttgttgaggagatggacaaaaatgctgaggttatgcatgctacaagattacttgtgttctgactgccaccatgtagcaacattgaggtattcttttagactaatataaactataattttccaaatcatttacactactatttttgtcttgtgttgtctagaggtgttgaatagggcgcccgaaagggcgctgcctgatgtagcaacgtcacacctgttcatcgcacatgttcatcattctacaaatgacaacgtcacacctgttcatcgcacatgttctgacttttgtcgagcggcaccacacatattcttatatcccacaccacaggttgcatctggttgcaaacaagctctgaccaaatatcctatctagctgcgagaactgtttccttcaccccttccgtcttaccaccttatctgactgcattttatccaaaaaaattagtaccagaaccgattgccttcaaagcgcaaacaaatggaaccagtgtaatgctaaaatggtcttcaggatcaaaacaatttgcacttctagaataactcactagatcacttcggtatacaaatcaacacttgaccactttcatcacactattgtggaaatcaacgcacaaccctggcgcacacttgcctaagaatgcacacgcaacaaatgactgggtcttgcagcctaaaatgtagtgtccacgacagactacataatgtttaaggatatgtaaaaaaagagcagccagacaacaaggtgaagtaacaactagaaaaacaaaaaaacagattcaaacctttttcctgacagtggtatgtgatctattccatggtacagttaatatcacttcaaaggcgccatgtgctatttatactgaatttacaagaccttatatactatgtcaacaaaccctcagaaatcaattctggggatacaggttaactgccagcaagatggttccaataaccagtcacccaaaaagtactagaatgtctggactcccatggaagtgtaaagcttcggctaaatccaacatcaaatgcccttaagcaaataaatatttggtgtaactgtaatgtcattcctaatcaaattggtactcatcaaaacggattttggtgtttgaaattggaaagttgtggtctagaatcggtatgtccattacctaaatctcacaaaggaaaataggtttgaagaatcatgtgcgataaatatataagtaaatattagccttggatgagtgttcttaccacttcttttaacgtctgtgtcccccaaaaaatgtgcttgcctttttaggctcagctcgatttcacagcaaaaaaccttccgagtcatgtttgaaaaactaggagctggcggccagtatcccactccttcacacaaagaagtaaacaattatcatcatgaatgaatttagaaagttgcaaacaaccaaagacactaatattattgccgtacgtatatttttaacattttcctccatcaacagagatctagagctcttgacggatttttggtgataaaagttagtcttccgaaatagcagagactaattgggtctaactagacctttcgcgtttatttaccaaggtgtgttagttgccgccaacatgctcttctagaacactattttgaacatgtgaaaagcttagcctaatctgaaatcttgcatgtaatttatttttatcttccctcattcacctgctcaaaattatctgaacaaatatttgatactactgttaatctatatttgagaaaggcatgtatgaaaaatgggagactccatttgagcacaacccttaagcatttgccaacacatttttcatttctatttgcttactttatctacagttacctctgctgtagagttcgaattgcatgatatgcttggtatgctgtggtactccaccctttttagctccatcaattagaaaacatttttggcttggttttggtgactggaaggagtctctagccagtcagagaaatgttgccagttttacatataactggaacgatttacggggcaagattttgaaagaattgactgcaaatgtttgtttgttatatatatatgttgtcctcaaaccatgtgttacaaatgttgggatatgccatcaggagagagcttagagcaggcctgtgcataatctacctccactgtactaacgatttagaattgtaggaaactagaattgcttcaatgttgttgatgtgttgtattgcttgagcctcatgacctatttacatatgagtacatcatttagggggcatgtactctaatagagtaacatgcatggtagttggtaggtctgtaggtgcatagggcaataggtagctgctatgcatcttattgggggttttggtgcttttctttttgtgctgatgtcctataaaatggtattttgtgtaaatgcatattcaatccccatctggacatttcacttcaattctctccgtaggaatcagagggtccgctttgggccctcaatttgttgctaaaccacttgcacctgataaccctccactgaaggtatgcccctaagtcaaaatcctagcaatgcacaaaaatgcatttgtctatcttttgtatttaatatgccttgccatttccaagatatagtcctaaacattttatcatgcttgatttctaggtaacatttattgacaacatcgatcctggtgggattgatcatcaaattgctcaactaggacctgaactggcaactagctactcttgtaattgtcatttctaaggtacataaagatcccaaactttcttattttgttgatattctcccagctgcaccatgagcttataagtagctgcagttcttggttttgcattgctttaccagggacaaaattatgtagccctttgttactggttgagttaatgcttctgttagtacaccagtcagatctatttgaatcttgtatgcttgattgtgcaaatttattaactgcatagcttgtcagtcattgtaacattgccttcaaatataccccagtgattttgaaattttaggcaacaaagaatatagttacattgcaatgcgacaaacttgtttgcatcatggctggatattggaggtaaagcattatcggacaatcatttagtttggcttagttacaggtgctttttaagtggtaacgcaagttgcagttcacacaaataacacctttgaatgtaatgtgttatcacacaaggctccagtgagttgtgttctatttgtttcttttctatttggtagtataatacttaatctttatgtttttgatgcacctgctaggcgctagcagtaccaaatattcctgttagtatgacagtcacatatttttaagtcttttatatttgattgtgcaattgtattgactgtatagctcgctcaatcgtcgcaacattgcctacaaatatgccatgtgagttgaaaattttaggcaacaaaaaaggggttacattaaaatgtgatgtatcatgtatatattgttgggcctgcatgttgtgatcttcaagggcacaacaacttagatgaacccaagttgaatatgattatgtatcctctcttactgttctatattagattacttcacagttgttgaatgatatttcgatggtcatatttgaatgttgtttgttatggaagaaagatgatattttggcactatacggtaccaagttttattatcttg

SEQ ID NO: 50060 - DNA, 3553 bp, Zea Mays
ggttgattttcaatctacaggggatgtagggaatagcgcatccatcaccgagatgggcaacctggttcctgagccatcctacgtggaagaagaggctagattatggagtgttgctactatgaattgcttagaatttgatgcctggaccacagttgttgaggagatggacaaaaatgctgaggttatgcatgctacaagattacttgtgttctgactgccaccatgtagcaacattgaggtattcttttagactaatataaactataattttccaaatcatttacactactatttttgtcttgtgttgtctagaggtgttgaatagggcgcccgaaagggcgctgcctgatgtagcaacgtcacacctgttcatcgcacatgttcatcattctacaaatgacaacgtcacacctgttcatcgcacatgttctgacttttgtcgagcggcaccacacatattcttatatcccacaccacaggttgcatctggttgcaaacaagctctgaccaaatatcctatctagctgcgagaactgtttccttcaccccttccgtcttaccaccttatctgactgcattttatccaaaaaaattagtaccagaaccgattgccttcaaagcgcaaacaaatggaaccagtgtaatgctaaaatggtcttcaggatcaaaacaatttgcacttctagaataactcactagatcacttcggtatacaaatcaacacttgaccactttcatcacactattgtggaaatcaacgcacaaccctggcgcacacttgcctaagaatgcacacgcaacaaatgactgggtcttgcagcctaaaatgtagtgtccacgacagactacataatgtttaaggatatgtaaaaaaagagcagccagacaacaaggtgaagtaacaactagaaaaacaaaaaaacagattcaaacctttttcctgacagtggtatgtgatctattccatggtacagttaatatcacttcaaaggcgccatgtgctatttatactgaatttacaagaccttatatactatgtcaacaaaccctcagaaatcaattctggggatacaggttaactgccagcaagatggttccaataaccagtcacccaaaaagtactagaatgtctggactcccatggaagtgtaaagcttcggctaaatccaacatcaaatgcccttaagcaaataaatatttggtgtaactgtaatgtcattcctaatcaaattggtactcatcaaaacggattttggtgtttgaaattggaaagttgtggtctagaatcggtatgtccattacctaaatctcacaaaggaaaataggtttgaagaatcatgtgcgataaatatataagtaaatattagccttggatgagtgttcttaccacttcttttaacgtctgtgtcccccaaaaaatgtgcttgcctttttaggctcagctcgatttcacagcaaaaaaccttccgagtcatgtttgaaaaactaggagctggcggccagtatcccactccttcacacaaagaagtaaacaattatcatcatgaatgaatttagaaagttgcaaacaaccaaagacactaatattattgccgtacgtatatttttaacattttcctccatcaacagagatctagagctcttgacggatttttggtgataaaagttagtcttccgaaatagcagagactaattgggtctaactagacctttcgcgtttatttaccaaggtgtgttagttgccgccaacatgctcttctagaacactattttgaacatgtgaaaagcttagcctaatctgaaatcttgcatgtaatttatttttatcttccctcattcacctgctcaaaattatctgaacaaatatttgatactactgttaatctatatttgagaaaggcatgtatgaaaaatgggagactccatttgagcacaacccttaagcatttgccaacacatttttcatttctatttgcttactttatctacagttacctctgctgtagagttcgaattgcatgatatgcttggtatgctgtggtactccaccctttttagctccatcaattagaaaacatttttggcttggttttggtgactggaaggagtctctagccagtcagagaaatgttgccagttttacatataactggaacgatttacggggcaagattttgaaagaattgactgcaaatgtttgtttgttatatatatatgttgtcctcaaaccatgtgttacaaatgttgggatatgccatcaggagagagcttagagcaggcctgtgcataatctacctccactgtactaacgatttagaattgtaggaaactagaattgcttcaatgttgttgatgtgttgtattgcttgagcctcatgacctatttacatatgagtacatcatttagggggcatgtactctaatagagtaacatgcatggtagttggtaggtctgtaggtgcatagggcaataggtagctgctatgcatcttattgggggttttggtgcttttctttttgtgctgatgtcctataaaatggtattttgtgtaaatgcatattcaatccccatctggacatttcacttcaattctctccgtaggaatcagagggtccgctttgggccctcaatttgttgctaaaccacttgcacctgataaccctccactgaaggtaacatttattgacaacatcgatcctggtgggattgatcatcaaattgctcaactaggacctgaactggcaactagctactcttgtaattgtcatttctaagtttatgatggtaacagaacacttgagggagggggaactgctgaagcgtgtttcatcaagatccaagcaacacatgagctattgattcatgatgaaaggagaagggcatatgatagagagcatcatgtgaacccaatgaagattaccaccatatcatgattcatcagctctaacatgtgtgagccaacactatgcttctccacttcagtacatggatatgactcttctatgtttaagccacgacaacttggtgtatttatgccaaagatttttcgagcactaacacaccaaaccaacgcctatggagtgcttttgtatacaacaatcacctgcttcttgcaccatccatggataatctacgtagttacatattactatactgaacatcctttcatagactacttgtacactgcctttttagaaccattgtaaaacctcatacggtacgtcagcgcctttgaaacagagatcaactgaacaacctgttcaatgtttccttttatttcatatgtattatgttgtcatactatgtccaacaatgcatttatattgctacaatatgtttatacttgatgcatgtgatacaaatccgtcatttatacatacaaagacaagctcttctggcaccgtagggcgccacggagcgcgccccttttttctagaaacaatagaagtgcaccgaagtaagcttcgtcacgatgacgcaggaaggcaacgcaagaagaaaatgttatccaagctgctaagagcaaatgataataatatccctgtgatattt

SEQ ID NO: 50061 - DNA, 1433 bp, Zea Mays
cgcatccatcaccgagatgggcaacctggttcctgagccatcctacgtggaagaagaggctagattatggagtgttgctactatgaattgcttagaatttgatgcctggaccacagttgttgaggagatggacaaaaatgctgaggttatgcatgctacaagattacttgtgttctgactgccaccatgtagcaacattgaggaatcagagggtccgctttgggccctcaatttgttgctaaaccacttgcacctgataaccctccactgaaggtatgcccctaagtcaaaatcctagcaatgcacaaaaatgcatttgtctatcttttgtatttaatatgccttgccatttccaagatatagtcctaaacattttatcatgcttgatttctaggtaacatttattgacaacatcgatcctggtgggattgatcatcaaattgctcaactaggacctgaactggcaactagctactcttgtaattgtcatttctaaggtacataaagatcccaaactttcttattttgttgatattctcccagctgcaccatgagcttataagtagctgcagttcttggttttgcattgctttaccagggacaaaattatgtagccctttgttactggttgagttaatgcttctgttagtacaccagtcagatctatttgaatcttgtatgcttgattgtgcaaatttattaactgcatagcttgtcagtcattgtaacattgccttcaaatataccccagtgattttgaaattttaggcaacaaagaatatagttacattgcaatgcgacaaacttgtttgcatcatggctggatattggaggtaaagcattatcggacaatcatttagtttggcttagttacaggtgctttttaagtggtaacgcaagttgcagttcacacaaataacacctttgaatgtaatgtgttatcacacaaggctccagtgagttgtgttctatttgtttcttttctatttggtagtataatacttaatctttatgtttttgatgcacctgctaggcgctagcagtaccaaatattcctgttagtatgacagtcacatatttttaagtcttttatatttgattgtgcaattgtattgactgtatagctcgctcaatcgtcgcaacattgcctacaaatatgccatgtgagttgaaaattttaggcaacaaaaaaggggttacattaaaatgtgatgtatcatgtatatattgttgggcctgcatgttgtgatcttcaagggcacaacaacttagatgaacccaagttgaatatgattatgtatcctctcttactgttctatattagattacttcacagttgttgaatgatatttcgatggtcatatttgaatgttgtttgttatggaagaaagatgatattttggcactatacggtaccaagttttattatcttg

SEQ ID NO: 50062 - DNA, 1153 bp, Zea Mays
cgcatccatcaccgagatgggcaacctggttcctgagccatcctacgtggaagaagaggctagattatggagtgttgctactatgaattgcttagaatttgatgcctggaccacagttgttgaggagatggacaaaaatgctgaggttatgcatgctacaagattacttgtgttctgactgccaccatgtagcaacattgaggaatcagagggtccgctttgggccctcaatttgttgctaaaccacttgcacctgataaccctccactgaaggtaacatttattgacaacatcgatcctggtgggattgatcatcaaattgctcaactaggacctgaactggcaactagctactcttgtaattgtcatttctaagtttatgatggtaacagaacacttgagggagggggaactgctgaagcgtgtttcatcaagatccaagcaacacatgagctattgattcatgatgaaaggagaagggcatatgatagagagcatcatgtgaacccaatgaagattaccaccatatcatgattcatcagctctaacatgtgtgagccaacactatgcttctccacttcagtacatggatatgactcttctatgtttaagccacgacaacttggtgtatttatgccaaagatttttcgagcactaacacaccaaaccaacgcctatggagtgcttttgtatacaacaatcacctgcttcttgcaccatccatggataatctacgtagttacatattactatactgaacatcctttcatagactacttgtacactgcctttttagaaccattgtaaaacctcatacggtacgtcagcgcctttgaaacagagatcaactgaacaacctgttcaatgtttccttttatttcatatgtattatgttgtcatactatgtccaacaatgcatttatattgctacaatatgtttatacttgatgcatgtgatacaaatccgtcatttatacatacaaagacaagctcttctggcaccgtagggcgccacggagcgcgccccttttttctagaaacaatagaagtgcaccgaagtaagcttcgtcacgatgacgcaggaaggcaacgcaagaagaaaatgttatccaagctgctaagagcaaatgataataatatccctgtgatattt

SEQ ID NO: 50063 - DNA, 858 bp, Zea Mays
cttcctgttatctagaacacaaaggccatttactccattgcagtggatggagttggagcaccaggctctcatgtacaatctcaatgcaatggccccgaacacttgagggagggggaactgctgaagcgtgtttcatcaagatccaagcaacacatgagctattgattcatgatgaaaggagaagggcatatgatagagagcatcatgtgaacccaatgaagattaccaccatatcatgattcatcagctctaacatgtgtgagccaacactatgcttctccacttcagtacatggatatgactcttctatgtttaagccacgacaacttggtgtatttatgccaaagatttttcgagcactaacacaccaaaccaacgcctatggagtgcttttgtatacaacaatcacctgcttcttgcaccatccatggataatctacgtagttacatattactatactgaacatcctttcatagactacttgtacactgcctttttagaaccattgtaaaacctcatacggtacgtcagcgcctttgaaacagagatcaactgaacaacctgttcaatgtttccttttatttcatatgtattatgttgtcatactatgtccaacaatgcatttatattgctacaatatgtttatacttgatgcatgtgatacaaatccgtcatttatacatacaaagacaagctcttctggcaccgtagggcgccacggagcgcgccccttttttctagaaacaatagaagtgcaccgaagtaagcttcgtcacgatgacgcaggaaggcaacgcaagaagaaaatgttatccaagctgctaagagcaaatgataataatatccctgtgatattt

SEQ ID NO: 50064 - DNA, 860 bp, Zea Mays
gccatttactccattgcagtggatggagttggagcaccaggctctcatgtacaatctcaatgcaatggccccgaacacttgagggagggggaactgctgaagcgtgtttcatcaagatccaagcaacacatgagctattgattcatgatgaaaggagaagggcatatgatagagagcatcatgtgaacccaatgaaggtcttataattttcttagccactcagattaccaccatatcatgattcatcagctctaacatgtgtgagccaacactatgcttctccacttcagtacatggatatgactcttctatgtttaagccacgacaacttggtgtatttatgccaaagatttttcgagcactaacacaccaaaccaacgcctatggagtgcttttgtatacaacaatcacctgcttcttgcaccatccatggataatctacgtagttacatattactatactgaacatcctttcatagactacttgtacactgcctttttagaaccattgtaaaacctcatacggtacgtcagcgcctttgaaacagagatcaactgaacaacctgttcaatgtttccttttatttcatatgtattatgttgtcatactatgtccaacaatgcatttatattgctacaatatgtttatacttgatgcatgtgatacaaatccgtcatttatacatacaaagacaagctcttctggcaccgtagggcgccacggagcgcgccccttttttctagaaacaatagaagtgcaccgaagtaagcttcgtcacgatgacgcaggaaggcaacgcaagaagaaaatgttatccaagctgctaagagcaaatgataataatatccctgtgatattt

SEQ ID NO: 50065 - DNA, 1113 bp, Zea Mays
cagaaactacatgagccatttgctcattgtattggatgtttctatatctggagctgtgctgttagagtattagagttctacactttacgatggaatagtttgcagattcctctattcatattttttgagtttaggtaattaactttatggatcgtcttaagtcctcatggttggggagtatgtactaacaactaaagtcaagactaagcaaaatgaatcaaacaagtaaagcctgtggctgcctgtagcttactgacaaataaaaacgaatcaagttggtaccatagtaacacaagaccagttgtcattatccttttattccatatgattatgcagtttatgatggtaacagaacacttgagggagggggaactgctgaagcgtgtttcatcaagatccaagcaacacatgagctattgattcatgatgaaaggagaagggcatatgatagagagcatcatgtgaacccaatgaagattaccaccatatcatgattcatcagctctaacatgtgtgagccaacactatgcttctccacttcagtacatggatatgactcttctatgtttaagccacgacaacttggtgtatttatgccaaagatttttcgagcactaacacaccaaaccaacgcctatggagtgcttttgtatacaacaatcacctgcttcttgcaccatccatggataatctacgtagttacatattactatactgaacatcctttcatagactacttgtacactgcctttttagaaccattgtaaaacctcatacggtacgtcagcgcctttgaaacagagatcaactgaacaacctgttcaatgtttccttttatttcatatgtattatgttgtcatactatgtccaacaatgcatttatattgctacaatatgtttatacttgatgcatgtgatacaaatccgtcatttatacatacaaagacaagctcttctggcaccgtagggcgccacggagcgcgccccttttttctagaaacaatagaagtgcaccgaagtaagcttcgtcacgatgacgcaggaaggcaacgcaagaagaaaatgttatccaagctgctaagagcaaatgataataatatccctgtgatattt

SEQ ID NO: 50066 - DNA, 2110 bp, Zea Mays
cggagccgttcaggcggccacccgcaggccgcaacgcagcacaacggctttctctccctgcttccctctccctgcttccctcctgctacaaataaaaattcgtggggcggccaaaccctaaaacgccccacagcgcaagcgagcagatcctcctccctttctgcttcctggcatcctctctgcctccccgcgccgatctcgagcacctggggagaccgcgagacgtgcgcctgatttttctcatcgcagcagccctcaagttccccacctcttttttcttgcagctttcaattaatctggttatttagctacatctttattttactttcattttacctttaatctgtttagttccattgcatcttctgcggttgcggttagtattgctgtttcttgctccttgtttcttgttcttttgcttctaaccatggacgcaggaacctactccatctcatcagagaagagccacacggcggcagcggcgcggccccctcttcaggaggccggcactcggccctacatgccgtcgctgagcacaggatcgcgcaacccgtcggccaagtgctacggcgataggttcatcccggacaggtcggcgatggatatggacatggcgcactacctgctcacggagcccaggagggacaaggagaacgcggtggcagcgtccccatccaaggaggcgtaccggaggctgctcgccgagaagttgctcaacaaccggacacgcatccttgccttcaggaacaagccgcctgtgtctgagaacgtctcggcagccatcacagcttcctctcaccatgccaagctggtcaagcagcgtcgacatattccccagtctgcagagaggactctggacgcaccagagcttgttgacgactactacctcaacctgcttgactgggggagcaacaacgtgctatccattgctctgggcgacacggtatacctgtgggatgcctccagtggatccacgtctgagcttgtgaccattcacgaggacagtggtcccatcaccagcgtcaactgggctccagatggccaccatatcgctattgggctcaactcatccgatatccagctctgggacaccagctccaaccgactgttgagaactctcagaggtgtgcatgaggaaagagttggctcactggcatggaacaacaacatcctcaccactggcagtatggatggcaagatcgtgaacaacgacgtgagaattaggaaccatgttgtacagacatacgaggggcacagccaggaggtgtgtgggctcaagtggtctggatcagggcagcagctggctagtgggggtaatgacaaccttctgcacatttgggatgtgtcgatggcatcccccatgtcaaccgctggccgcaaccagtggctgcacaggctcgaggaccacatgtccgctgtgaaggcactcgcgtggtgtcctttccagagcaacttgctggcaactggtggtggcggcagtgatagatgcatcaagttctggaacacacacactggagcatgtctgaactctgttaacactggatcacaggtctgtgcccttctatggaacaaaaatgagagagagctgctgagctcacacggattcacacagaaccaactaaccttgtggaagtacccatcaatggtaaagatggctgaactcagtggccatacctctcgtgtccttttcatggctcagagccctgatggttgcacagtagcatcagccgctgcggatgagacccttcggttctggaacgtatttggagaccctgaagtggccaagcctgcagccaaggcttcccacactgggatgttcaacagcttcaaccatattcgataggaacaagtcatgagaacgatcccttctgttggaaatggccgtgcatcatatgtgaggtcgattcctattgatgagatctatccacattgagtaagcacacaacatcagcgagcattgccatcatatgcatcattcagcgatgctaatcagaaatccaggatcagggccgtaaaagggttggactatatgtatctgcaacatcgcaagcaacagggaggccgtctcttcattcaaagaagcagaggaaaatggagcagaatcattact

SEQ ID NO: 50067 - DNA, 2373 bp, Zea Mays
cggagccgttcaggcggccacccgcaggccgcaacgcagcacaacggctttctctccctgcttccctctccctgcttccctcctgctacaaataaaaattcgtggggcggccaaaccctaaaacgccccacagcgcaagcgagcagatcctcctccctttctgcttcctggcatcctctctgcctccccgcgccgatctcgagcacctggggagaccgcgagacgtgcgcctgatttttctcatcgcagcagccctcaagttccccacctcttttttcttgcagctttcaattaatctggttatttagctacatctttattttactttcattttacctttaatctgtttagttccattgcatcttctgcggttgcggttagtattgctgtttcttgctccttgtttcttgttcttttgcttctaaccatggacgcaggaacctactccatctcatcagagaagagccacacggcggcagcggcgcggccccctcttcaggaggccggcactcggccctacatgccgtcgctgagcacaggatcgcgcaacccgtcggccaagtgctacggcgataggttcatcccggacaggtcggcgatggatatggacatggcgcactacctgctcacggagcccaggagggacaaggagaacgcggtggcagcgtccccatccaaggaggcgtaccggaggctgctcgccgagaagttgctcaacaaccggacacgcatccttgccttcaggaacaagccgcctgtgtctgagaacgtctcggcagccatcacagcttcctctcaccatgccaagctggtcaagcagcgtcgacatattccccagtctgcagagaggactctggacgcaccagagcttgttgacgactactacctcaacctgcttgactgggggagcaacaacgtgctatccattgctctgggcgacacggtatacctgtgggatgcctccagtggatccacgtctgagcttgtgaccattcacgaggacagtggtcccatcaccagcgtcaactgggctccagatggccaccatatcgctattgggctcaactcatccgatatccagctctgggacaccagctccaaccgactgttgagaactctcagaggtgtgcatgaggaaagagttggctcactggcatggaacaacaacatcctcaccactggcagtatggatggcaagatcgtgaacaacgacgtgagaattaggaaccatgttgtacagacatacgaggggcacagccaggaggtgtgtgggctcaagtggtctggatcagggcagcagctggctagtgggggtaatgacaaccttctgcacatttgggatgtgtcgatggcatcccccatgtcaaccgctggccgcaaccagtggctgcacaggctcgaggaccacatgtccgctgtgaaggcactcgcgtggtgtcctttccagagcaacttgctggcaactggtggtggcggcagtgatagatgcatcaagttctggaacacacacactggagcatgtctgaactctgttaacactggatcacaggtctgtgcccttctatggaacaaaaatgagagagagctgctgagctcacacggattcacacagaaccaactaaccttgtggaagtacccatcaatggtaaagatggctgaactcagtggccatacctctcgtgtccttttcatggctcagagccctgatggttgcacagtagcatcagccgctgcggatgagacccttcggttctggaacgtatttggagaccctgaagtggccaagcctgcagccaaggcttcccacactgggatgttcaacagcttcaaccatattcgataggaacaagtcatgagaacgatcccttctgttggaaatggccgtgcatcatatgtgaggtcgattcctattgatgagatctatccacattgagtaagcacacaacatcagcgagcattgccatcatatgcatcattcagcgatgctaatcagaaatccaggatcagggccgtaaaagggttggactatatgtatctgcaacatcgcaagcaacagggaggccgtctcttcattcaaagagtatcttttacacgacttcttgagtataaaaaactcatttgtacaatcctacctgtctattgaattgtctttagaaaaaaaaaagagactttattgtatgtactttttttatcttttatgtctgaagaactgttttccccttttcttttagaagtaggagccggtaaagctactctttcaatttgtcacaagcattatttatttttataatttgtcctctgtttccttgatttcacatcctcttatgacatgtttggctgaagagcagaggaaaatggagcagaatcattact

SEQ ID NO: 50068 - DNA, 660 bp, Zea Mays
aatagatgcaagctttacccctgcatttttgtagagaggaagttcatgactacctgaaaagcctttgccctgatctccacattactggaggtgaatatgatgagtatgctcgatacccagagactaagacacttacaattggtcagtttaagcttgggctgtgccatggtcatcaggttgttccatggggcgacctggactccctggcgatgctccagcggcagctggacgtggacatcctggtgaccgggcacagccatcagttcaaggcatataagcacgagggaggcgtggtgatcaaccctggctctgccacgggcgcctacagcagcatcacttacgacgtgaacccaagctttgtgctgatggacatcgaaggactccgtgtggtggtgtacgtctacgagctgattgacggcgaggtgaaggtggacaagatcgacttcaagaaagcagcgacgatgcaagcctagcactactatccttccacggtgtgattggtttcaagacacgtctaggttctgtttttttttctcttcttgattcagagctccctcaacactctctttctaccacttgtgctaacctgttcatgtgcaaataactagtcaggtttggaagtttactatttttacagttttgaaataatactatagtatt

SEQ ID NO: 50069 - DNA, 1000 bp, Zea Mays
cacaaaaggaacctatgcttgttttatgttccgtataatttatttcacgttgttccatggggcgacctggactccctggcgatgctccagcggcagctggacgtggacatcctggtgaccgggcacagccatcagttcaaggcatataagcacgagggaggcgtggtgatcaaccctggctctgccacgggcgcctacagcagcatcacttacgacgtgaacccaagctttgtgctgatggacatcgaaggactccgtgtggtggtgtacgtctacgagctgattgacggcgaggtgaaggtggacaagatcgacttcaagaaagcagcgacgatgcaagcctagcactactatccttccacggtgtgattggtttcaagacacgtctaggttctgtttttttttctcttcttgattcagagctccctcaacactctctttctaccacttgtgctaacctgttcatgtgcaaataactagtttaatacacattagctgatcatattacgacggcgtgatgttaaatgtcaagtaacttaaggcctgtttggcatggctctagagcaaaactccaaggaggagctgcatgtcaaacatccagactccaaagttgtaaattctatggagtttttggagctgcggagtagctcttttgctgatctgaaaactctaaaaaagcaatcatggagttttgagttatttacccgccattgttactggttacgagaaacaatctcaattaatcttaactctagagaagagctgctccacgcagagttttggagtagagctgctctaggtagaacatagtcatgtcaaacacgcccttagtatttggtcttgctttaaataagaaggggcgctctttaatttttgtttattttaagtaacaaatcgtagatggagtaattgcaagatagatttgcttgccgttagtttaattctgtctctgtaatctgttccgaaagtctgagtgctatagaaaaagaagatcgaaaaa

SEQ ID NO: 50070 - DNA, 1069 bp, Zea Mays
gaaacaaaaaacattcggggacgcgcctgcttgcttctttccccaaaccccaaaccgcaggtaggaagcaaaccgcacgccccgctccagaacggatcctcatctctcacgttgtcaccacagtctgaatccagaatccaactagtagctccataaaagcggcaatgatccagctgctgttcgtcgtgctggtggcggaggcgtccctgacggcggcgctgctcttcaagacgccgctgcggaagctcgccgtgctagtgatcgaccggctcaagcgcggccgccacgcgcccgtcgtcgtcaagacggtcgcgggcgtcatccttgccctgctcgcttcaacgctctacagcatgacacagatcgccggcagcacgagcgactccgactctggcggcgggcccacccccaccgaccaggtgctcttctcgcgtcacctcctggaggcgtgcctcatggtgattgaccggctccaccaatacatcagagatttgcgccggtttaaaaaggacttagaggctgtacgtaagcataataaaatgttggaggaggcaaaacatggaaactcggaggaggcaaagaaataccaggaagagattgccactctgaacaaggagatgaagaaactgaagctacaagtccaagaaaagacagaagaggtccatgtttcagaggacaaggcacttgctatccaaaaacaatccgaaggcttgctgactgaatatgaccgcctgctggaggataatcagcatcttcggacacagctgctgtcaattgaccgcaggctttccaactcttcttgaacgaagagtctatttaggggatgctgaagaatttctgtggaagatcatgttaccacccaaagtacgggcattcacatgttgaaatcatgaactctgctccatgaggttcccagactattttaaaagttgttattgagtaaaaaaagatgtacctcaataaaaaaaattcaaatcagaatctttttcgttttagaacgagaacttatcaagctaagcctgaagcagctgaaaggatggtaaccatggttatctgtccaagcccaaaa

SEQ ID NO: 50071 - DNA, 1093 bp, Zea Mays
gaaacaaaaaacattcggggacgcgcctgcttgcttctttccccaaaccccaaaccgcaggtaggaagcaaaccgcacgccccgctccagaacggatcctcatctctcacgttgtcaccacagtctgaatccagaatccaactagtagctccataaaagcggcaatgatccagctgctgttcgtcgtgctggtggcggaggcgtccctgacggcggcgctgctcttcaagacgccgctgcggaagctcgccgtgctagtgatcgaccggctcaagcgcggccgccacgcgcccgtcgtcgtcaagacggtcgcgggcgtcatccttgccctgctcgcttcaacgctctacagcatgacacagatcgccggcagcacgagcgactccgactctggcggcgggcccacccccaccgaccaggtgctcttctcgcgtcacctcctggaggcgtgcctcatggggtactccttatttcttgctctagtgattgaccggctccaccaatacatcagagatttgcgccggtttaaaaaggacttagaggctgtacgtaagcataataaaatgttggaggaggcaaaacatggaaactcggaggaggcaaagaaataccaggaagagattgccactctgaacaaggagatgaagaaactgaagctacaagtccaagaaaagacagaagaggtccatgtttcagaggacaaggcacttgctatccaaaaacaatccgaaggcttgctgactgaatatgaccgcctgctggaggataatcagcatcttcggacacagctgctgtcaattgaccgcaggctttccaactcttcttgaacgaagagtctatttaggggatgctgaagaatttctgtggaagatcatgttaccacccaaagtacgggcattcacatgttgaaatcatgaactctgctccatgaggttcccagactattttaaaagttgttattgagtaaaaaaagatgtacctcaataaaaaaaattcaaatcagaatctttttcgttttagaacgagaacttatcaagctaagcctgaagcagctgaaaggatggtaaccatggttatctgtccaagcccaaaa

SEQ ID NO: 50072 - DNA, 1453 bp, Zea Mays
atttagctgattacctttaaattaggaaaccaggtaaaacttgtagcaactgaagcacttgcaggcgcgctttcctcaccactcttccgtcttccctgcatgcaacgaagaacgaaccaacaaaaggaagctccccacccccgcctcggtggtgccgccatcagtccatcacacatccccgtcccctcccgtttccctttcgctccgctccccctcgctcggtcactcctcactcctcagtcctcactaacaatccgcaccaggactcatcagggccgcgcgcgcgcgccggcagcgatgcggtgggacgcagccgaggccgaggcggccctcgagcggatctgggacctccacgaccgcctcagcgatgccatcctcgccgtctcccgcgcgcacctcctcctgcccgctcccccgccccctcccgtgccgtccgcgccctccgccaaaggggcccaccgcatcggcgtcggtaggaacgggtgcgtcttcgtcaaggacggcgccgccggcggcggaggtgaggcgctggccgccgccgcggaggccctggccgaggccaggagcctgcacgccattcgctccgcgctcgaggacgtcgaggaccacctcgagtttttacacactgttcaatcacaacagcgggctgagcgagatgctgcaattgctagactggagcaaagccgtctagtccttgctatgaggttagcagaacatcgaggaaagaagtataaagtaatcgatgaggccttggcatttgttggtgaagtgagtgacaagagtcaatttatctcacctgaggatgttcgtgctacccatagccgatcagaggataacgcagatgacaacaggggcagtggttcaaggataatgtcaaacgtgttatcttgcagtttatcattagccaagaattcatttcgactggacaagatcgggggcactctcggtaacgctgcagtgtttgcagaagagaatcgagtacaatcttcaatcagggagctcacaaccgaatgggaaaggaaaacttctggaggtttacctagccagaggctgaagaattattaagctcacgctgttggctgtacagaaagttttgaccaaagctcagttttgttggttttgttagggcactgatcattctttacaacggactggaccctgttccaggcaaaaggcaaccatggaactgtctgtccggttctttttggatggatttgaaggataccacttattctatctcaaattgtaaatggttttgtgcttagagatgcattgtttgcaaaccgcgttcaagctaacttgaactgccgttttcgtactgcctactttcttgccgtgctcttgaggaggtgtggtaaggttcatcgcttgtgtggcaagtttcgggattgttggggctacagtatgatcacatgacatgctttgagttgtgagtactgacgttatttgcttt

SEQ ID NO: 50073 - DNA, 1077 bp, Zea Mays
ttgctcacagaacactagatgtagttggatgcattatacagacataaaatacagaacatgccacaccttgtgttgtccaagacgaagcacagtgccacagcatggctatacctacacagtgcacaatagctggacacaggaagcaacatggggatccatacaacataaaacctcaaaaccttacagacttatcctttcagtggacacaggaagcatgcctggatggcttgtgcaccctcacctttggtctcttcttgcgtgccagcctccgctccagcaccttgaccttctcacttaggtccgtgatgacccccatctgatcgttgccggacgccagaagcttttgcagaagctctttcagcttctggttctcttctgccagcgtcttctcgtcgctggccttcggatcatcaggagctggggaggcagaagaagccttgttctctgtctgcacagagaggtctttcagggaagcttcgtcttcagcaggatttgcacctgctgctgtaagtgtcggagcatccttcggcatctcgttgcatttgtccatctcagacaccggcacaccagaatcttcagcagaattttctccctctgtgcctgctagagcggccttctgagtcttggtgcattcatctgtctcagcgacatctgaatggatgttttctttccgagcatcagtttggctctctggtgacaccatctcaggcccctcgtagactgcgatgccaccatcctgtggacatgataattcacagctacctgaaccagggaagactgttccacctattgtatcgtcttcctcttctccgaggcttgggtgactcttctcaatgtcaggttccttcctcgatgcctcacaaagaggatcctcgaaatttgcagaacctcctgttaccttgtcaacagcaatagttacagttttctcctccacatgtgcttcctcatccttgccagaaacaccacattgcattttatcgtcagattcatccaagacggacagttctgggacagagacagactccgatcttggttccagcaaggtaggttgatcattcttttctacatctgcagaag

SEQ ID NO: 50074 - DNA, 813 bp, Zea Mays
cctccataccttactgatctgaaccgttggctttcaatcggatcgcccgctatcccctcctatccacaatatgatccctggcctctcatcctccgaaaactccactccttcgtcatccatgcgtcccctccccgccgcggccatggccaccgcgacgctgcccctccgcctcctcccctccaaaacgctgactctctccactctcccctccctgcgccgctccctctccgtcgccgctttggagccccggcgctggcgcctccgagccgccgccgaggaggcgcctgaggccgtggaggttgagttcgtggagcccgagacggaggctgaggagaaacccgcggtaccggagcccatcgaggctcagctggccgccgcgggggccgggaaggacgcggacatcttcgctgttgtcatgattggttcaagacagtacatagtgatgccgggcaggtatatatacacacagagactgaaaggtgccaatgtcaatgatcagatcatattaaacaaggtgctactggtgtcaactagagaaaaagcttacattgggatgccagtggtgaccaatgctgctgttcacgcagtggttgaagaacagggacgggatgataaagttatagtgttcaagtacaagaagaagaagaagtaccagaggaaacttggtcacagacagccaaacacaaggttaagaatcacaggcataagtggatacgaagagtaccctgctgacccaatacttgaccctgctgcagctttaaattaaactgacgtggtttgggtggcgcactcgacaacctggcttggtgtgac

SEQ ID NO: 50075 - DNA, 812 bp, Zea Mays
cctccataccttactgatctgaaccgttggctttcaatcggatcgcccgctatcccctcctatccacaatatgatccctggcctctcatcctccgaaaactccactccttcgtcatccatgcgtcccctccccgccgcggccatggccaccgcgacgctgcccctccgcctcctcccctccaaaacgctgactctctccactctcccctccctgcgccgctccctctccgtcgccgctttggagccccggcgctggcgcctccgagccgccgccgaggaggcgcctgaggccgtggaggttgagttcgtggagcccgagacggaggctgaggagaaacccgcggtaccggagcccatcgaggctcagctggccgccgcgggggccgggaaggacgcggacatcttcgctgttgtcatgattggttcaagacagtacatagtgatgccgggcaggtatatatacacacagagactgaaaggtgccaatgtcaatgatcagatcatattaaacaaggtgctactggtgtcaactagagaaaaagcttacattgggatgccagtggtgaccaatgctgctgttcacgcagtggttgaagaacagggacgggatgataaagttatagtgttcaagtacaagaagaagaagaagtaccagaggaaacttggtcacagacagccaaacacaaggttaagaatcacaggcataagtggatacgaagagtaccctgctgacccaatacttgaccctgctgcagctttaaattaaactacgtggtttgggtggcgcactcgacaacctggcttggtgtgac

SEQ ID NO: 50076 - DNA, 2881 bp, Zea Mays
ctggttgccaaggcaaagggccacaccctcacctcagcatctctctgctccacttctcctcgtccccgtccgacatcgcatcgcatcgcatcaccgcctctcgctttctgcccatcagccctccctctctctcctgcgtctccgaggcgcggacgacggcgacgacgcgaacgcccccgccgcctagttcttgtcgcggtgtggggggtgtccgctatttaatccttcgctggcagcaagttgatccttcccagctccggctcagtgttccggagaggtgcaaggtggaaggcacatttgctgggaattagggcaatcaacgtttaagtacatgtggtctactgctgtttgattattactgagattcaatcatttggtcagatgagagttctggctggggacttacaagtgtagcactgttgtcggcttgtgactaaatagcatcacttcacatacaacactggataatggatcgtagggatacttcagggtttgttagtggaggatgcaaaaataatgaagcctactagtttctctatatcttctaacttggtagctttattgacaattatttaacccagaagtgaggccagctggtacttcccataaagtttggttactctaatagcaatggaacccaggcatgggcgttcagcattcactataagtttctcaaatccaaatggctttgctaatcagtgcaccgccattccagccgtcagttattcagcggctggttctagccaacttgatgtgctggctcctactagaggttgcaagagaaagtggactgagttggctctaggtctgggtgacacatcaagctcagacagcagcaagcagagcatgggtactggctgcactgtttcttctctcaagggaagcgatgatgtctcatgtatggattacgacataagtttcaagttatctcttggcaatgaagatacttccaagctgcataaacaggcttgtggttctaaaaggactatggagaagcctcggttggatcttaagttatctttggctccatctcaatccgatgtaactgacgcggatctaatcagaagcagtgcacctcaggacatgtttgtgcagccgtacttgatgtcctcagtgccaacagtcgatgaaggatctacatctgctcgacatccatctggaggcatggtggtttccttccttaaccaggctgggatttctccgaaccagttgcccccacttaactctcatctggtccagggtccagcttgttcagcaccaacagtgctccaactgccaaaaagttcagctgccacttcttctgggtttgtccgcccacagcaacgcaacggtagcacaaagatctgttcagagccaggttgtgcaaaaggagccaggggttcatctgggcggtgcattgcccacggtgggggcagaaggtgccagaaagaaggctgcaacaaaggagccgaggggaggaccatcttctgtaaagcccatggagggggcaagcgctgtgagcgccttggatgcaccaaaagtgccgaaggccggacagatttctgcatagctcacggcggcgggcggcgttgcagtcatgacgggtgcaagagggcggcgcgaggcagatcgggcctgtgtatcaagcatggtggcgggaagaggtgccaaacgctgaactgcacaaagagcgcggaagggcggtcaggcatgtgcatcgctcatggtggcgggcggcgctgccagtacgctggctgcgggaagggagcccagggcagcacaaacttctgcaaggcccacggcggcggcaagagatgcacgcaccccgactgctccaagggcgcggaggggagcacggcgttctgcaaagcccacggaggcggcaagcgctgctcggctgacggctgcacgaagagcgtgcacggcgggacccagttctgcgtcgcgcacggaggcgggaagaggtgcgtggtggaagggtgcgggaagagcgcgagaggcaggaccgaccgctgcgtcggccatggcgggggcaagcggtgccactccgccggctgcgggaagagcgcgcaggggagcaccgatttctgcaagtcccacggcggtggcaggcgctgctcgtgggggcaccctggctcagacctcgggtctggtggcgctccctgcgaccggctggcgagaggcaagaaggggctgtgcgaccggcacaacccgctggtccatgacaacagcgtgcatgggggtgcgtcgttcggtggcttcagtgtcgtcagtgccgccgccctttctgagggagatggctctccatctccaggcaccgagacaagcatgcgcagcttcttcatgcacgcggtggaggctcctcgctgtgtggcggcctcggcccatgaaggccgggtgcatgggggcaacttcatgcctatcatgctcgacggtggcgtgggactcgggaagaggccggccgacaacgctgatgctggtgcctctgcccctcctcgcagctggaaaagtatggagaaggcctgtggatctgcgccgcgcagctggctgtagtatttgccagaagttcgtgacctgctcacagctcactctctccatctgggtctcctctgctcctgctccaagtgtctcccgtgtcctctggtcatgcgtggtatggtatgataacatgaactgtgtgtgtactggttggtcaggactcgggacttgtttggtactgtggatattgtggttgtttgtgctcttgtagcataggtctggtcgaacatacctactagtaacagtcgtcgtgtgcggtgtgtgattgaattgtaaatgaaaggaacgcctcgtcatgatacaaataaaaaatagtacctttcctcgcggcgcccgccaaataaaaagactccattgtttgtct

SEQ ID NO: 50077 - DNA, 2639 bp, Zea Mays
gagagatcgttcagttcttagctcaacccgtgcccttgcggttgatgaggcacatttgctgggaattagggcaatcaacgtttaagtacatgtggtctactgctgtttgattattactgagattcaatcatttggtcagatgagagttctggctggggacttacaagtgtagcactgttgtcggcttgtgactaaatagcatcacttcacatacaacactggataatggatcgtagggatacttcagggtttgttagtggaggatgcaaaaataatgaagcctactagtttctctatatcttctaacttggtagctttattgacaattatttaacccagaagtgaggccagctggtacttcccataaagtttggttactctaatagcaatggaacccaggcatgggcgttcagcattcactataagtttctcaaatccaaatggctttgctaatcagtgcaccgccattccagccgtcagttattcagcggctggttctagccaacttgatgtgctggctcctactagaggttgcaagagaaagtggactgagttggctctaggtctgggtgacacatcaagctcagacagcagcaagcagagcatgggtactggctgcactgtttcttctctcaagggaagcgatgatgtctcatgtatggattacgacataagtttcaagttatctcttggcaatgaagatacttccaagctgcataaacaggcttgtggttctaaaaggactatggagaagcctcggttggatcttaagttatctttggctccatctcaatccgatgtaactgacgcggatctaatcagaagcagtgcacctcaggacatgtttgtgcagccgtacttgatgtcctcagtgccaacagtcgatgaaggatctacatctgctcgacatccatctggaggcatggtggtttccttccttaaccaggctgggatttctccgaaccagttgcccccacttaactctcatctggtccagggtccagcttgttcagcaccaacagtgctccaactgccaaaaagttcagctgccacttcttctgggtttgtccgcccacagcaacgcaacggtagcacaaagatctgttcagagccaggttgtgcaaaaggagccaggggttcatctgggcggtgcattgcccacggtgggggcagaaggtgccagaaagaaggctgcaacaaaggagccgaggggaggaccatcttctgtaaagcccatggagggggcaagcgctgtgagcgccttggatgcaccaaaagtgccgaaggccggacagatttctgcatagctcacggcggcgggcggcgttgcagtcatgacgggtgcaagagggcggcgcgaggcagatcgggcctgtgtatcaagcatggtggcgggaagaggtgccaaacgctgaactgcacaaagagcgcggaagggcggtcaggcatgtgcatcgctcatggtggcgggcggcgctgccagtacgctggctgcgggaagggagcccagggcagcacaaacttctgcaaggcccacggcggcggcaagagatgcacgcaccccgactgctccaagggcgcggaggggagcacggcgttctgcaaagcccacggaggcggcaagcgctgctcggctgacggctgcacgaagagcgtgcacggcgggacccagttctgcgtcgcgcacggaggcgggaagaggtgcgtggtggaagggtgcgggaagagcgcgagaggcaggaccgaccgctgcgtcggccatggcgggggcaagcggtgccactccgccggctgcgggaagagcgcgcaggggagcaccgatttctgcaagtcccacggcggtggcaggcgctgctcgtgggggcaccctggctcagacctcgggtctggtggcgctccctgcgaccggctggcgagaggcaagaaggggctgtgcgaccggcacaacccgctggtccatgacaacagcgtgcatgggggtgcgtcgttcggtggcttcagtgtcgtcagtgccgccgccctttctgagggagatggctctccatctccaggcaccgagacaagcatgcgcagcttcttcatgcacgcggtggaggctcctcgctgtgtggcggcctcggcccatgaaggccgggtgcatgggggcaacttcatgcctatcatgctcgacggtggcgtgggactcgggaagaggccggccgacaacgctgatgctggtgcctctgcccctcctcgcagctggaaaagtatggagaaggcctgtggatctgcgccgcgcagctggctgtagtatttgccagaagttcgtgacctgctcacagctcactctctccatctgggtctcctctgctcctgctccaagtgtctcccgtgtcctctggtcatgcgtggtatggtatgataacatgaactgtgtgtgtactggttggtcaggactcgggacttgtttggtactgtggatattgtggttgtttgtgctcttgtagcataggtctggtcgaacatacctactagtaacagtcgtcgtgtgcggtgtgtgattgaattgtaaatgaaaggaacgcctcgtcatgatacaaataaaaaatagtacctttcctcgcggcgcccgccaaataaaaagactccattgtttgtct

SEQ ID NO: 50078 - DNA, 952 bp, Zea Mays
ctaaagctaaccccgacttgtagttgtgcttaaagtttacaaatttcagatttgcctattcacctccctctagacgactttcaatactattaagcacaagaatggattctattataatttattaaatgatattatggtgttatattttttatttgtatttaactgtgacagtattatctgttgtatgaaatgttcatatggaataaccgagcatgtgaaggatggaatgagttcaatttaagaaaaagaattaaatatggtagattggtgaaacaaagaagattgtatctctatgtttccctcgtcgatatcgtcattttctgcatcagtaatatcaatattggttggtctgtaacctttaattaagtacgaattcaataggcaaagcgaaataaagagagctaaatagagatgatctcatggtttacacttgagtaaggaggacatagaaaataggtatttgtgttcaacgaatatgagcacatatgtgtgcgtattatatatgcatatgcacatttataagacatataaatatgtaaatacgtgggcattggcgatgctaatcatctatgcttccacagtttaatacaacaacatacataaatatatggcaatatcatcattttttcttggtatgtttagttgagtaacacattgaagaaacatagaagtgagtgtgttgtctgaaataaaaactcgtacctattctagaagtacatgcagtctttctaaattaattctacaatagatatccttccaattgaattttgcagtagatggaagagcgtaaacttcctttaatagttaggaatgaactgatcagaagatgtttcgtcgatgtcgaggagtgtcaggtaaatttacttgatacattcgttgatgatacctgatccttcagaggtgtagggcttcagaagcaagctctgtttgttccaagtgtttcagcgacctg

SEQ ID NO: 50079 - DNA, 833 bp, Zea Mays
cttgatctcagcttggctagttgctcagttcttaataggaacaagaatataaactaagcctaaagtgcgctgtttaaaaaattaagcctgaagtgcactgtttaaaaaaactaagctatgtttaaattgcacgcacggatgcaccgatcaatttatcagaaaagacctaatcaaaacagaaagatttctaggtggagttctagattgcaagtttagattacacgcatggatgcaccgatcaaactaatctattctaccagcaaatcctcagcgatgatgcaagcaagcactagcagcttcttccataacgagaatcaaatatagacaacagatctaaactgaataagataaaaaggtggaagctcaccagatcctcagtgtcttctacaacgagagaggtggcgatatagaagcggtgggtgagggcggatggagggggactaagggaggtggagctgggggtgatggagttgaccaccggatccggaggaggagcaccggctgccggatccaaaggaagagacgagacgttccgtatgcggctttcggagggtagcgactggatctggatgaggtttggcggtgagcttcttcctatgtgtcttcttcgtcggcgccagtggaaggtcagtcgtgtccgaaggaggagaggcggcgacgatggagacgcgcacgtgcgccggggcggtggaggtgaaggtggcggccgatatctggaggacgagacggggcttacgtgcccgaccatccggggtgtgtttttcttccctgtgaaaaccgccccgaaccggggtcaagcttccctttccgtggacttccaaatgccaaaatag

SEQ ID NO: 50080 - DNA, 1987 bp, Zea Mays
ctaaaatcatgctagccactcgatagccatcgcacgggacaaatgcgccctttcggattcacacgacgcgaagcttctggactaatcgaccacctcctttcctttcatttcctttcctagagttgcaaattctcttcaacacgcgcacatgtgacatgccccatggtcgccgccgctccaggcatcctcccgtggcctcacctccctctcccttcctcctcccacccgtctgacgcctctgacgccgccgcagcagcaacagacgccaacacctccgcgtatgacatccagatcttcgagcccacctccatcgaggagcgtcgtcgcctcctgatccagcggcgtcgcctccgactcgccgcctcccatgcctcgcggctcaccgttgcctcgcgcgtctcctccaaactcatcagcgccaccgcctcctgctccagcggcgtcgcatccgatctgccgcctcccctcctcatggctcgtcgttgcctcccgcctcttccccaacctcgcccttgccgcccttggaggatcccaaatccgacgacgagctcagtaggcccacgcagacgcggatgtgctatgaacttcagacaacatattcctatcaagtggttgtttgcaagattgacgagttgtaggcaccaaatatatcgagtccttgctatcaacatatgagcatattattgtcaaactcaagcgtcagattctgtatcgatggcaatgggttccagaacagtacacaaggcaatttcaagacggttattcaattgctcaaatagttcagtaagtgagaacaaagaaacttcctaaatgtattaatatggtatgatgaatagtgtctcacacattgtgttgttgagctctggtctccatttccgtgctgctagaatgtgatttgaagtattcaccttttgacatggataaacatcttctctctgttgcatttgcaggcgaaagaaggctcatgtgctgcttcgaaaatcagttctaagaaggcaaccagggacaacaaacctgataagggaagaaacatgttctggataaatattggcctttgtttcaagactccaagcccgccaccatccagggatcaatcctcaccacgaggaccaggggtgatgccaacaaggtgtacgtgaacctttcctggggtgttgataatttagctctcgcaaacctgttcactgagcaaggaccatctatgacagtgagaacaagtcaagagggtttgatttttgtcatgtatggttccacagaagagcctgagaatgcattatcgaatctcaatggagctatgagttctgaaacccttttttcttccccttgctgctcgcggcatagcatttggaaattgaagtacaatttgtctttcacgatatactgaattgatttatcattgtcctgcaggacttggatgatagatccgtgttacgataccagcatcaaagccgcctagaagcaatactgaactttcacttgagatgtgagtagttgtagtagtagcccaaactctggaatatagtatcatcattcctagatatgtagttgtaaattctctgcccagaggtttgagctatcactcagattatgggttcaatgtcatgtatagagtcaagaaaaaacatcttctgtgcgtcttcgagtctttcaaaggcaaaacaaattacacgcgcgctgacgcgcaccaatttactagtatatattcaggtacaaagtttgttccgatttctgtgaattgttcatgcagaactgggttttggtggtcatcacgaaagttgtagcaagttttctgcagatttccataatacacatgtttgcctcatttggggccagtgaatcattctggataaacgactgcaggtccagagatcagtccgataatctaggaaaatgaatctcactataattcattcgatatttgatgtgcctatcacatcgagtatttgaataatacctacgaatactaaatatggcttaattataaaac

SEQ ID NO: 50081 - DNA, 1864 bp, Zea Mays
cacctcctttcctttcatttcctttcctagagttgcaaattctcttcaacacgcgcacatgtgacatgccccatggtcgccgccgctccaggcatcctcccgtggcctcacctccctctcccttcctcctcccacccgtctgacgcctctgacgccgccgcagcagcaacagacgccaacacctccgcgtatgacatccagatcttcgagcccacctccatcgaggagcgtcgtcgcctcctgatccagcggcgtcgcctccgactcgccgcctcccatgcctcgcggctcaccgttgcctcgcgcgtctcctccaaactcatcagcgccaccgcctcctgctccagcggcgtcgcatccgatctgccgcctcccctcctcatggctcgtcgttgcctcccgcctcttccccaacctcgcccttgccgcccttggaggatcccaaatccgacgacgagctcagtaggcccacgcagacgcggatgtgctatgaacttcaggttcgtcttttttcctgtacaccaattatagtcctccagcgcctacgaattttttttgcaaactttatacaagtccttcgctcaacaccgcctttggttgcaacggaagctgctactgttgttgaacgttagttgcttttattagatttatgcattttttttaaattcgagttcaaaattaagcaaaacacacgcttaatcaatttttttgcgttgttttcaactgatatatagacaacatattcctatcaagtggttgtttgcaagattgacgagttgtaggcaccaaatatatcgagtccttgctatcaacatatgagcatattattgtcaaagtaggcaacatctcatttaacagacaactctccgctctatcattctctcaaggctgatgtgcatttctgatatattgagctcaagcgtcagattctgtatcgatggcaatgggttccagaacagtacacaaggcaatttcaagacggttattcaattgctcaaatagttcaaatgtgatttgaagtattcaccttttgacatggataaacatcttctctctgttgcatttgcaggcgaaagaaggctcatgtgctgcttcgaaaatcagttctaagaaggcaaccagggacaacaaacctgataagggaagaaacatgttctggataaatattggcctttgtttcaagactccaagcccgccaccatccagggatcaatcctcaccacgaggaccaggggtgatgccaacaaggttgagaacaagtcaagagggtttgatttttgtcatgacttggatgatagatccgtgttacgataccagcatcaaagccgcctagaagcaatactgaactttcacttgagatgtgagtagttgtagtagtagcccaaactctggaatatagtatcatcattcctagatatgtagttgtaaattctctgcccagaggtttgagctatcactcagattatgggttcaatgtcatgtatagagtcaagaaaaaacatcttctgtgcgtcttcgagtctttcaaaggcaaaacaaattacacgcgcgctgacgcgcaccaatttactagtatatattcaggtacaaagtttgttccgatttctgtgaattgttcatgcagaactgggttttggtggtcatcacgaaagttgtagcaagttttctgcagatttccataatacacatgtttgcctcatttggggccagtgaatcattctggataaacgactgcaggtccagagatcagtccgataatctaggaaaatgaatctcactataattcattcgatatttgatgtgcctatcacatcgagtatttgaataatacctacgaatactaaatatggcttaattataaaac

SEQ ID NO: 50082 - DNA, 3331 bp, Zea Mays
tagagttgcaaattctcttcaacacgcgcacatgtgacatgccccatggtcgccgccgctccaggcatcctcccgtggcctcacctccctctcccttcctcctcccacccgtctgacgcctctgacgccgccgcagcagcaacagacgccaacacctccgcgtatgacatccagatcttcgagcccacctccatcgaggagcgtcgtcgcctcctgatccagcggcgtcgcctccgactcgccgcctcccatgcctcgcggctcaccgttgcctcgcgcgtctcctccaaactcatcagcgccaccgcctcctgctccagcggcgtcgcatccgatctgccgcctcccctcctcatggctcgtcgttgcctcccgcctcttccccaacctcgcccttgccgcccttggaggatcccaaatccgacgacgagctcagtaggcccacgcagacgcggatgtgctatgaacttcaggctgatgtgcatttctgatatattgagctcaagcgtcagattctgtatcgatggcaatgggttccagaacagtacacaaggcaatttcaagacggttattcaattgctcaaatagttcagtaagtgagaacaaagaaacttcctaaatgtattaatatggtatgatgaatagtgtctcacacattgtgttgttgagctctggtctccatttccgtgctgctagaatgtgatttgaagtattcaccttttgacatggataaacatcttctctctgttgcatttgcaggcgaaagaaggctcatgtgctgcttcgaaaatcagttctaagaaggcaaccagggacaacaaacctgataagggaagaaacatgttctggataaatattggcctttgtttcaagactccaaggtaagccattgaatgtaagtactcaatgtttcttttcttgtccagccaagtagccaagtagttgttgtgtctgttagattattagcccatatgtatctaaaaagattccaaaggacacataaaaaattgtttgcaataatatagatgtgtgctttagtgcccatggacactgacctgctgccaaatttctagccaatatataactttctgagcactacttaatttatctaaaatgcacgatcgtatatgaagtcaaaataaagtgtgatgcacaaacgaatgtatcccatgagctctacgtttcttttcctatgcaatattattgacatcatttataaaaagctacattttgtgtcagttagcgaacatagaatcctattgacagcttctataataagaaaaatcaataaaagaaatgcttggaaaaatggaatataatttacactcattaaattgtagtaatttccttaccttgatataggtgtttggaaattcttccttcaaatcattcaggcccttgtgccaccacgtctctgtcaagtagatggttgtattagcagaaaaagccaacactcctcacgagagccaaaacctcatcagggttagaccagtcttttgttcaagcgtcactggttgtcttacaactcttcttttccaacaagttcgcaaattgattgctaacaccttcccatttgattttttgcacacaacaaaatccacaataacactataaagtgaatatataaatcagaaaaaagatattcccactcatgctcaggcaattattttcaggatatgaatccttctaatttagactataaagtcacccattaggccattacaacttttttactatgcatttatgctttatttatacaccaaaaaaacttcaaaccctcgacaccattcatgcttcatttggtgtatgttttgctactttttccttgaacgtaaaagcattcttctctgatatctgtagctgtaaaaagattattgttctataactatctgttatttattgttccatcgctacctcactacctatttcctatctgatgttttgctataacatcgccatcgctgtgttgttcagacttaagttatgtgatgcttgttctttttagatgtaaatcctacaattttcgcctccaaagtcacccattacaatattttttactgaatctatatcttttacttatgtgtcactctgcattttttaagattcaaaaaaacattccttattttatacgcggtaaaacaacaaccttcataattcatcggatcttcttagtattatctctgacaaaaaaatataaagtctgtccccacaaatgcaaattagtttcttgattttcaattggttgttaaatgtctgacatgagcaatcagtttggttagcataaaaggatggtgattttgacaactacacagtttgtaggaacaacaataaaaacacttcattatatattagggttctatgatgttcaccattcatggcttcctaccagatcacacattgcataaatcaagttctacgctattggttacttttcagagattcagacagaacatttatattctgtttcctggattgagcatattccgttatagaatgtctagaaattttttcaaacttatgcatctgatatgatctctcgatatataagtactgacgaaagaagtgtgatggtcaattccagcccgccaccatccagggatcaatcctcaccacgaggaccaggggtgatgccaacaaggtgtacgtgaacctttcctggggtgttgataatttagctctcgcaaacctgttcactgagcaaggaccatctatgacagtgagaacaagtcaagagggtttgatttttgtcatgacttggatgatagatccgtgttacgataccagcatcaaagccgcctagaagcaatactgaactttcacttgagatgtgagtagttgtagtagtagcccaaactctggaatatagtatcatcattcctagatatgtagttgtaaattctctgcccagaggtttgagctatcactcagattatgggttcaatgtcatgtatagagtcaagaaaaaacatcttctgtgcgtcttcgagtctttcaaaggcaaaacaaattacacgcgcgctgacgcgcaccaatttactagtatatattcaggtacaaagtttgttccgatttctgtgaattgttcatgcagaactgggttttggtggtcatcacgaaagttgtagcaagttttctgcagatttccataatacacatgtttgcctcatttggggccagtgaatcattctggataaacgactgcaggtccagagatcagtccgataatctaggaaaatgaatctcactataattcattcgatatttgatgtgcctatcacatcgagtatttgaataatacctacgaatactaaatatggcttaattataaaac

SEQ ID NO: 50083 - DNA, 1903 bp, Zea Mays
gttgcaaattctcttcaacacgcgcacatgtgacatgccccatggtcgccgccgctccaggcatcctcccgtggcctcacctccctctcccttcctcctcccacccgtctgacgcctctgacgccgccgcagcagcaacagacgccaacacctccgcgtatgacatccagatcttcgagcccacctccatcgaggagcgtcgtcgcctcctgatccagcggcgtcgcctccgactcgccgcctcccatgcctcgcggctcaccgttgcctcgcgcgtctcctccaaactcatcagcgccaccgcctcctgctccagcggcgtcgcatccgatctgccgcctcccctcctcatggctcgtcgttgcctcccgcctcttccccaacctcgcccttgccgcccttggaggatcccaaatccgacgacgagctcagtaggcccacgcagacgcggatgtgctatgaacttcaggttcgtcttttttcctgtacaccaattatagtcctccagcgcctacgaattttttttgcaaactttatacaagtccttcgctcaacaccgcctttggttgcaacggaagctgctactgttgttgaacgttagttgcttttattagatttatgcattttttttaaattcgagttcaaaattaagcaaaacacacgcttaatcaatttttttgcgttgttttcaactgatatatagacaacatattcctatcaagtggttgtttgcaagattgacgagttgtaggcaccaaatatatcgagtccttgctatcaacatatgagcatattattgtcaaagtaggcaacatctcatttaacagacaactctccgctctatcattctctcaaggctgatgtgcatttctgatatattgagctcaagcgtcagattctgtatcgatggcaatgggttccagaacagtacacaaggcaatttcaagacggttattcaattgctcaaatagttcagtaagtgagaacaaagaaacttcctaaatgtattaatatggtatgatgaatagtgtctcacacattgtgttgttgagctctggtctccatttccgtgctgctagaatgtgatttgaagtattcaccttttgacatggataaacatcttctctctgttgcatttgcaggcgaaagaaggctcatgtgctgcttcgaaaatcagttctaagaaggcaaccagggacaacaaacctgataagggaagaaacatgttctggataaatattggcctttgtttcaagactccaagcccgccaccatccagggatcaatcctcaccacgaggaccaggggtgatgccaacaaggtgacttggatgatagatccgtgttacgataccagcatcaaagccgcctagaagcaatactgaactttcacttgagatgtgagtagttgtagtagtagcccaaactctggaatatagtatcatcattcctagatatgtagttgtaaattctctgcccagaggtttgagctatcactcagattatgggttcaatgtcatgtatagagtcaagaaaaaacatcttctgtgcgtcttcgagtctttcaaaggcaaaacaaattacacgcgcgctgacgcgcaccaatttactagtatatattcaggtacaaagtttgttccgatttctgtgaattgttcatgcagaactgggttttggtggtcatcacgaaagttgtagcaagttttctgcagatttccataatacacatgtttgcctcatttggggccagtgaatcattctggataaacgactgcaggtccagagatcagtccgataatctaggaaaatgaatctcactataattcattcgatatttgatgtgcctatcacatcgagtatttgaataatacctacgaatactaaatatggcttaattataaaac

SEQ ID NO: 50084 - DNA, 3597 bp, Zea Mays
aattctcttcaacacgcgcacatgtgacatgccccatggtcgccgccgctccaggcatcctcccgtggcctcacctccctctcccttcctcctcccacccgtctgacgcctctgacgccgccgcagcagcaacagacgccaacacctccgcgtatgacatccagatcttcgagcccacctccatcgaggagcgtcgtcgcctcctgatccagcggcgtcgcctccgactcgccgcctcccatgcctcgcggctcaccgttgcctcgcgcgtctcctccaaactcatcagcgccaccgcctcctgctccagcggcgtcgcatccgatctgccgcctcccctcctcatggctcgtcgttgcctcccgcctcttccccaacctcgcccttgccgcccttggaggatcccaaatccgacgacgagctcagtaggcccacgcagacgcggatgtgctatgaacttcaggttcgtcttttttcctgtacaccaattatagtcctccagcgcctacgaattttttttgcaaactttatacaagtccttcgctcaacaccgcctttggttgcaacggaagctgctactgttgttgaacgttagttgcttttattagatttatgcattttttttaaattcgagttcaaaattaagcaaaacacacgcttaatcaatttttttgcgttgttttcaactgatatatagacaacatattcctatcaagtggttgtttgcaagattgacgagttgtaggcaccaaatatatcgagtccttgctatcaacatatgagcatattattgtcaaagtaggcaacatctcatttaacagacaactctccgctctatcattctctcaaggctgatgtgcatttctgatatattgagctcaagcgtcagattctgtatcgatggcaatgggttccagaacagtacacaaggcaatttcaagacggttattcaattgctcaaatagttcagtaagtgagaacaaagaaacttcctaaatgtattaatatggtatgatgaatagtgtctcacacattgtgttgttgagctctggtctccatttccgtgctgctagaatgtgatttgaagtattcaccttttgacatggataaacatcttctctctgttgcatttgcaggcgaaagaaggctcatgtgctgcttcgaaaatcagttctaagaaggcaaccagggacaacaaacctgataagggaagaaacatgttctggataaatattggcctttgtttcaagactccaaggtaagccattgaatgtaagtactcaatgtttcttttcttgtccagccaagtagccaagtagttgttgtgtctgttagattattagcccatatgtatctaaaaagattccaaaggacacataaaaaattgtttgcaataatatagatgtgtgctttagtgcccatggacactgacctgctgccaaatttctagccaatatataactttctgagcactacttaatttatctaaaatgcacgatcgtatatgaagtcaaaataaagtgtgatgcacaaacgaatgtatcccatgagctctacgtttcttttcctatgcaatattattgacatcatttataaaaagctacattttgtgtcagttagcgaacatagaatcctattgacagcttctataataagaaaaatcaataaaagaaatgcttggaaaaatggaatataatttacactcattaaattgtagtaatttccttaccttgatataggtgtttggaaattcttccttcaaatcattcaggcccttgtgccaccacgtctctgtcaagtagatggttgtattagcagaaaaagccaacactcctcacgagagccaaaacctcatcagggttagaccagtcttttgttcaagcgtcactggttgtcttacaactcttcttttccaacaagttcgcaaattgattgctaacaccttcccatttgattttttgcacacaacaaaatccacaataacactataaagtgaatatataaatcagaaaaaagatattcccactcatgctcaggcaattattttcaggatatgaatccttctaatttagactataaagtcacccattaggccattacaacttttttactatgcatttatgctttatttatacaccaaaaaaacttcaaaccctcgacaccattcatgcttcatttggtgtatgttttgctactttttccttgaacgtaaaagcattcttctctgatatctgtagctgtaaaaagattattgttctataactatctgttatttattgttccatcgctacctcactacctatttcctatctgatgttttgctataacatcgccatcgctgtgttgttcagacttaagttatgtgatgcttgttctttttagatgtaaatcctacaattttcgcctccaaagtcacccattacaatattttttactgaatctatatcttttacttatgtgtcactctgcattttttaagattcaaaaaaacattccttattttatacgcggtaaaacaacaaccttcataattcatcggatcttcttagtattatctctgacaaaaaaatataaagtctgtccccacaaatgcaaattagtttcttgattttcaattggttgttaaatgtctgacatgagcaatcagtttggttagcataaaaggatggtgattttgacaactacacagtttgtaggaacaacaataaaaacacttcattatatattagggttctatgatgttcaccattcatggcttcctaccagatcacacattgcataaatcaagttctacgctattggttacttttcagagattcagacagaacatttatattctgtttcctggattgagcatattccgttatagaatgtctagaaattttttcaaacttatgcatctgatatgatctctcgatatataagtactgacgaaagaagtgtgatggtcaattccagcccgccaccatccagggatcaatcctcaccacgaggaccaggggtgatgccaacaaggtgacttggatgatagatccgtgttacgataccagcatcaaagccgcctagaagcaatactgaactttcacttgagatgtgagtagttgtagtagtagcccaaactctggaatatagtatcatcattcctagatatgtagttgtaaattctctgcccagaggtttgagctatcactcagattatgggttcaatgtcatgtatagagtcaagaaaaaacatcttctgtgcgtcttcgagtctttcaaaggcaaaacaaattacacgcgcgctgacgcgcaccaatttactagtatatattcaggtacaaagtttgttccgatttctgtgaattgttcatgcagaactgggttttggtggtcatcacgaaagttgtagcaagttttctgcagatttccataatacacatgtttgcctcatttggggccagtgaatcattctggataaacgactgcaggtccagagatcagtccgataatctaggaaaatgaatctcactataattcattcgatatttgatgtgcctatcacatcgagtatttgaataatacctacgaatactaaatatggcttaattataaaac

SEQ ID NO: 50085 - DNA, 3702 bp, Zea Mays
aattctcttcaacacgcgcacatgtgacatgccccatggtcgccgccgctccaggcatcctcccgtggcctcacctccctctcccttcctcctcccacccgtctgacgcctctgacgccgccgcagcagcaacagacgccaacacctccgcgtatgacatccagatcttcgagcccacctccatcgaggagcgtcgtcgcctcctgatccagcggcgtcgcctccgactcgccgcctcccatgcctcgcggctcaccgttgcctcgcgcgtctcctccaaactcatcagcgccaccgcctcctgctccagcggcgtcgcatccgatctgccgcctcccctcctcatggctcgtcgttgcctcccgcctcttccccaacctcgcccttgccgcccttggaggatcccaaatccgacgacgagctcagtaggcccacgcagacgcggatgtgctatgaacttcaggttcgtcttttttcctgtacaccaattatagtcctccagcgcctacgaattttttttgcaaactttatacaagtccttcgctcaacaccgcctttggttgcaacggaagctgctactgttgttgaacgttagttgcttttattagatttatgcattttttttaaattcgagttcaaaattaagcaaaacacacgcttaatcaatttttttgcgttgttttcaactgatatatagacaacatattcctatcaagtggttgtttgcaagattgacgagttgtaggcaccaaatatatcgagtccttgctatcaacatatgagcatattattgtcaaagtaggcaacatctcatttaacagacaactctccgctctatcattctctcaaggctgatgtgcatttctgatatattgagctcaagcgtcagattctgtatcgatggcaatgggttccagaacagtacacaaggcaatttcaagacggttattcaattgctcaaatagttcaaatgtgatttgaagtattcaccttttgacatggataaacatcttctctctgttgcatttgcaggcgaaagaaggtctgttgaagcagcctaaactattttcgttgtgatttccaacgctacattttccaatatgcctttgtttcatacatttttcctttttttcaaataaggctcatgtgctgcttcgaaaatcagttctaagaaggcaaccagggacaacaaacctgataagggaagaaacatgttctggataaatattggcctttgtttcaagactccaaggtaagccattgaatgtaagtactcaatgtttcttttcttgtccagccaagtagccaagtagttgttgtgtctgttagattattagcccatatgtatctaaaaagattccaaaggacacataaaaaattgtttgcaataatatagatgtgtgctttagtgcccatggacactgacctgctgccaaatttctagccaatatataactttctgagcactacttaatttatctaaaatgcacgatcgtatatgaagtcaaaataaagtgtgatgcacaaacgaatgtatcccatgagctctacgtttcttttcctatgcaatattattgacatcatttataaaaagctacattttgtgtcagttagcgaacatagaatcctattgacagcttctataataagaaaaatcaataaaagaaatgcttggaaaaatggaatataatttacactcattaaattgtagtaatttccttaccttgatataggtgtttggaaattcttccttcaaatcattcaggcccttgtgccaccacgtctctgtcaagtagatggttgtattagcagaaaaagccaacactcctcacgagagccaaaacctcatcagggttagaccagtcttttgttcaagcgtcactggttgtcttacaactcttcttttccaacaagttcgcaaattgattgctaacaccttcccatttgattttttgcacacaacaaaatccacaataacactataaagtgaatatataaatcagaaaaaagatattcccactcatgctcaggcaattattttcaggatatgaatccttctaatttagactataaagtcacccattaggccattacaacttttttactatgcatttatgctttatttatacaccaaaaaaacttcaaaccctcgacaccattcatgcttcatttggtgtatgttttgctactttttccttgaacgtaaaagcattcttctctgatatctgtagctgtaaaaagattattgttctataactatctgttatttattgttccatcgctacctcactacctatttcctatctgatgttttgctataacatcgccatcgctgtgttgttcagacttaagttatgtgatgcttgttctttttagatgtaaatcctacaattttcgcctccaaagtcacccattacaatattttttactgaatctatatcttttacttatgtgtcactctgcattttttaagattcaaaaaaacattccttattttatacgcggtaaaacaacaaccttcataattcatcggatcttcttagtattatctctgacaaaaaaatataaagtctgtccccacaaatgcaaattagtttcttgattttcaattggttgttaaatgtctgacatgagcaatcagtttggttagcataaaaggatggtgattttgacaactacacagtttgtaggaacaacaataaaaacacttcattatatattagggttctatgatgttcaccattcatggcttcctaccagatcacacattgcataaatcaagttctacgctattggttacttttcagagattcagacagaacatttatattctgtttcctggattgagcatattccgttatagaatgtctagaaattttttcaaacttatgcatctgatatgatctctcgatatataagtactgacgaaagaagtgtgatggtcaattccagcccgccaccatccagggatcaatcctcaccacgaggaccaggggtgatgccaacaaggtgtacgtgaacctttcctggggtgttgataatttagctctcgcaaacctgttcactgagcaaggaccatctatgacagtgagaacaagtcaagagggtttgatttttgtcatgacttggatgatagatccgtgttacgataccagcatcaaagccgcctagaagcaatactgaactttcacttgagatgtgagtagttgtagtagtagcccaaactctggaatatagtatcatcattcctagatatgtagttgtaaattctctgcccagaggtttgagctatcactcagattatgggttcaatgtcatgtatagagtcaagaaaaaacatcttctgtgcgtcttcgagtctttcaaaggcaaaacaaattacacgcgcgctgacgcgcaccaatttactagtatatattcaggtacaaagtttgttccgatttctgtgaattgttcatgcagaactgggttttggtggtcatcacgaaagttgtagcaagttttctgcagatttccataatacacatgtttgcctcatttggggccagtgaatcattctggataaacgactgcaggtccagagatcagtccgataatctaggaaaatgaatctcactataattcattcgatatttgatgtgcctatcacatcgagtatttgaataatacctacgaatactaaatatggcttaattataaaac

SEQ ID NO: 50086 - DNA, 3326 bp, Zea Mays
aattctcttcaacacgcgcacatgtgacatgccccatggtcgccgccgctccaggcatcctcccgtggcctcacctccctctcccttcctcctcccacccgtctgacgcctctgacgccgccgcagcagcaacagacgccaacacctccgcgtatgacatccagatcttcgagcccacctccatcgaggagcgtcgtcgcctcctgatccagcggcgtcgcctccgactcgccgcctcccatgcctcgcggctcaccgttgcctcgcgcgtctcctccaaactcatcagcgccaccgcctcctgctccagcggcgtcgcatccgatctgccgcctcccctcctcatggctcgtcgttgcctcccgcctcttccccaacctcgcccttgccgcccttggaggatcccaaatccgacgacgagctcagtaggcccacgcagacgcggatgtgctatgaacttcagacaacatattcctatcaagtggttgtttgcaagattgacgagttgtaggcaccaaatatatcgagtccttgctatcaacatatgagcatattattgtcaaactcaagcgtcagattctgtatcgatggcaatgggttccagaacagtacacaaggcaatttcaagacggttattcaattgctcaaatagttcagcgaaagaaggtctgttgaagcagcctaaactattttcgttgtgatttccaacgctacattttccaatatgcctttgtttcatacatttttcctttttttcaaataaggctcatgtgctgcttcgaaaatcagttctaagaaggcaaccagggacaacaaacctgataagggaagaaacatgttctggataaatattggcctttgtttcaagactccaaggtaagccattgaatgtaagtactcaatgtttcttttcttgtccagccaagtagccaagtagttgttgtgtctgttagattattagcccatatgtatctaaaaagattccaaaggacacataaaaaattgtttgcaataatatagatgtgtgctttagtgcccatggacactgacctgctgccaaatttctagccaatatataactttctgagcactacttaatttatctaaaatgcacgatcgtatatgaagtcaaaataaagtgtgatgcacaaacgaatgtatcccatgagctctacgtttcttttcctatgcaatattattgacatcatttataaaaagctacattttgtgtcagttagcgaacatagaatcctattgacagcttctataataagaaaaatcaataaaagaaatgcttggaaaaatggaatataatttacactcattaaattgtagtaatttccttaccttgatataggtgtttggaaattcttccttcaaatcattcaggcccttgtgccaccacgtctctgtcaagtagatggttgtattagcagaaaaagccaacactcctcacgagagccaaaacctcatcagggttagaccagtcttttgttcaagcgtcactggttgtcttacaactcttcttttccaacaagttcgcaaattgattgctaacaccttcccatttgattttttgcacacaacaaaatccacaataacactataaagtgaatatataaatcagaaaaaagatattcccactcatgctcaggcaattattttcaggatatgaatccttctaatttagactataaagtcacccattaggccattacaacttttttactatgcatttatgctttatttatacaccaaaaaaacttcaaaccctcgacaccattcatgcttcatttggtgtatgttttgctactttttccttgaacgtaaaagcattcttctctgatatctgtagctgtaaaaagattattgttctataactatctgttatttattgttccatcgctacctcactacctatttcctatctgatgttttgctataacatcgccatcgctgtgttgttcagacttaagttatgtgatgcttgttctttttagatgtaaatcctacaattttcgcctccaaagtcacccattacaatattttttactgaatctatatcttttacttatgtgtcactctgcattttttaagattcaaaaaaacattccttattttatacgcggtaaaacaacaaccttcataattcatcggatcttcttagtattatctctgacaaaaaaatataaagtctgtccccacaaatgcaaattagtttcttgattttcaattggttgttaaatgtctgacatgagcaatcagtttggttagcataaaaggatggtgattttgacaactacacagtttgtaggaacaacaataaaaacacttcattatatattagggttctatgatgttcaccattcatggcttcctaccagatcacacattgcataaatcaagttctacgctattggttacttttcagagattcagacagaacatttatattctgtttcctggattgagcatattccgttatagaatgtctagaaattttttcaaacttatgcatctgatatgatctctcgatatataagtactgacgaaagaagtgtgatggtcaattccagcccgccaccatccagggatcaatcctcaccacgaggaccaggggtgatgccaacaaggtgtacgtgaacctttcctggggtgttgataatttagctctcgcaaacctgttcactgagcaaggaccatctatgacagtgagaacaagtcaagagggtttgatttttgtcatgacttggatgatagatccgtgttacgataccagcatcaaagccgcctagaagcaatactgaactttcacttgagatgtgagtagttgtagtagtagcccaaactctggaatatagtatcatcattcctagatatgtagttgtaaattctctgcccagaggtttgagctatcactcagattatgggttcaatgtcatgtatagagtcaagaaaaaacatcttctgtgcgtcttcgagtctttcaaaggcaaaacaaattacacgcgcgctgacgcgcaccaatttactagtatatattcaggtacaaagtttgttccgatttctgtgaattgttcatgcagaactgggttttggtggtcatcacgaaagttgtagcaagttttctgcagatttccataatacacatgtttgcctcatttggggccagtgaatcattctggataaacgactgcaggtccagagatcagtccgataatctaggaaaatgaatctcactataattcattcgatatttgatgtgcctatcacatcgagtatttgaataatacctacgaatactaaatatggcttaattataaaac

SEQ ID NO: 50087 - DNA, 1761 bp, Zea Mays
aattctcttcaacacgcgcacatgtgacatgccccatggtcgccgccgctccaggcatcctcccgtggcctcacctccctctcccttcctcctcccacccgtctgacgcctctgacgccgccgcagcagcaacagacgccaacacctccgcgtatgacatccagatcttcgagcccacctccatcgaggagcgtcgtcgcctcctgatccagcggcgtcgcctccgactcgccgcctcccatgcctcgcggctcaccgttgcctcgcgcgtctcctccaaactcatcagcgccaccgcctcctgctccagcggcgtcgcatccgatctgccgcctcccctcctcatggctcgtcgttgcctcccgcctcttccccaacctcgcccttgccgcccttggaggatcccaaatccgacgacgagctcagtaggcccacgcagacgcggatgtgctatgaacttcagattctgtatcgatggcaatgggttccagaacagtacacaaggcaatttcaagacggttattcaattgctcaaatagttcagtaagtgagaacaaagaaacttcctaaatgtattaatatggtatgatgaatagtgtctcacacattgtgttgttgagctctggtctccatttccgtgctgctagaatgtgatttgaagtattcaccttttgacatggataaacatcttctctctgttgcatttgcaggcgaaagaaggctcatgtgctgcttcgaaaatcagttctaagaaggcaaccagggacaacaaacctgataagggaagaaacatgttctggataaatattggcctttgtttcaagactccaaggtaagccattgaatcccgccaccatccagggatcaatcctcaccacgaggaccaggggtgatgccaacaaggtgtacgtgaacctttcctggggtgttgataatttagctctcgcaaacctgttcactgagcaaggaccatctatgacagtgagaacaagtcaagagggtttgatttttgtcatgtatggttccacagaagagcctgagaatgcattatcgaatctcaatggagctatgagttctgaaacccttttttcttccccttgctgctcgcggcatagcatttggaaattgaagtacaatttgtctttcacgatatactgaattgatttatcattgtcctgcaggacttggatgatagatccgtgttacgataccagcatcaaagccgcctagaagcaatactgaactttcacttgagatgtgagtagttgtagtagtagcccaaactctggaatatagtatcatcattcctagatatgtagttgtaaattctctgcccagaggtttgagctatcactcagattatgggttcaatgtcatgtatagagtcaagaaaaaacatcttctgtgcgtcttcgagtctttcaaaggcaaaacaaattacacgcgcgctgacgcgcaccaatttactagtatatattcaggtacaaagtttgttccgatttctgtgaattgttcatgcagaactgggttttggtggtcatcacgaaagttgtagcaagttttctgcagatttccataatacacatgtttgcctcatttggggccagtgaatcattctggataaacgactgcaggtccagagatcagtccgataatctaggaaaatgaatctcactataattcattcgatatttgatgtgcctatcacatcgagtatttgaataatacctacgaatactaaatatggcttaattataaaac

SEQ ID NO: 50088 - DNA, 3573 bp, Zea Mays
ctcagtcaccttcgcctcacgcggtcacaccctcacctcggcgcccaacacaaagccagaaggagggacacagcgagaggaaagaccgaaagacagcagccaaagttggagggagacccaaggcagacggcaacgaggcagtcgcaaaggaaaggagggagctttgctgggctggagtggtcgagtggagtggctcaccgcctgaccgactgagccaggggggcattcgggcgtcccaccccgcgcgggggtgagagagacagagaggagaaaaagcggcgcctcatcacggtcgcccgcctgctcggcctcttcttctccctccccttcctgtctctgcgtcgcgttgcggttgtgcgcacctggtcgttctcggtttcctccccagccggtcctctcgggctccgttttccttccgggccgctcttggcgccttgctctccggcctcttccttgccggccacgcccttcctgcgcattgcttctctgatccccgccgggccgcttcgcgttcccttgattgactccactcgccgacttgtatgcgtccgtctcggcggcggcggttggtgctgtgagcgactcgcggcgggacgagggattccgtcgcgctcaggcgccctcaggagccgacggcatattgtgcatggagggtgaggaggacagctccggctccgtggtgcagcgcccgccgccaccgcagcagcagatacgggtggtgcgctgccccaagtgcgacaaacttttgccggagctgcccaattactccgtctacgtctgcggcggttgcggcgccacgctccaagcaaagaagagctcaggatctgatacttcttcagataagtctgatactgagcatgtgaagtaccttgaagtgcttgagagtttaccagataagaaaggagcagcatctgaagctagctgtgctgttcgagaagcagacaccaacaagatcgaagctaggtcagaagagagatttgcacccaacagaatggtggcggctgcacatagccaatctggattcagtttcgatgataaccatgctacttgtgcacccaactgcaccatgaaacttgaacctgcacttagagatgacagcagggaagttaaggaggcaaaataccgccgcattcgtcttgaagagaaaggagaagcaaagcagccagcgagggcaagtgacagatcaccaaggcctgtggttagcaacatcccttctaatgcttaccctttagaagggccatctgagtgtcataaaaaaccaggattcatatatgctagcggtgagaagggacatctgagtgacaagaatttagatgttcctagcaccagagccggtggccttgagaaagaccgtactgagcttctgcggatgctcgatgagttgagggaccaggtacagagatcctacgagattgctgacaagtcaagtgtgaatgcttcaacaaatagaatggtggatcctgcaagctcctacaatcctcatgagcgtctgagtcgattgcggtatggttcacctcagttgcagcgtaatggttctcagtgctcaccttctttgaatggacaggcacctgttgttcctcctgcttatccttcagtatctgtacagcaagatctccatggatacggacaatctgttgcacatatgggagctcctatttacccagccgccccttatccatggagaaacttcgataactatttccatggacaggcaccatatcttatgaacaaccctgtagaaggcccggtggtgtttggtgcacagaactacaatccaagaggtattaatggtctgatgcgacacaatcatctgagggacaccctgagtaaaaaacctgcacagacttgtgaaccaattgccaatggtgccccttttaccatatgctacaattgctatgaagtactgcatcttcccaagaattctctcatgctgggaaaagatgagtacaagctgcgctgtgggtcatgttcacatgcaattgtggtcagacttgatggaaacaggcttgatgtttcagcacctacaccagtttcacacttatcacctggaagtaaaaattactccaacaatggccaaggaagcaatggacaaaatgctgacgagagacttcttccatcttatagcttttctgcaggcagtcatttctctcaagaaaaagatttaccatcgaattccagtgaagcagacaaaatgcaatgcatatcatcttccgccagcatttctgaggatgataatagccgagctagttctaactcacagaagaactctggatctagagaccttcctcctgatgctgaagtggttatacgtgttccaagtttgcctcttcgtgatcattttggatattctccatcagagatggtggttgatgggtcaggcaaaggaagcagaagcacccggtctgaacatgagaagggtgtgttaactgaaagttttaagccaaacaaagtgaaagatgtacctgtagcaagcgtgctagacccatcagatgatgagtttgatgatcctgagtacaatcaagatccaggtgacggagcacaatgcgtcgatcacccaagggccacaaaatcgggcgactcctttttctccagcctgataaaaaagagctttaaaattaacggtgggatgggcaatggcagagcaaaggtgttcatcaatggctatcccatttctgatcgtgctgtgaggaaggcggagaagattgctggaccaatctatccgggtgaatactggtatgactaccgtgctggattctggggtgtcataggacagccctgccttggcatgatacccccatacattgcagaatttaactatcctatgcctaagaactgtgctggcggaaatactggtgtgttcatcaacagccgagaacttcaccagaaggacttggatttacttgtgggtcgagggcttcctgattctcctgatagatcatacagagttgagatttctggtaaagtatccgacgaagtatccggtgaagagctttattgccttggtaaactcgcaccaacggtggagaagatgaagcgtgggttcgggatgcgagtcccaaggaccattcagtgaaattggttcacatcgagaagcagaggctctgagatctgtgtgctgccacgcctttgtgctagagattgctaatgtcaccccgccttgaatcgttgcatctgtcgtagtggctgttttgatcgagtgtgtcatggtgtgaccatgtaattttgtctgtggattgttcaagctttctcaacgcacaagtttctgttgtgtagtctacgaactttactgctagtgcgtctgaacttgggcttggggaagtgcgagctgccaaaaaaaagttattgcattaacggctcaagcacggattcttttctttatcttgtgccgaagcccagcccaggcacctccgtccagggtatattttaggcctatttgttttggcttgtagtcgtgagaatcggcttctggtgtccaactctttgtttctcggtctatttctatcggcttctgttgtccaaacactttgtttctcagccttattctgtgataatcatttatacaaaaattgcgat

SEQ ID NO: 50089 - DNA, 2835 bp, Zea Mays
cttctttgaggactcccttgttgtattcgcaacttcctccggatttgccgtcgatcctgccacacttgcaaagaagagctcaggatctgatacttcttcagataagtctgatactgagcatgtgaagtaccttgaagtgcttgagagtttaccagataagaaaggagcagcatctgaagctagctgtgctgttcgagaagcagacaccaacaagatcgaagctaggtcagaagagagatttgcacccaacagaatggtggcggctgcacatagccaatctggattcagtttcgatgataaccatgctacttgtgcacccaactgcaccatgaaacttgaacctgcacttagagatgacagcagggaagttaaggaggcaaaataccgccgcattcgtcttgaagagaaaggagaagcaaagcagccagcgagggcaagtgacagatcaccaaggcctgtggttagcaacatcccttctaatgcttaccctttagaagggccatctgagtgtcataaaaaaccaggattcatatatgctagcggtgagaagggacatctgagtgacaagaatttagatgttcctagcaccagagccggtggccttgagaaagaccgtactgagcttctgcggatgctcgatgagttgagggaccaggtacagagatcctacgagattgctgacaagtcaagtgtgaatgcttcaacaaatagaatggtggatcctgcaagctcctacaatcctcatgagcgtctgagtcgattgcggtatggttcacctcagttgcagcgtaatggttctcagtgctcaccttctttgaatggacaggcacctgttgttcctcctgcttatccttcagtatctgtacagcaagatctccatggatacggacaatctgttgcacatatgggagctcctatttacccagccgccccttatccatggagaaacttcgataactatttccatggacaggcaccatatcttatgaacaaccctgtagaaggcccggtggtgtttggtgcacagaactacaatccaagaggtattaatggtctgatgcgacacaatcatctgagggacaccctgagtaaaaaacctgcacagacttgtgaaccaattgccaatggtgccccttttaccatatgctacaattgctatgaagtactgcatcttcccaagaattctctcatgctgggaaaagatgagtacaagctgcgctgtgggtcatgttcacatgcaattgtggtcagacttgatggaaacaggcttgatgtttcagcacctacaccagtttcacacttatcacctggaagtaaaaattactccaacaatggccaaggaagcaatggacaaaatgctgacgagagacttcttccatcttatagcttttctgcaggcagtcatttctctcaagaaaaagatttaccatcgaattccagtgaagcagacaaaatgcaatgcatatcatcttccgccagcatttctgaggatgataatagccgagctagttctaactcacagaagaactctggatctagagaccttcctcctgatgctgaagtggttatacgtgttccaagtttgcctcttcgtgatcattttggatattctccatcagagatggtggttgatgggtcaggcaaaggaagcagaagcacccggtctgaacatgagaagggtgtgttaactgaaagttttaagccaaacaaagtgaaagatgtacctgtagcaagcgtgctagacccatcagatgatgagtttgatgatcctgagtacaatcaagatccaggtgacggagcacaatgcgtcgatcacccaagggccacaaaatcgggcgactcctttttctccagcctgataaaaaagagctttaaaattaacggtgggatgggcaatggcagagcaaaggtgttcatcaatggctatcccatttctgatcgtgctgtgaggaaggcggagaagattgctggaccaatctatccgggtgaatactggtatgactaccgtgctggattctggggtgtcataggacagccctgccttggcatgatacccccatacattgcagaatttaactatcctatgcctaagaactgtgctggcggaaatactggtgtgttcatcaacagccgagaacttcaccagaaggacttggatttacttgtgggtcgagggcttcctgattctcctgatagatcatacagagttgagatttctggtaaagtatccgacgaagtatccggtgaagagctttattgccttggtaaactcgcaccaacggtggagaagatgaagcgtgggttcgggatgcgagtcccaaggaccattcagtgaaattggttcacatcgagaagcagaggctctgagatctgtgtgctgccacgcctttgtgctagagattgctaatgtcaccccgccttgaatcgttgcatctgtcgtagtggctgttttgatcgagtgtgtcatggtgtgaccatgtaattttgtctgtggattgttcaagctttctcaacgcacaagtttctgttgtgtagtctacgaactttactgctagtgcgtctgaacttgggcttggggaagtgcgagctgccaaaaaaaagttattgcattaacggctcaagcacggattcttttctttatcttgtgccgaagcccagcccaggcacctccgtccagggtatattttaggcctatttgttttggcttgtagtcgtgagaatcggcttctggtgtccaactctttgtttctcggtctatttctatcggcttctgttgtccaaacactttgtttctcagccttattctgtgataatcatttatacaaaaattgcgat

SEQ ID NO: 50090 - DNA, 2092 bp, Zea Mays
gcaccagatcaccgaaaacacaccatctccacctcgccgccgccgctcggatttccctctacctcaccctgtccggctccatggcgaccgccgcggtggagagcaagaggggcagcgcccggggccgcaaggcgctcgtggccgtgctcgacaacgaggctaacatctccgccgggaaggccgcccaggccgccgatctctcgtcctgctcagcgcagaagaaggcgaagcgggcgccgtcaaggagcagcaaggccaaggccgccgcggcgtcggcggccgtggtcgtggacgacatagccgagctgcaggggatgctagagcgcctgcggctggagaaggagaaggcggaggagatggttagggagcgggatgaggtcatccggaagaaggaggaggagatcgagaccagagacaaggagcaggagcgtctccaggccgagctcaggaaggcgcaacgcgccaaggagttcaagcctaccgtgagcttccccctcgtcaagtcgttgctggagaaagagcaagaagcagacgacaagggaaagaagaagaaggggaagggcggccacgagaggaagaagccgtgcccggcgtacgtgctctggctcaaggaccagtggaccgaggtcaagaaggagaaccctgaggccgacttcaaggaggtgtccaacacgctgggcgccaagtggaaggctctgggcgccgaggagaagcagccctatgaggatcgataccgccaggagaaggaggcctacctgcaggtggttggccaggagaagcgcgaggccgaggcgatgaagcttctcgaggagcagcagatgcagtggaccgccaaggagctgctggatcagtacctcaagttcaggcaggaggccgaggagggtgactgcaagaaggggaggaagaagaagagcaagaaggataaggacccctccaagcccaagcagcccatgtcggcctacttcgtgtactcgcaggagaggcgtgccacgctggtcgcggagaagaagaatgtacctgagattggcaagatcaccggggaagaatggaagaacatgacagaaggtcagagggctccctatgaggaggtcgcgaggaagcagaaggaagagtaccacaagcagatggaggtgtacaagcagaagaaggctgaggaagctgctagtcttgagaaggaagagcaggagcataagaaaatcatgaagcatgaggctctccagctgctcaagaagaaggagaaggcagataatatcatcaagaaaaccaaagaaaagcgccagaagaagaaacaggagaacgctgatcccaaccggcccaagagcaaggaagagaggaaacagctgatcgaggaacgcccgggcatcaataactcaaccctgaacgcgctcatcacggtgaagtggaaggaactgagcggcgaggagaggcaggcctggaatgcaaaggccgcgcctgccatggctgcgtacaagaaggagatggaggagtacactaaggcccaaagctcatctgcttgacagaataactaattcctgcgagtgagctttggttacaaggatcctcatctctgaatcctggtgtggtagattacttcgtgtgatctttagctttgtgtgaccttattagtcgcagcaatcagtgtaatggcggttcatatggtttagtggcagtttatattgttgccacgggcccaggaattgagtaatctttcagttctgacatttgctgaaatggagagttctaatggaggggccgagggggcagccatgggatattagacccctctactcagtcggcatctgccgtgatgatggagatggacaccggcaatgtctgtttgacacgaaatgtttcatcgccaaaattatcaaatactgaattaatttgaacgctcaatctagtcttaaatcgtttttttgtttgtttgttactaaagcccaacgcgtcgttgccaccgcgcaccgtctcgtcgtagcaggtaaggtctgtatgattcaagagaaaaggcaggaaacgaggcacggagctcacagtgatcgctgggagaattcaatttacaccacccttaaataaatacgatctagacatttca

SEQ ID NO: 50091 - DNA, 2059 bp, Zea Mays
gcaccagatcaccgaaaacacaccatctccacctcgccgccgccgctcggatttccctctacctcaccctgtccggctccatggcgaccgccgcggtggagagcaagaggggcagcgcccggggccgcaaggcgctcgtggccgtgctcgacaacgaggctaacatctccgccgggaaggccgcccaggccgccgatctctcgtcctgctcagcgcagaagaaggcgaagcgggcgccgtcaaggagcagcaaggccaaggccgccgcggcgtcggcggccgtggtcgtggacgacatagccgagctgcaggggatgctagagcgcctgcggctggagaaggagaaggcggaggagatggttagggagcgggatgaggtcatccggaagaaggaggaggagatcgagaccagagacaaggagcaggagcgtctccaggccgagctcaggaaggcgcaacgcgccaaggagttcaagcctaccgtgagcttccccctcgtcaagtcgttgctggagaaagagcaagaagcagacgacaagggaaagaagaagaaggggaagggcggccacgagaggaagaagccgtgcccggcgtacgtgctctggctcaaggaccagtggaccgaggtcaagaaggagaaccctgaggccgacttcaaggaggtgtccaacacgctgggcgccaagtggaaggctctgggcgccgaggagaagcagccctatgaggatcgataccgccaggagaaggaggcctacctgcaggtggttggccaggagaagcgcgaggccgaggcgatgaagcttctcgaggagcagcagatgcagtggaccgccaaggagctgctggatcagtacctcaagttcaggcaggaggccgaggagggtgactgcaagaaggggaggaagaagaagagcaagaaggataaggacccctccaagcccaagcagcccatgtcggcctacttcgtgtactcgcaggagaggcgtgccacgctggtcgcggagaagaagaatgtacctgagattggcaagatcaccggggaagaatggaagaacatgacagaaggtcagagggctccctatgaggaggtcgcgaggaagcagaaggaagagtaccacaagcagatggaggtgtacaagcagaagaaggctgaggaagctgctagtcttgagaaggaagagcaggagcataagaaaatcatgaagcatgaggctctccagctgctcaagaagaaggagaaggcagataatatcatcaagaggccagcctcttcctttcttcttttcagcaaggaagagaggaaacagctgatcgaggaacgcccgggcatcaataactcaaccctgaacgcgctcatcacggtgaagtggaaggaactgagcggcgaggagaggcaggcctggaatgcaaaggccgcgcctgccatggctgcgtacaagaaggagatggaggagtacactaaggcccaaagctcatctgcttgacagaataactaattcctgcgagtgagctttggttacaaggatcctcatctctgaatcctggtgtggtagattacttcgtgtgatctttagctttgtgtgaccttattagtcgcagcaatcagtgtaatggcggttcatatggtttagtggcagtttatattgttgccacgggcccaggaattgagtaatctttcagttctgacatttgctgaaatggagagttctaatggaggggccgagggggcagccatgggatattagacccctctactcagtcggcatctgccgtgatgatggagatggacaccggcaatgtctgtttgacacgaaatgtttcatcgccaaaattatcaaatactgaattaatttgaacgctcaatctagtcttaaatcgtttttttgtttgtttgttactaaagcccaacgcgtcgttgccaccgcgcaccgtctcgtcgtagcaggtaaggtctgtatgattcaagagaaaaggcaggaaacgaggcacggagctcacagtgatcgctgggagaattcaatttacaccacccttaaataaatacgatctagacatttca

SEQ ID NO: 50092 - DNA, 3386 bp, Zea Mays
ctacgatccccaacggcccaattcaacccgccccacgcgacgccgaccgcagatccttcatctctttcctccctcgtaggcgaacccgactcaaaccctagccccctctccttgccatccccgcccatggatcgcgatcgctcctcacggcgcactcgcaacgacgacgggcaccaccgatcccgcggccgggacgacgaccggcaccgccgccgtagtcgccacgacaccgaggatcaccagcacgacggtggagacgaggaccgtcgccaccgccgccaccgcgacaaggacggtggcagaggcggcgaggatgaccgccggcaccgtgaccatcacgataaggacgacagccgttgccaccgctaccgtgacggcggtgacgacgatcgccgccgcgggaaccgacgttccgtttccccgtccgagtccccgccaccctcggcgaagcgggaccgctcgtctagccgcccccgggagcttgtcgagcgccgcgactccaccgaccgcgagccgcggtcgccgtcgcggaagagaaaggggcacgagggcggtggcgacggggacgagcccggccgcgaagggggcaagcgggccagggcctccgtagacccgcctccacccaaggaggagaggcctaggcgggagcgccggaggtttgaggatgtcggtgcgaatgggaagaatggtgatgtgagtaagtcgagtaaggaaatctcatctcatgggcagaagggggagttatcaattaacggagattcacagaacggcaatgggcctaatgctggttctcagcaactgctcagtgccgttcctatgccatcttctgttcccattccttcaaagatggaagtgcaacatctgctgctggcaaaagtagtaacctatctcttgatgctttagccaaagcaaaaaaagctttgcaactgaagaaggaactgtcagaaaaactcaagaaattacctatgcttaataataagcttggtacatctgttactgctacacaagtttctaaagaagaagcaaaaacttctgtatcagctgtagatgcacaactcttttctaaaggagaagcaaaacctactgatgtttctgttctgccaactagtaccatctctggaacgccggccgtaggtggtgctatcggtattccaggtcttacgaacattcccaatcttgaatctgtgaagcgagcccaagaacttgctgctaagatggggtttcgccaagatccacaatttggtcctcttatcaacttattccctggtacatccactgaagttactgtgccacaaaggcctgcaaaggctcctgttcttcgccttgatgcccaaggtagggaaattgatgagcagggaaacgttatcagcatgacaaagccaacaaatctgagtactctgaaggtcaatataaacaagcagaagaaagaggcttttcaaataatcaagccggacttggactctcttgcaaaatcaagtgttcattttgatgaacggatgggcataaaccaaaagaagctccttcgtcttaaaaggccaggatttcagttcgttgaagagggtaaactcactaggcaggctgaattgcagaaaattaagagtcaatttggtgaagcgcaagctaaagagctcaaagtaaagcaagcccagcttgctaaggcaaagacagaagtagacatgaatccaaaccttattgaggttgctcttggtgtgagagctccaaaacaaaagcagaaggaagagatccctgaaattgagccatgggatgcaaaaattttactttctgccacatatgaggatgtctctgtggagaaacttaatttggacaagatcaccatatatgttgaacatccagaaccatatgatccacctgctgagcctgcaccaccgccgccccagccactgaagttgactaagaaggagcagaagaagttgagaacacaaaggcgtcttgctaaggaaaaagataggcaagaaatgattaggcaaggcctcttggagccacctaagcccaaggtcaaaatgagcaatcttatgaaagtgctaggctctgaagctgtccaagatcccacacggatggagatggaaataagaactgcggctgcagagcgtgagcaggctcacgttgaccgtaacattgcccgcaagctcacaccatctgagcgccgtgagaagaaagaacggaagctttttgatgatccaactaacacagtggagactatagtttgtgtttacaagataagagacctgtcccatccacagacacgcttcaaagttgatgtgaatgcacaagagaataaactgacaggtgctgcggtcattactgatagtatcagtgttgtggttgttgaaggggggaaaaagtcaatcaaaaggtataataagctcatgctaaaccgtatagattgggctgctgctgttggtggtgatgaagacgcagaagcagaagcggaagctgacaagccagtgaatagctgtgaattggtctggcagggtagtgtggcaaagcccaccttccacaggttcactgtacataactgccggagtgaatctgcagctaagaagatattcgttgatgcttctgttcctcactactgggatcttgctgtcaattcctcggagggttctccctgagcaaagcacctgttcagaaccttggtagctactgctgatctttgctggctacatgctagttatgtgtggccagtgttatagcgcttgttatggtaagacccttaccacgagtatctacatcaatggcctcatcagttgaagtactgaactcagtaatgcctggtgttagggggtgtttatccctccattttatttcatttgtccctagattgccaaatacagccatatttgtcaatttaggaactaaaatggaataaaatgtagggactaaaaattagtccctataaaccgaacacccccttaatctgttgtgaacatgctatttcagagatgttattgttggattttcctgtggcctagaaactgttatgtgagcaactgttgaattttgcacgctcagcgtgcatttggaataaaccaattgcatcaaatgactgcgtgtatttagtattgttgcggtgtgaattgcgggcagtgcctgcacatcaattacaaattcatcaacttgtgtggatgtttataatggttcatcaattttaaaagtataattctggatcaataaacttttcaagctcccttggctcgaatttttttttcaagttgtttaacgtactcactcggtcctaaaagaccatctcaagttgtttaggcacacaattacaagttcatcaacttgtgtggatgtttataatggttcatcaactttaaaagtataattctggatcaataaacttttcaagctcccttggctcg

SEQ ID NO: 50093 - DNA, 3391 bp, Zea Mays
ctacgatccccaacggcccaattcaacccgccccacgcgacgccgaccgcagatccttcatctctttcctccctcgtaggcgaacccgactcaaaccctagccccctctccttgccatccccgcccatggatcgcgatcgctcctcacggcgcactcgcaacgacgacgggcaccaccgatcccgcggccgggacgacgaccggcaccgccgccgtagtcgccacgacaccgaggatcaccagcacgacggtggagacgaggaccgtcgccaccgccgccaccgcgacaaggacggtggcagaggcggcgaggatgaccgccggcaccgtgaccatcacgataaggacgacagccgttgccaccgctaccgtgacggcggtgacgacgatcgccgccgcgggaaccgacgttccgtttccccgtccgagtccccgccaccctcggcgaagcgggaccgctcgtctagccgcccccgggagcttgtcgagcgccgcgactccaccgaccgcgagccgcggtcgccgtcgcggaagagaaaggggcacgagggcggtggcgacggggacgagcccggccgcgaagggggcaagcgggccagggcctccgtagacccgcctccacccaaggaggagaggcctaggcgggagcgccggaggtttgaggatgtcggtgcgaatgggaagaatggtgatgtgagtaagtcgagtaaggaaatctcatctcatgggcagaagggggagttatcaattaacggagattcacagaacggcaatgggcctaatgctggttctcagcaactgctcagtgccgttcctatgccatcttctgttcccattccttcaaagtacagatggaagtgcaacatctgctgctggcaaaagtagtaacctatctcttgatgctttagccaaagcaaaaaaagctttgcaactgaagaaggaactgtcagaaaaactcaagaaattacctatgcttaataataagcttggtacatctgttactgctacacaagtttctaaagaagaagcaaaaacttctgtatcagctgtagatgcacaactcttttctaaaggagaagcaaaacctactgatgtttctgttctgccaactagtaccatctctggaacgccggccgtaggtggtgctatcggtattccaggtcttacgaacattcccaatcttgaatctgtgaagcgagcccaagaacttgctgctaagatggggtttcgccaagatccacaatttggtcctcttatcaacttattccctggtacatccactgaagttactgtgccacaaaggcctgcaaaggctcctgttcttcgccttgatgcccaaggtagggaaattgatgagcagggaaacgttatcagcatgacaaagccaacaaatctgagtactctgaaggtcaatataaacaagcagaagaaagaggcttttcaaataatcaagccggacttggactctcttgcaaaatcaagtgttcattttgatgaacggatgggcataaaccaaaagaagctccttcgtcttaaaaggccaggatttcagttcgttgaagagggtaaactcactaggcaggctgaattgcagaaaattaagagtcaatttggtgaagcgcaagctaaagagctcaaagtaaagcaagcccagcttgctaaggcaaagacagaagtagacatgaatccaaaccttattgaggttgctcttggtgtgagagctccaaaacaaaagcagaaggaagagatccctgaaattgagccatgggatgcaaaaattttactttctgccacatatgaggatgtctctgtggagaaacttaatttggacaagatcaccatatatgttgaacatccagaaccatatgatccacctgctgagcctgcaccaccgccgccccagccactgaagttgactaagaaggagcagaagaagttgagaacacaaaggcgtcttgctaaggaaaaagataggcaagaaatgattaggcaaggcctcttggagccacctaagcccaaggtcaaaatgagcaatcttatgaaagtgctaggctctgaagctgtccaagatcccacacggatggagatggaaataagaactgcggctgcagagcgtgagcaggctcacgttgaccgtaacattgcccgcaagctcacaccatctgagcgccgtgagaagaaagaacggaagctttttgatgatccaactaacacagtggagactatagtttgtgtttacaagataagagacctgtcccatccacagacacgcttcaaagttgatgtgaatgcacaagagaataaactgacaggtgctgcggtcattactgatagtatcagtgttgtggttgttgaaggggggaaaaagtcaatcaaaaggtataataagctcatgctaaaccgtatagattgggctgctgctgttggtggtgatgaagacgcagaagcagaagcggaagctgacaagccagtgaatagctgtgaattggtctggcagggtagtgtggcaaagcccaccttccacaggttcactgtacataactgccggagtgaatctgcagctaagaagatattcgttgatgcttctgttcctcactactgggatcttgctgtcaattcctcggagggttctccctgagcaaagcacctgttcagaaccttggtagctactgctgatctttgctggctacatgctagttatgtgtggccagtgttatagcgcttgttatggtaagacccttaccacgagtatctacatcaatggcctcatcagttgaagtactgaactcagtaatgcctggtgttagggggtgtttatccctccattttatttcatttgtccctagattgccaaatacagccatatttgtcaatttaggaactaaaatggaataaaatgtagggactaaaaattagtccctataaaccgaacacccccttaatctgttgtgaacatgctatttcagagatgttattgttggattttcctgtggcctagaaactgttatgtgagcaactgttgaattttgcacgctcagcgtgcatttggaataaaccaattgcatcaaatgactgcgtgtatttagtattgttgcggtgtgaattgcgggcagtgcctgcacatcaattacaaattcatcaacttgtgtggatgtttataatggttcatcaattttaaaagtataattctggatcaataaacttttcaagctcccttggctcgaatttttttttcaagttgtttaacgtactcactcggtcctaaaagaccatctcaagttgtttaggcacacaattacaagttcatcaacttgtgtggatgtttataatggttcatcaactttaaaagtataattctggatcaataaacttttcaagctcccttggctcg

SEQ ID NO: 50094 - DNA, 3223 bp, Zea Mays
caacccgccccacgcgacgccgaccgcagatccttcatctctttcctccctcgtaggcgaacccgactcaaaccctagccccctctccttgccatccccgcccatggatcgcgatcgctcctcacggcgcactcgcaacgacgacgggcaccaccgatcccgcggccgggacgacgaccggcaccgccgccgtagtcgccacgacaccgaggatcaccagcacgacggtggagacgaggaccgtcgccaccgccgccaccgcgacaaggacggtggcagaggcggcgaggatgaccgccggcaccgtgaccatcacgataaggacgacagccgttgccaccgctaccgtgacggcggtgacgacgatcgccgccgcgggaaccgacgttccgtttccccgtccgagtccccgccaccctcggcgaagcgggaccgctcgtctagccgcccccgggagcttgtcgagcgccgcgactccaccgaccgcgagccgcggtcgccgtcgcggaagagaaaggggcacgagggcggtggcgacggggacgagcccggccgcgaagggggcaagcgggccagggcctccgtagacccgcctccacccaaggaggagaggcctaggcgggagcgccggaggtttgaggatgtcggtgcgaatgggaagaatggtgatgtgagtaagtcgagtaaggaaatctcatctcatgggcagaagggggagttatcaattaacggagattcacagaacggcaatgggcctaatgctggttctcagcaactgctcagtgccgttcctatgccatcttctgttcccattccttcaaagatggaagtgcaacatctgctgctggcaaaagtagtaacctatctcttgatgctttagccaaagcaaaaaaagctttgcaactgaagaaggaactgtcagaaaaactcaagaaattacctatgtaccatctctggaacgccggccgtaggtggtgctatcggtattccaggtcttacgaacattcccaatcttgaatctgtgaagcgagcccaagaacttgctgctaagatggggtttcgccaagatccacaatttggtcctcttatcaacttattccctggtacatccactgaagttactgtgccacaaaggcctgcaaaggctcctgttcttcgccttgatgcccaaggtagggaaattgatgagcagggaaacgttatcagcatgacaaagccaacaaatctgagtactctgaaggtcaatataaacaagcagaagaaagaggcttttcaaataatcaagccggacttggactctcttgcaaaatcaagtgttcattttgatgaacggatgggcataaaccaaaagaagctccttcgtcttaaaaggccaggatttcagttcgttgaagagggtaaactcactaggcaggctgaattgcagaaaattaagagtcaatttggtgaagcgcaagctaaagagctcaaagtaaagcaagcccagcttgctaaggcaaagacagaagtagacatgaatccaaaccttattgaggttgctcttggtgtgagagctccaaaacaaaagcagaaggaagagatccctgaaattgagccatgggatgcaaaaattttactttctgccacatatgaggatgtctctgtggagaaacttaatttggacaagatcaccatatatgttgaacatccagaaccatatgatccacctgctgagcctgcaccaccgccgccccagccactgaagttgactaagaaggagcagaagaagttgagaacacaaaggcgtcttgctaaggaaaaagataggcaagaaatgattaggcaaggcctcttggagccacctaagcccaaggtcaaaatgagcaatcttatgaaagtgctaggctctgaagctgtccaagatcccacacggatggagatggaaataagaactgcggctgcagagcgtgagcaggctcacgttgaccgtaacattgcccgcaagctcacaccatctgagcgccgtgagaagaaagaacggaagctttttgatgatccaactaacacagtggagactatagtttgtgtttacaagataagagacctgtcccatccacagacacgcttcaaagttgatgtgaatgcacaagagaataaactgacaggtgctgcggtcattactgatagtatcagtgttgtggttgttgaaggggggaaaaagtcaatcaaaaggtataataagctcatgctaaaccgtatagattgggctgctgctgttggtggtgatgaagacgcagaagcagaagcggaagctgacaagccagtgaatagctgtgaattggtctggcagggtagtgtggcaaagcccaccttccacaggttcactgtacataactgccggagtgaatctgcagctaagaagatattcgttgatgcttctgttcctcactactgggatcttgctgtcaattcctcggagggttctccctgagcaaagcacctgttcagaaccttggtagctactgctgatctttgctggctacatgctagttatgtgtggccagtgttatagcgcttgttatggtaagacccttaccacgagtatctacatcaatggcctcatcagttgaagtactgaactcagtaatgcctggtgttagggggtgtttatccctccattttatttcatttgtccctagattgccaaatacagccatatttgtcaatttaggaactaaaatggaataaaatgtagggactaaaaattagtccctataaaccgaacacccccttaatctgttgtgaacatgctatttcagagatgttattgttggattttcctgtggcctagaaactgttatgtgagcaactgttgaattttgcacgctcagcgtgcatttggaataaaccaattgcatcaaatgactgcgtgtatttagtattgttgcggtgtgaattgcgggcagtgcctgcacatcaattacaaattcatcaacttgtgtggatgtttataatggttcatcaattttaaaagtataattctggatcaataaacttttcaagctcccttggctcgaatttttttttcaagttgtttaacgtactcactcggtcctaaaagaccatctcaagttgtttaggcacacaattacaagttcatcaacttgtgtggatgtttataatggttcatcaactttaaaagtataattctggatcaataaacttttcaagctcccttggctcg

SEQ ID NO: 50095 - DNA, 1388 bp, Zea Mays
atggcaggcaccggccctattccgggggtcatcgtcctggctctcggcgccggggcgctgggattccccgacgcgctgcgccagctgctcgacgccgtcgcggggcggccgcgaagcccactcctcgacatcgccgcctgcgtgctcgccatggccgtggccacggcctacgctctcggcaccatgctgctggcgcgtttcgtccgcaaggcgcccggcggactcggagccgccgcgggcgtgggcggtgacgcgccgcgcgcggacctcttcgccctgctgactctcgtcgtgtccctcggcgctgccctgctcgtctccgcgtgcctcttcctgaccgcgcccggcgccggcggcctgctctaccgtactgtcgacgtcctcgccgggaaaagcggtgtggtatcggcccttgtcgccgtcgccgcccgccgccgccatccccttcgtcaggcgtgtgctctgcgccgccccctgcttcgacccggatcctgggcttcgcggtcgtggggctgtttgtcctcgccgccttcgtcctccttcccacggctcggtggcggcctctacaaacaccgcgtcagcgtgtccgtcggcgtcatggtcatggctctcgcccgccgcttcggcaagctggcgcgggcggcgtcgctggccatcgtcatcgtctccttcgccctcatcggcctcctcacaaccgcgtgtgccaagtgatgatgctctgcttcatgtcgtgtcctgctgtctagtccgccgtcgccgatacgtggccgcggggagctgcatttgcgtgtggccgctgccgttcgttaccagacaccactgcattagttagaaggttctattattcggatactatttattcatgcccaaataccatcactattacgctactattgtcaaggtatttctgcagtttatcggcttgccgtaggtaagattccagaaatggggaaaaaaatgaagaaaaaaaaagacttgcacgcgcgggatttgtcggccgtggatctttccaagcctccatttttccttgcttgcttatccgaccaagcgtcacggctgagggaaaagaagtcgtcagccagtggcggctgtggacctgtctcccacgcaaacgtgcccaggccggccggtcagggacaggatgtccgaatcgaacctttcgccacctgctaccccggtgtttggttagtttgtgacgtatcaaatgtttagagttaattccctctatgccactaaaaattatactgatactttacgtgtcattagaaattatagcattccttctataccatcaattttagattttgttcccctctgtgccattgcggtcaacaagccggccaacgccgtttgttggtgtagctggacccacatggcatgcactaacc

SEQ ID NO: 50096 - DNA, 1242 bp, Zea Mays
ccttagagctaaaacgactattatttagacataaaaattaagagctaaactactattttagaacggagtatgtataaaaagttatgtaaaaatggactcttaaaactcttttcatttaacctctttaagacttcttttattatcccttgtctttttttatatttttttcatttaacctctttaagacttctcttattatcttatacttgcccttcactacggagtataaaaagtcatgtaaaaatactcttgtctcttgtattctctttttatttaacctcttgaaagtctcttattatcttatacttgccctttgtcaagtggatccaaagcaatctactccatccgttcctatatatatgacaatttcaagtcatgctaagtgataaaacaaattataacaaaataaattataattcgtttttaataagactaatcaagtggaggtgtagcaaacggctagtaaaagcttattcaagcaggcgtgaacgtgattgatgattaaaaacagaggatgcagttcaacgtaaaatgctgagcatctacaaggccatttctgttcctagctggcgctactgacgagcgcgtccttgtaagacccgggccgccggcaaggaagaggaggctcccgaacaggcagaaccacgcccagctcctccccacgaagccggagtggcggctgcggcggtcgtgccggttgacgatgccggcgatgaggaagagggtgctccccagcagcagcgggatctgcacgctcttctgcaggagctggacgtgcccgctcgcacgctcgtagaactggcagatgttttgcacagaccccaggcaccacagtgccggcccggctatgagcaggttcaggccgtgcatggctaggctgtgccggtagcctctctccatctgaatcacaaagaagacgacagcgacgagcatgagcacggtgccgacgatctgcacggcggggacgccgagctcgacgagccccatctgcgcgtcaagcccgaccaccatcccgaggaggaccgccgcgaagatgtacaccccggcgttgatgtactcccaccggttgcgcaacgccgtgccggaccccgcgccggcgccgaggctgtatgcgcggcactcgcgcgccgtcgccagcttcaccatggtggctgtggcctgaccctgatgagcgtgttcgcgtactgatggctagcttcactgaaactgaaatggagtgcaggtgatattattgtggtgttg

SEQ ID NO: 50097 - DNA, 1743 bp, Zea Mays
aaaatactcttgtctcttgtattctctttttatttaacctcttgaaagtctcttattatcttatacttgccctttgtcaagtggatccaaagcaatctactccatccgttcctatatatatgacaatttcaagtcatgctaagtgataaaacaaattataacaaaataaattataattcgtttttaataagactaatcaagtggaggtgtagcaaacggctagtaaaagcttattcaagcaggcgtgaacgtgattgatgattaaaaacagaggatgcagttcaacgtaaaatgctgagcatctacaaggccatttctgttcctagctggcgctactgacgagcgcgtccttgtaagacccgggcggcggcggcggtatcgcagggcccctccggccgccgtgtccgtgctccaggatgagcggcaccttgccctcccgctccaaggccagccgctcctgcgtgccgccgcgcagcttctccaggccccggccgcccatctgctgcgtcttgaacaccttgagcaggttcagcaggccgccggcaaggaagaggaggctcccgaacaggcagaaccacgcccagctcctccccacgaagccggagtggcggctgcggcggtcgtgccggttgacgatgccggcgatgaggaagagggtgctccccagcagcagcgggatctgcacgctcttctgcaggagctggacgtgcccgctcgcacgctcgtagaactggcagatgttttgcacagaccccaggcaccacagtgccggcccggctatgagcaggttcaggccgtgcatggctaggctgtgccggtagcctctctccatctgcatcgtataatcaaattgcagctgagtgaactcaagctactcgtggtcgtggtcaaagcatgatcgggtagccggtagcacgaattctatgtgcgaaactcgcatatcacagtaaaaacaaattccttccttgcagccattcatccagttctacatcaataagttcaaaatgcatttagtaagcctatctagaacatgagaatatcattcgcgaattctattcacagaccaagagcattaggttcagaaatgctctgcttcagaaagtaaataaacagaacttgaacttcatttgagccatgtatatgattcaaaataagcaaccatacaaacgatcagcatcacgtaatttgaacggattttgtacaggctgcgcttagcactcccgagtcccaaatccagggaacaagaagagacctgacctgaatcacaaagaagacgacagcgacgagcatgagcacggtgccgacgatctgcacggcggggacgccgagctcgacgagccccatctgcgcgtcaagcccgaccaccatcccgaggcggtaatcgacgccagcggcgtgcgcgaggaggtcgtgcgtgttgacggccagcaagccggcgagcccgatcgcggcgaccacgagccccgggctgctgggcccgccccacggcaggagctgcgcgaggaacccgccgaccaggaggaccgccgcgaagatgtacaccccggcgttgatgtactcccaccggttgcgcaacgccgtgccggaccccgcgccggcgccgaggctgtatgcgcggcactcgcgcgccgtcgccagcttcaccatggtggctgtggcctgaccctgatgagcgtgttcgcgtactgatggctagcttcactgaaactgaaatggagtgcaggtgatattattgtggtgttg

SEQ ID NO: 50098 - DNA, 2188 bp, Zea Mays
atctcagtccggagaaatttccagcctctcgcgcacacggccgccggctctgatctctttatccacgtggccccctcccagtgggcacctcaccaccacctgtcgacctcctcatccccagcggtgcggtgccccccggcccctccccagtgccactgtctcgtcggctcgtcgctccgtagaccccgcgcctccgcctccccgccactcgccggaggctgccgccatcgttatgccatggccgtcatcctctcctccgcggcgccaacgatactgactcgtcccacgcgccctcggaggcagccgaggagcggcctccgcgggggcctcgcgcgcctctcagctgcgctcggcctcgcgcacgcgggcgccggcgccggcgccgcactcgccgcgccgctctcctacgaggagatgctgcgcctctcgtccgactccggcggtgatgttggcgggttcgcgctcccggagctcggcctcgacgggctcgttgacttcgtcaacgataaccctctcgtcgtcgcggcaggcgtcgcggccatcgcagtgccgcttctccttgcgcagcttctcggcggaggcggcagctccaagccctactccgtcctgtccgccaaggcggcctaccagcggctgctcgaggagcccgacgcgcagctcgtcgacatcaggccgctcaaggatgcacgagaggccggcacgcctgatctcaaggaggctaagaagaaggctgctgccgtaccttacaacggggaggacaaaaacggattcttgaaaaagttgacactaaagttcaaggacccggagaacaccacgctgatcatccttgacaaatttgatgggaactccgaactagttgctgagcttgtgacagccaatggttacaaagctgcttttgcagtgaaggatggtgcagaaggaagccgaggatggaagagcagtaaccttccctggaaggctccgccaaaaggattcagctttgacttgggcgaattatttggggatggttcagatggtttgcctgtgacaattggtctcgctgcagctactggtttgggagtacttgcctacacagagattgaaactttgctacagtttttggggtcagctgctgttgttcagctagtggtaaccaaactcttgtatgccgaggatcgacaaaagacacttaaacagatcgatgagttctttaacaagaaggttgctccgaaggagcttattgacgaaataaaggaaatcgggcaggctctactacctttacctggcgatgctaaaagccaaccagcactagcaacagcgactcaagttgctgccacacaaacagctgcaccagcagaggacgctaccgcagaagccaccacggaatcagatcctgcaacgccaacacctctttcaccttatacaaattacccagatctcaagccgccatcaacccctacgccaccgtcagtggagtctgaagtcgagacgaaggctagcagcaccgtgactgaaggaccagcagtggtcaattctgcacctatagcagacgctgccacgggatcatctcctgccactactaggcccagacctcagtcaccataccctaatatttcaagccaccatcctcgccttcaccgtcagcaccttaatttggcaagagtacaagaaaccgggtctagaggatattaaagaagttgagttgttcatatggagccggcatctcactagaggtgtatgttgtactatgagcgtgacagtgtggctaagtcactgtggcgagttttctgcagcagtaaatatatgatgtaatgttcattagttatcaatgtgctatgattttctttttgttgtcttattttcgatacatgtaaatgtcgaataactagccgtgagaattgagagttcaagcctatagagcttgatatgtttgatcaaagtaaatgtatcttcttaaaaacatgaaagtcaggtgctttctttttttatcctctataaaaagcacaaagtgatggtgatggttttctgtaaggatcttctatgcagtagtttaagtgtgcatttactgtgtgctagatattataatgtacagatagcctttcttttttagtgaagttagaggagtatgtcattaggtgcttcataaaatcgtggagctagaattgtgaatgtacagaagatatttacataaatcattttatttttttta

SEQ ID NO: 50099 - DNA, 3252 bp, Zea Mays
caaaatcgtgctagttgatatgttagcaggtagcaacaaacaaaacgatgtgtcctcaggtagcaacaaacaaaatgatgagagccctagccgaataaacaggcacatgcgcgaggatgcataagcaacaggtcaatgactgcctagggatggagactgcttggaggagaggacacacaccgatctctcaaagggaagcacgagagaccaaagacagctgcgtcgatggcgtgagggtttgcgggtggaagacttgctaccgtgcttgatgaggtaagtcattccagaactaaaaaaatcaattcacaaccataaagtagtcagttcctcaattgagaactttgttgctaaacaataatatccagtataatgaacatgatgacagaaacagtttgacaataacattacttacagaataatgatcaatcacattctatcctccatttgtgttacctggccaacccatacatatattttagccccacagtcaagtaagaaacatttggtactttcaaacatggattttgtaagagctgtttcctccagcttcaattggtcatcattaatgttccatgaagaacatttcataatttatctattaaacacagaagacactatgggggcataaagaacttaaaacatgatagaatcagtagagaaatggtaaaccacataaatatactcagccataacatggactcactaacattttttatatacgcgggtattggacacaaaaatatatttggccacaacatgggatctttagacattttttatatgtgggtattgcttcccacattggttggtgctgcaactattacaatttgataattagtagtgcataaaaaatagaagaatttagcaaagaatactgggtataaccacttcctagtttgtggttactatgcaatcctcgcactgcaaaactttgcaattaaagggaaaatattctatgaagattttgtttttatggtcccacaagctcagagtaggtacaaaagcattaatacacaatcgcaaattaaaccaaagcaatgccaagctactaagccacaaaaacatctataggtatcttagatacatcaattgatgggaattaggctaacattatttttgtttcatcatgagatgacatagggatcagatcactaggctaaaccttcagcttattatgggcatctacagcttcggtgcaacaaccaatcattgaccagctttggtgcatactccaattggaggcccagtctgatttgattgcgctttgcagtatcgagtatccacaagttttttacagatgataaagcttagcaccacaagacagtcaccatctctcatagacttcaactaaaagacatggaaaaatgcagcacgtctaaacttagaagcaagaaaaaacattatggtttttgccatcagcgcgagacattagaataagatggccattatctaatttcattttgtttaataaaatgaatgcattataggagtcacggccacaataacaaaaaatgtgatttcccccaacccccaggaattgttaaagcacggtttggaagcacaagaaattgcaatcacattccaaggaggaaatcaaggctcaccccgatgctctcaaggtcgttgacgatagatccagagtcgctcgacgtcgagacacttggagtagagaaggccacacaggggtcgcgggcccatcctgggcaaaaccaagagcacgagttcttcacgcctagcggcatgatgggcatatcgtcctatgcagcaacgggcatggactcgagcttgcagtcgagtggcggtagcagcgtgatgtcttccacgagagacctcaccatgaggcgcaacaacgtctcctccaacccggccgttcgggggcctcgcagacgaggtcccacacggtgtgcacggcatcaagttgtgttcactgctgaagagctctctcgtgcccctactgagataattggcaggagctgccatgggacatcctacaaggctacacatgacaatgggtacatgctgacagtgaagtggctgaaggagggctttgctaagagcaagaaagaattttcccgtgaaataaagaagcttggtagtgtaaggcaccccaatcttgtccccttgcgtggctactactgggcccccaaagagcaagagaggatcatgatatcagactatgcagatgccacatctctgtctacctacttgtctgattacatgcacaatgccctgattcagaactccactccatctgctctggtgactgactacagccttcataggcagatgacttcgatcggcatggcagagcaggtcctaaacgccggcgcgctaggatattcccctccagagttttcaagcaccagcaagccatgcccatctctgaagtgcgacgtgcatgccttcggtgtcatcctgctggagttgatgacagggaagattgccggtgagatcatctgcatgaacgatggcgtggtcgacttgaccgactgggtgaggatgctggatctggaggagcgtgtctcggagtgctatgataggcacatcatgggtgttgagaactcggaaggtgccccacaggcactggatggcagacatatgcatatgctcaccacaaggtagcagtcaggagagactcaccattgctcgtgagcacaacaacgtgcatcaccgtgcgaccacccagacatatgctcgaccctagtccggtcacttcctcctccgtgtccctgtatgcctttaagagctcgtgcaccatcccctaggaccccactaccgcctgtgaaggagcttcaagtgattagtgatgttttgttcaccacaaggtagtagagatagaaggaatgggaaggagcttgacggagaaggaacagggttcatggtagactaccagcccctacggaactatgatcgcacgagaggcctagaaacagagcaatctactatcagctattgcaacgggatggatggcggtgggagtacggggcacacgaggccggtcagcttgaccccaacggaagggaaagcacggccatgcccacgcatctcgaaacaacaacacgcgatgctttgcgcccttgcccgtggtgtttagaaagaaggagctatagtaggggcacgagagagctcttcagcaggggcacgagagagccgcgaccgtcgcctaggtagatgatgcgctgcttcctcttggtggccaatacccgggtagccgacccacacgacacacggcgtgcggctcgctggcgccga

SEQ ID NO: 50100 - DNA, 1592 bp, Zea Mays
atggcgagtcacggccacaataacaaaaaatgtgatttcccccaacccccaggaattgttaaagcacggtttggaagcacaagaaattgcaatcacattccaaggaggaaatcaaggctcaccccgatgctctcaaggtcgttgacgatagatccagagtcgctcgacgtcgagacacttggagtagagaaggccacacaggggtcgcgggcccatcctgggcaaaaccaagagcacgagttcttcacgcctagcggcatgatgggcatatcgtcctatgcagcaacgggcatggactcgagcttgcagtcgagtggcggtagcagcgtgatgtcttccacgagagacctcaccatgaggcgcaacaacgtctcctccaacccggccgttcgggggcctcgcagacgaggtcccacacggtgtgcacggcatcaagttgtgttcactgctgaagagctctctcgtgcccctactgagataattggcaggagctgccatgggacatcctacaaggctacacatgacaatgggtacatgctgacagtgaagtggctgaaggagggctttgctaagagcaagaaagaattttcccgtgaaataaagaagcttggtagtgtaaggcaccccaatcttgtccccttgcgtggctactactgggcccccaaagagcaagagaggatcatgatatcagactatgcagatgccacatctctgtctacctacttgtctgaatttgatgagcagaatctcccgcccctatcagctggatagcggctgaacattgcgattgatattgcccgctgtctagattacatgcacaatgccctgattcagaactccactccatctgctctggtgactgactacagccttcataggcagatgacttcgatcggcatggcagagcaggtcctaaacgccggcgcgctaggatattcccctccagagttttcaagcaccagcaagccatgcccatctctgaagtgcgacgtgcatgccttcggtgtcatcctgctggagttgatgacagggaagattgccggtgagatcatctgcatgaacgatggcgtggtcgacttgaccgactgggtgaggatgctggatctggaggagcgtgtctcggagtgctatgataggcacatcatgggtgttgagaactcggaaggtagtagagatagaaggaatgggaaggagcttgacggagaaggaacagggttcatggtagactaccagcccctacggaactatgatcgcacgagaggcctagaaacagagcaatctactatcagctattgcaacgggatggatggcggtgggagtacggggcacacgaggccggtcagcttgaccccaacggaagggaaagcacggccatgcccacgcatctcgaaacaacaacacgcgatgctttgcgcccttgcccgtggtgtttagaaagaaggagctatagtaggggcacgagagagctcttcagcaggggcacgagagagccgcgaccgtcgcctaggtagatgatgcgctgcttcctcttggtggccaatacccgggtagccgacccacacgacacacggcgtgcggctcgctggcgccga

SEQ ID NO: 50101 - DNA, 2766 bp, Zea Mays
gtgagggtttgcgggtggaagacttgctaccgtgcttgatgaggtaagtcattccagaactaaaaaaatcaattcacaaccataaagtagtcagttcctcaattgagaactttgttgctaaacaataatatccagtataatgaacatgatgacagaaacagtttgacaataacattacttacagaataatgatcaatcacattctatcctccatttgtgttacctggccaacccatacatatattttagccccacagtcaagtaagaaacatttggtactttcaaacatggattttgtaagagctgtttcctccagcttcaattggtcatcattaatgttccatgaagaacatttcataatttatctattaaacacagaagacactatgggggcataaagaacttaaaacatgatagaatcagtagagaaatggtaaaccacataaatatactcagccataacatggactcactaacattttttatatacgcgggtattggacacaaaaatatatttggccacaacatgggatctttagacattttttatatgtgggtattgcttcccacattggttggtgctgcaactattacaatttgataattagtagtgcataaaaaatagaagaatttagcaaagaatactgggtataaccacttcctagtttgtggttactatgcaatcctcgcactgcaaaactttgcaattaaagggaaaatattctatgaagattttgtttttatggtcccacaagctcagagtaggtacaaaagcattaatacacaatcgcaaattaaaccaaagcaatgccaagctactaagccacaaaaacatctataggtatcttagatacatcaattgatgggaattaggctaacattatttttgtttcatcatgagatgacatagggatcagatcactaggctaaaccttcagcttattatgggcatctacagcttcggtgcaacaaccaatcattgaccagctttggtgcatactccaattggaggcccagtctgatttgattgcgctttgcagtatcgagtatccacaagttttttacagatgataaagcttagcaccacaagacagtcaccatctctcatagacttcaactaaaagacatggaaaaatgcagcacgtctaaacttagaagcaagaaaaaacattatggtttttgccatcagcgcgagacattagaataagatggccattatctaatttcattttgtttaataaaatgaatgcattataggagtcacggccacaataacaaaaaatgtgatttcccccaacccccaggaattgttaaagcacggtttggaagcacaagaaattgcaatcacattccaaggaggaaatcaaggctcaccccgatgctctcaaggtcgttgacgatagatccagagtcgctcgacgtcgagacacttggagtagagaaggccacacaggggtcgcgggcccatcctgggcaaaaccaagagcacgagttcttcacgcctagcggcatgatgggcatatcgtcctatgcagcaacgggcatggactcgagcttgcagtcgagtggcggtagcagcgtgatgtcttccacgagagacctcaccatgaggcgcaacaacgtctcctccaacccggccgttcgggggcctcgcagacgaggtcccacacggtgtgcacggcatcaagttgtgttcactgctgaagagctctctcgtgcccctactgagataattggcaggagctgccatgggacatcctacaaggctacacatgacaatgggtacatgctgacagtgaagtggctgaaggagggctttgctaagagcaagaaagaattttcccgtgaaataaagaagcttggtagtgtaaggcaccccaatcttgtccccttgcgtggctactactgggcccccaaagagcaagagaggatcatgatatcagactatgcagatgccacatctctgtctacctacttgtctgattacatgcacaatgccctgattcagaactccactccatctgctctggtgactgactacagccttcataggcagatgacttcgatcggcatggcagagcaggtcctaaacgccggcgcgctaggatattcccctccagagttttcaagcaccagcaagccatgcccatctctgaagtgcgacgtgcatgccttcggtgtcatcctgctggagttgatgacagggaagattgccggtgagatcatctgcatgaacgatggcgtggtcgacttgaccgactgggtgaggatgctggatctggaggagcgtgtctcggagtgctatgataggcacatcatgggtgttgagaactcggaaggtagtagagatagaaggaatgggaaggagcttgacggagaaggaacagggttcatggtagactaccagcccctacggaactatgatcgcacgagaggcctagaaacagagcaatctactatcagctattgcaacgggatggatggcggtgggagtacggggcacacgaggccggtcagcttgaccccaacggaagggaaagcacggccatgcccacgcatctcgaaacaacaacacgcgatgctttgcgcccttgcccgtggtgtttagaaagaaggagctatagtaggggcacgagagagctcttcagcaggggcacgagagagccgcgaccgtcgcctaggtagatgatgcgctgcttcctcttggtggccaatacccgggtagccgacccacacgacacacggcgtgcggctcgctggcgccga

SEQ ID NO: 50102 - DNA, 1010 bp, Zea Mays
gtctccaaaccctagggcaccacgtggagagggagagagatgggagagagagagaagttgttgcgcgggagaaatcaaatgagagaaagagatcagggggagggggcgcgcatggggagggcagggggcgccagtggcgcgcgcgccgagctgggccgggccaggctgggcccgcaccgtgggttaaaatcccgcggcacgcacaaccacagatcggaagatcgatccgcgagcaaaatcccgaaacgaaactaggcaacacacgcgatcaagcacgaaatcagacaaagaaatatgattcagcatgatgcaacactcctgtcaacttaggttttgtttacacatgacacagacaccattcgttatattgctttgaaattgggaagaaggagcgaaacgggaaaagaaaaaagagtaacacctgaatttggtgagtaaaaagaagaaaaaattctacccccaaattcagggcgttacacgagtggtcccaacatgtcagcacctccaaggcgcacgtccacgttgaaggcctagcaggcgggcccccgcctgtcggcaccaaccctctgctgagcgtggaggcaaactgggtcgcgaggtggtttcttcccttggttcgaccggagcaaagagcccttcctaaccgaccctttttgtttttcttcttttttttctttcctatttcctgattccatatttccttttctatttaagttctcaacttccaagttcaagtttgtttgtttttttaattccacaaacacatttagtgcataacaaaaataccagcatgatgtaataaatttattttatttcatttcatttcattttgtatttattttataaaaaagagatatgctccaataatgaaacacataatcaaaatcactctagtataatttcttgaataactcgtcttataatcccactctagggtttacaaatcctaccccctaaaaaatctcgacttcgagattttgacggactaggaaaaacgtggggaaactctg

SEQ ID NO: 50103 - DNA, 575 bp, Zea Mays
tgcttgcccaactcgctttaggattttgaagggtccaataaaacaaggggacaattttcctttgactttaaatctccttataccccgaattggtgacaccttcaggtacacatgatcaccttcccccaaactctaacggtcttcttcgggtgtccacataacttttctgcattgactgtgcagttctcaggttctccctgattattcgaacttgttcttctgcttcttggataatctctggtccaaagaactgtctttcactagtctgatcccaataaaacgaggttctacacttccttccatataatgtctcaaacggggacatcctcaaactggtctgataactgttattataggagaactctccatagggtaaactcttgtaagccactgtctacagacgacgttctgtaaacactccacatatagtgaaggtttcgtctggctggtgcccgtggtttttctcttcgcattgaagggttttccacgtaaatatgtgtagtgctccatgatttgttggttgatctactttgtatttcttgctgattctgctaacacatcctctcctccaggtc

SEQ ID NO: 50104 - DNA, 408 bp, Zea Mays
ataagagctgtaaacaggcccggaagaatattgctccccttcgttcacctcgcgtacgcgacaactaggctgaccgccgccgccctacgctcaactgcccacctgccctggtcttcgactcttcgtcgtgcgctttgccggcggcgagcacccatcacaccaggtacgctaattatcgagatgcgatggccagggtctaggttgacccctagtggtgcaaaggatggcctacttcgagaggcgatgtcggcggaccaatctagaagattgatgatctctacataaacacaagattacattgattcaactctgatctggtgtatgaaatattgattgatactcatttatattatttttttattatattattattaaatatatatgtctgtgtatttctctttcaaatta

SEQ ID NO: 50105 - DNA, 536 bp, Zea Mays
agaatattgctccccttcgttcacctcgcgtacgcgacaactaggctgaccgccgccgccctacgctcaactgcccacctgccctggtcttcgactcttcgtcgtgcgctttgccggcggcgagcacccatcacaccaggtatgtccgccagtcaaaccaaaggtgaaccaggaagcggctttttcgaaaagccggctttcccacattgcaaaaattaaaatcatcattagacaactgcagaagctcgtggtaaactactgcgactggggagggagcagcaggggcatcaggtacgctaattatcgagatgcgatggccagggtctaggttgacccctagtggtgcaaaggatggcctacttcgagaggcgatgtcggcggaccaatctagaagattgatgatctctacataaacacaagattacattgattcaactctgatctggtgtatgaaatattgattgatactcatttatattatttttttattatattattattaaatatatatgtctgtgtatttctctttcaaatta

SEQ ID NO: 50106 - DNA, 523 bp, Zea Mays
agaatattgctccccttcgttcacctcgcgtacgcgacaactaggctgaccgccgccgccctacgctcaactgcccacctgccctggtcttcgactcttcgtcgtgcgctttgccggcggcgagcacccatcacaccagtcaaaccaaaggtgaaccaggaagcggctttttcgaaaagccggctttcccacattgcaaaaattaaaatcatcattagacaactgcagaagctcgtggtaaactactgcgactggggagggagcagcaggggcatcaggtacgctaattatcgagatgcgatggccagggtctaggttgacccctagtggtgcaaaggatggcctacttcgagaggcgatgtcggcggaccaatctagaagattgatgatctctacataaacacaagattacattgattcaactctgatctggtgtatgaaatattgattgatactcatttatattatttttttattatattattattaaatatatatgtctgtgtatttctctttcaaatta

SEQ ID NO: 50107 - DNA, 1454 bp, Zea Mays
cgcgtgatgcgatagtgccagagaatatcttctcttatcttgttggtaggaaagcagtggtgaatgaaaagcggttctgttcccttccgggtgaatggatgtgaaatggaaatagactaacactcacacaaaagagacaaggaaccagaaatgcttactactgaccagctcctattcctatgccaaaaagggattcgagtttcaggggtagagggaagctttaggaaaggatagatgcacacacaatctgataagcctgccgactaatctccctaacaaccggcgctggatacctgagacccagctggcacttctcttgatccaagcgttggtctagtttccatcggaaagttatatgttcttgttaggcggtagcaagcagtatctaatttctgtcggttcagttcagagaaataggtctaaataaaccgggcttgtcccgtagattgtactatcccccttgcccaacaggaactggagctcttgccttctatttcaattatttgcttgatggaaagcaataggcaatcggctagattgcacatccaacttgttcactgatttatgctgcaggcacttcagaaacctgagctgggttaggtagcggttccacttctcaagtttggagcctctaaagaattctccgcctcaggatctgggtcatagaattggagccattagaccttcctcttttctttcgaaaggaccttttctctaggaccgaacaagaagatccatactgtctacttttgaactatgtagctattgagaaatctagtgcggagccaatatcgtgttcatggtggccgacgctttagaaagagatcatgtccttctctttagttttaagcaatgtggtcttccctggttgagtgagtgagcccagtacctacagcctgatctaagcagtattccgaggggatagaaacagaaagcaagaagaaatcttgtgttgaaaaagaaccttgcaaggaaggaatgaagctatggatatattttagtaaaaagaggaaattgaagcccaatcacagtggtgagcagagccctcgtccccgttatcgatatttattttccttcgcaatccattccttagaaccacttaatcagatgttgaaacaggcagctaaagagagtcccatgggcatgcatggggggagagtcattccaagcggtaggtgggtcgtttcctgcgtcttatcacagcaaggacactttttataggtccatcaaatagaaatccttctcttctgggaaacctaaattctaaaccaaagtggtgaactggttggcactctacactcttctacttcagtttctacccctgtcctgtggtataggaaaatgcactttactagttatgcggcctgccctagattaccaagttcctcttggaggaggaggtaccagtgccagtttctagaatcgtataaggatctgcttctctcctgcttctg

SEQ ID NO: 50108 - DNA, 1659 bp, Zea Mays
ccaaaaccggccatgacgaccaaatgcacaacgctcactatacggagcacacttatatccgctcggtctacaggattttacagctaattcccattctcgtcagcttgtcgtctttgctgagaacaccatggctatcacaaatagtccaagccctaccctcccgactcttctttatatgtaacttcattcttgcaacatcacaagcacacaggctttcacacccatcttgcattggctctccggctgctgttcttgcttcctcgctgcacacaaccaagcaaagtcacttttccaaggtaaagaagcatgcatccgagctgctctccactggcagtgcctccgggcttccggttccacccgacagacgaggagctcctctactactacctgaggaagaaggttgcctatgagcccatagatcttgatgtcataagggaggtggacctcaacaagcttgaaccatgggacctcaaagatcggtgcaggattgggacggcggagcctcaggacgagtggtatttcttcagccacaaggacaggaagtaccctacggggacgcgaaccaaccgggcgacgacggctgggttctggaaggcgaccggacgggacaaggccatcttcctcggcaacgctgggaggaggatcggcctgaggaagacgctggtgttttacactggcagggcaccccatggcaagaagacggactggatcatgcacgagtaccgcctcaacgatgacaacgtcgaggtgccgccgattacggaggatggatgggtggtgtgtagggttttcaagaaaaagagcatccagaggggattcgaccagctgggcacagcgtcggctggcgacgacgacgaactccaatccttccactccccgggcggcgtgatgaccactctggcggagcagaagcacggcctcctccaccagctcacgcacggcggagtcgtcgttcccgccttcgacccctgcatgaaccttccacacctcacgagtgcggaagggcagcttgccgccacggcagcatttacatccggcacatcggctgtggccatgaacctgctcgacatgggtcgttgttctcgccacaaccacaaccacaacatgctgaagatgacaacaacaccatgtggctctgccagtgacatgccgctgaacagcggtgagcgcttcggtgccgccgccgattggtcgatcctcgacaagctgctggcgtcacaccagaatcttgaccaactcttccattgcaagttcgggggaacaaccttcgcggtgcctcaccattatcagcaggagatgcagcagcagcacatggaaatcagcgcgtcttcactgcataggctgcctctacattagcttattggacgtcaaaatgatgatatcataagatctccctcaagttttccatgtagctttgattgaacgatatggaggtttaatcgtatctgtccttgtagatctcctcaagttcgtggagttccttctattttacaaggaccagataccgctatattgttagaattattgggacatagtatattttatttcaatataattcgtagaaaatcttaaagttctattcattgagtgtgttggggacttgttctaaaatgttatgagttaagaacaaggcaacacgaaaaaatattaaacgttaaa

SEQ ID NO: 50109 - DNA, 2138 bp, Zea Mays
ccgcaatccactagcgtcgagccattacaactgctgactatcagctcacacacctccgttcgtaatagcatagtagccacgctctactcgtcttagctctcgaagtgccactgcagtcttcgccggccagctcgatcgccgcacaatggcgtcacagcagcaaaccaggaagcagcaggccaccaagggccaccaggaggccgaccgaggccaggcgatgaacctggaggagatcggcaagtaccgcgccgaggcgcagcagcggtcggcggacgccatccgcgccgccgaggaccggttccacaaggccaacaaccagcaggcgcgcggcgccggggcgcgcgggactgtcaccgtggcccaggcgcccgtcgccactgtggtcccgtatcaggagagcgtgaagcaggtggagacggagagccacggccgcggtagccacggctctgagccgcagcagtggctggcggacgccgcggccgatgccagggagaggtgcaacaaggccctggggacgagcccggccgccgctcacgaaggcaaggcgtcggccgcccacgcgacggctggcgcagctccacaccagcaaaccaagaacgagcaggagggtggtcaagtccacggccatctaacaaggcaggacgagatggggaagcacggcagcgaggcgcagaagaactcgaccgcggaggccgcacgtgccgcggtggagaagcacgacggaggcagggagaccggtgcggccgcgggacagggcgtgaaggacacggcggcgaagcacgacaagtacggggagaccggcgcgaccgcgggacgaaagagtgtaaaggacacggcgtcgcgcgcggctggcgccacggcggactacgcctcggccaagggcgccgatgccaaggataccggcgcgagcggcgcgcaggccgcggaggagaagacccaggaggccacggggaaagcggccgactacaccaagcaggcggccgcgaaggtgaaggatctcactgccggtgcggccgggacgaccatggagtacgcgaagcaggcggctgtgaaggcaaggacgtgacgctgagcaccggtgagacggccgcggagtacgccaaggccgcggccgagaaggcgaaggaggcagcggtggcaacgggaaagacgacggccgggtacacgcagcaggcagccgtgaaggccaaggacgcgacggtctccacgggcgcgcaggtggcgcagaaggccacggaggtgacggccgacaccgcgcgcaaggtggcggagtacgccaaggagaaggcggagcaaggcaaggagcgcgcggcccgcgccgccgacgaggtggaggagccagggagtggcgcaaccgcgcaggccaaggaaccggcgtcccagacggcggacaataaggctcgcgacatcaccggacagcacaaggacaccaccggcgacatggcgcgtaaggccgcggacacggccgtacaggccaaggacaaggtgagggacacggccgtatccatggttcagaaggcgggcgataccgccgtacgtgccaaggacacggcgtgggatgcggccggcggcatggcgcagaggtcgagagacaccggtgcccaggccggtgacaaggcggaggacgtcacttggcgcgctgagcaggaggcaggggagttgaaagagagagcgtcagggaccgtcaagaccggcggtggcgcttcgacgacgaaggcgaagggtggcggcgacgagaacacgacggtagtgggcgacgtcctggaggcggtgggcgcgacggtggttgggctcgcgaagcacaccaaggggatcgtggccggcgaggaggagctcgtcccagtcggaggtgagaaagggaagtcaccggaggagaagaccaagctcgcgtgatggagtgcttctttgggtggttggcggggaagtctctgggttcagtcgcctgtatgggttccgccctgtaccgcttttaagacacgtccatctgtgtatagtatagtagaataatgttgtcggtcggtgtgtgtgtccgtccggtgcggccgtgcggggccggtgtgaactgcgatctcgtacgagtgcagctatccataatatagtgtgtttataacgtatggcttgagagtttgtgtgcctta

SEQ ID NO: 50110 - DNA, 1818 bp, Zea Mays
ccgcaatccactagcgtcgagccattacaactgctgactatcagctcacacacctccgttcgtaatagcatagtagccacgctctactcgtcttagctctcgaagtgccactgcagtcttcgccggccagctcgatcgccgcacaatggcgtcacagcagcaaaccaggaagcagcaggccaccaagggccaccaggaggccgaccgaggccaggcgatgaacctggaggagatcggcaagtaccgcgccgaggcgcagcagcggtcggcggacgccatccgcgccgccgaggaccggttccacaaggccaacaaccagcaggcgcgcggcgccggggcgcgcgggactgtcaccgtggcccaggcgcccgtcgccactgtggtcccgtatcaggagagcgtgaagcaggtggagacggagagccacggccgcggtagccacggctctgagccgcagcagtggctggcggacgccgcggccgatgccagggagaggtgcaacaaggccctggggacgagcccggccgccgctcacgaaggcaaggcgtcggccgcccacgcgacggctggcgcagctccacaccagcaaaccaagaacgagcaggagggtggtcaagtccacggccatctaacaaggcaggacgagatggggaagcacggcagcgaggcgcagaagaactcgaccgcggaggccgcacgtgccgcggtggagaagcacgacggaggcagggagaccggtgcggccgcgggacagggcgtgaaggacacggcggcgaagcacgacaagtacggggagaccggcgcgaccgcgggacgaaagagtgtaaaggacacggcgtcgcgcgcggctggcgccacggcggactacgcctcggccaagggcgccgatgccaaggataccggcgcgagcggcgcgcaggccgcggaggagaagacccaggaggccacggggaaagcggccgactacaccaagcaggcggccgcgaaggtgaaggatctcactgccggtgcggccgggacgaccatggagtacgcgaagcaggccaaggaaccggcgtcccagacggcggacaataaggctcgcgacatcaccggacagcacaaggacaccaccggcgacatggcgcgtaaggccgcggacacggccgtacaggccaaggacaaggtgagggacacggccgtatccatggttcagaaggcgggcgataccgccgtacgtgccaaggacacggcgtgggatgcggccggcggcatggcgcagaggtcgagagacaccggtgcccaggccggtgacaaggcggaggacgtcacttggcgcgctgagcaggaggcaggggagttgaaagagagagcgtcagggaccgtcaagaccggcggtggcgcttcgacgacgaaggcgaagggtggcggcgacgagaacacgacggtagtgggcgacgtcctggaggcggtgggcgcgacggtggttgggctcgcgaagcacaccaaggggatcgtggccggcgaggaggagctcgtcccagtcggaggtgagaaagggaagtcaccggaggagaagaccaagctcgcgtgatggagtgcttctttgggtggttggcggggaagtctctgggttcagtcgcctgtatgggttccgccctgtaccgcttttaagacacgtccatctgtgtatagtatagtagaataatgttgtcggtcggtgtgtgtgtccgtccggtgcggccgtgcggggccggtgtgaactgcgatctcgtacgagtgcagctatccataatatagtgtgtttataacgtatggcttgagagtttgtgtgcctta

SEQ ID NO: 50111 - DNA, 1212 bp, Zea Mays
cgcaatccactagcgtcgagccattacaactgctgactatcagctcacacacctccgttcgtaatagcatagtagccacgctctactcgtcttagctctcgaagtgccactgcagtcttcgccggccagctcgatcgccgcacaatggcgtcacagcagcaaaccaggaagcagcaggccaccaagggccaccaggaggccgaccgaggccaggcgatgaacctggaggagatcggcaagtaccgcgccgaggcgcagcagcggtcggcggacgccatccgcgccgccgaggaccggttccacaaggccaacaaccagcaggcgcgcggcgccggggcgcgcgggactgtcaccgtggcccaggcgcccgtcgccactgtggtcccgtatcaggagagcgtgaagcaggtggagacggagagccacggccgcggtagccacggctctgagccgcagcagtggctggcggacgccgcggccgatgccagggagaggtgcaacaaggccctggggacgagcccggccgccgctcacgaaggcaaggcgtcggccgcccacgcgacggctggcgcagctccacaccagcaaaccaagaacgagcaggagggtggtcaagtccacggccatctaacaaggcaggacgagatggggaagcacggcagcgaggcgcagaagaactcgaccgcggaggccgcacgtgccgcggtggagaagcacgacggaggcaggggagttgaaagagagagcgtcagggaccgtcaagaccggcggtggcgcttcgacgacgaaggcgaagggtggcggcgacgagaacacgacggtagtgggcgacgtcctggaggcggtgggcgcgacggtggttgggctcgcgaagcacaccaaggggatcgtggccggcgaggaggagctcgtcccagtcggaggtgagaaagggaagtcaccggaggagaagaccaagctcgcgtgatggagtgcttctttgggtggttggcggggaagtctctgggttcagtcgcctgtatgggttccgccctgtaccgcttttaagacacgtccatctgtgtatagtatagtagaataatgttgtcggtcggtgtgtgtgtccgtccggtgcggccgtgcggggccggtgtgaactgcgatctcgtacgagtgcagctatccataatatagtgtgtttataacgtatggcttgagagtttgtgtgcctta

SEQ ID NO: 50112 - DNA, 2129 bp, Zea Mays
ctagcgtcgagccattacaactgctgactatcagctcacacacctccgttcgtaatagcatagtagccacgctctactcgtcttagctctcgaagtgccactgcagtcttcgccggccagctcgatcgccgcacaatggcgtcacagcagcaaaccaggaagcagcaggccaccaagggccaccaggaggccgaccgaggccaggcgatgaacctggaggagatcggcaagtaccgcgccgaggcgcagcagcggtcggcggacgccatccgcgccgccgaggaccggttccacaaggccaacaaccagcaggcgcgcggcgccggggcgcgcgggactgtcaccgtggcccaggcgcccgtcgccactgtggtcccgtatcaggagagcgtgaagcaggtggagacggagagccacggccgcggtagccacggctctgagccgcagcagtggctggcggacgccgcggccgatgccagggagaggtgcaacaaggccctggggacgagcccggccgccgctcacgaaggcaaggcgtcggccgcccacgcgacggctggcgcagctccacaccagcaaaccaagaacgagcaggagggtggtcaagtccacggccatctaacaaggcaggacgagatggggaagcacggcagcgaggcgcagaagaactcgaccgcggaggccgcacgtgccgcggtggagaagcacgacggaggcagggagaccggtgcggccgcgggacagggcgtgaaggacacggcggcgaagcacgacaagtacggggagaccggcgcgaccgcgggacgaaagagtgtaaaggacacggcgtcgcgcgcggctggcgccacggcggactacgcctcggccaagggcgccgatgccaaggataccggcgcgagcggcgcgcaggccgcggaggagaagacccaggaggccacggggaaagcggccgactacaccaagcaggcggccgcgaaggtgaaggatctcactgccggtgcggccgggacgaccatggagtacgcgaagcaggcggcggtgaaaggcaaggacgtgacgctgagcaccggtgagacggccgcggagtacgccaaggccgcggccgagaaggcgaaggaggcagcggtggcaacgggaaagacgacggccgggtacacgcagcaggcagccgtgaaggccaaggacgcgacggtctccacgggcgcgcaggtggcgcagaaggccacggaggtgacggccgacaccgcgcgcaaggtggcggagtacgccaaggagaaggcggagcaaggcaaggagcgcgcggcccgcgccgccgacgaggtggaggagccagggagtggcgcaaccgcgcaggccaaggaaccggcgtcccagacggcggacaataaggctcgcgacatcaccggacagcacaaggacaccaccggcgacatggcgcgtaaggccgcggacacggccgtacaggccaaggacaaggtgagggacacggccgtatccatggttcagaaggcgggcgataccgccgtacgtgccaaggacacggcgtgggatgcggccggcggcatggcgcagaggtcgagagacaccggtgcccaggccggtgacaaggcggaggacgtcacttggcgcgctgagcaggaggcaggggagttgaaagagagagcgtcagggaccgtcaagaccggcggtggcgcttcgacgacgaaggcgaagggtggcggcgacgagaacacgacggtagtgggcgacgtcctggaggcggtgggcgcgacggtggttgggctcgcgaagcacaccaaggggatcgtggccggcgaggaggagctcgtcccagtcggaggtgagaaagggaagtcaccggaggagaagaccaagctcgcgtgatggagtgcttctttgggtggttggcggggaagtctctgggttcagtcgcctgtatgggttccgccctgtaccgcttttaagacacgtccatctgtgtatagtatagtagaataatgttgtcggtcggtgtgtgtgtccgtccggtgcggccgtgcggggccggtgtgaactgcgatctcgtacgagtgcagctatccataatatagtgtgtttataacgtatggcttgagagtttgtgtgcctta

SEQ ID NO: 50113 - DNA, 171 bp, Zea Mays
atgtgcaagctgccgctaatgtacaggctactgagccaaccgagagctcctagcaacagtgcggtgtacaaagacacggtgtcagcaacaagcctagtcttattaggcgggtacaccatgaaacctaagttactgcctccagctggtgaatccacatacaaagctacttaa

SEQ ID NO: 50114 - DNA, 211 bp, Zea Mays
ctaaatccgaggcccacgaagcgggggaaggcgcggaattggagaattcaggagggcttttgcttggaaaccctagggaatttttttctgtggtgcatcgcggctccgatttgatattttcctgcggctatggcgcggtggagcgtggctgggggaagaggttggtggcagcgtcggaggtcggacgcgtctctgcttttctggggaggac

SEQ ID NO: 50115 - DNA, 2076 bp, Zea Mays
tcacaaaggaaacatcacatttgtagtgtcctcagtaacaaaagtgtcaccaactacagagaaagatgggttgagtcattgtaatagtaaatattctagagaaaaaactcaaacacatttgaagaaaaaaatatatcatgacaagcgaacttgggacagacagtttatctaacaatcttttttctaaagcttcaaaagctaagatagcaagctttgcagctagatgactggatgtaaaattttcaatgtaagactcctaatcgactaatcacaacttacaacatattcatatgtataattgtgtatacatgagacttaagtacaagtccaacagattgacagttatcaagggaacgccaagaatcaggtcttctgtagatttgactgtggtacgaccaacctgatattaaggagcaacagaagttatataaaatacatgcattgctagctaagatgtgtgcacacaaaagggaaaaatatagatcaggtatcagtcccaatcatttctccaccctaaaactatttctattgcacttggtcatccagatccatatttcaggcaagctctttgcttggcgccagcacctagctttttgggtagtgggaattgtggttggtgcagcccaagatgttgacatgcacagtgttgaatatggaacaattcccgtgtaccactgatcaaggtgggttatgacataactttcactttagaggttgacgaatttatacaagccatcccacctattgagattgatcccaatgaaaaagatgattatagcaatggggcacaagacaagactgacaataatggtcttcactgcctgtgaaagaaacacaaaagttcagaacctaaacagaatgagcacaatgcttcatcatgaggtccagcaccaatgcatagcagtaacacctttccttataactgcacttgcagcaaaaaatagtgcttcagaagtcagttcagcacaatagaggaagctgaataattctccttttcaagctgctcaatccacttgttttttagtgccaacaaagtttggttttactactgtggaccaagctgcatccttacattctttggctacacatagagcgctgcaggtgctctctccccagtgacaacctgcaggttcgccggtgggattcccaatagtggctgataagctagttgcagatcagttgctattccaccatattttctgcctggggattgcaaactactactggaaacctttgttcaacaaaccctaatgcaactgcacccagtattgctgcttctccttaccggattgttctgtatggatctactgatgtaacaccctaaaaatgattttcctagtgagtaaataagttttatttgtttattttaatttcccatgaatttaaatattccaaataataacttcccacacagttaatcttagtggcaaaaaactaaatatatgagtttcaacctacacttatttcataataaaggacagcataaagagttcttttccagaaactagaaagtgcagacatcaccttttcccctttttgattatgatggatagaatcaaagttcagcacaccctgtagcagtaaggctcaaagattttggacaacaggaataacactcgggccagcgatgctaaacatggaacagaagcaagtagaatccataagagaggatgagaactgctgttacccgtcgtgtaaaagagcaagtatcctcgataatagatatcgggagcaggtatgaaccgggatatgaattggcatgttctttctcaactattagtgctcatcgtagatgaaagaattgagaccactggaaattgcaccagtttattcaagaacttagatctgatttgatgactcactctgttggataagcatgaagcgaacgcctatctcccccaagagtactccaagcccctcaccaagcaaattcctcccatgctgcatcaccaactactcgaatctaatttttctacctcaagttcgaactggaaggaaaattgggaaccaaaacttgcagcaaacataaatagacaagtcacacggaccctaacctgcaccgcccccggctgcaca

SEQ ID NO: 50116 - DNA, 2168 bp, Zea Mays
ctctgtaccaccgccctctctccctccctatgcagccagtcactgcagctgtgtttagtgcctgggaagccagatattattgcagcctccggtcctcccttcccttccctcctcgtctccccctctggttgatttgagagctcgggcaccagatctgaagccctcttgttctgtggttgtgtgcctttcggctggtgtagcattgagaggaggcgctgttccagttccagttccaggatgagcaaggaggatgtgctcaagactttgatgctgagagtgaacatacactgtgacgggtgcgagaagaaggtcaagaagaccctccacaagatcgacgagcagcatcgacgcggaacaggggaaggtgacggtgtccggcctgctggatccggacaccatcatcaggaagctcaacaaggccggcaagccggcccagctgtggggctccaagcccggcgtccctcagaacggccatggcggcggcaagggccagcctaaggacgccggcggtggcaagggccattccaaggatgccggcggtggcaaggcccagaagggcggtgcgggtggcggcggtcacaagggtgccggtggtgccggtggcgggggtggtggggccaaggatcctaagatggtgatgccgcagccgacgccgcagcagctccagcagctgcagcagcagttgcagatgaaggggctgaagctcccgccgcacctcctgggcggcaacatgccggcgttccccgcggccgcgccgttgaaggaccaccccaagtccgtcaagttcgccctccccgaggacagcttcgacgacgacggtggcagcgagttcgacgatgacttcgacgacgacgacttcgatgacgacgaggactacgacgacgagggcttcgacgacgacgtctacgacgagcccaagatgatgaagcccatggccgtgccgccgccgtccggcgggggcgacaagaagggcggtggtggcaagaagggtggcggcgggaacgagatcccggtgcagatcaagggaaacaaccacggcggcgggcaaccgcacaacgcaaagggaggccccccgggcggcgggaacccgctggcccaggggaagaaaggcggtggcggtggtggcgccgtcggtgggccgatgggcggcatgctgccacagcaggccatgatgaggcccaacatgctgggtggcgctggtgccggcttccccggtacggcccagatgggcggcggacctatgggcatgccgatgggccacccgcacatgggtatcatgcagcagggcgggggcggcggcggcggcgtgccgggcctgggattctaccagggaaatgccaacggcggcggcggcggcggcatgcattctggcgcggagatgcttcaggccgccgcggcgtccgggaaccccatggcgcagcagcagtacatggccttgctgcagcatcagcagcagcagcatcagcagcagatgatgctgcaacacgggaacggcggaggagcagggtacccggcaatgggctacggctatggccggccaccgatgatgcattacccaatgcccccgcactcgcatcccgagccatacaacatcttcagcgacgagaaccccaacagcacctgctcactcatgtgatcagcatatcgtctcttgctgccctgttccaagtaaaacatctgaaggagctcaataccgctggccgccggcggacgtccgccatggttgaagcgccgtccgtgaatcaatcataaatcagtgtgcttggttggggggatgatcgtagctagaatttgccccttttcctcctcccgtttcacctttttctctacgcttattttcgccttcctttcagaaaaaaaggaacttccttgaatgcgaagtttggtatagtaattatgaatagtttccataagggaggagatggtgggggccttcttcatagccaacccacccaatagggggtgggtgggtggttcgcttgcgtcttcttccattctactagcttcataaaaggtggactgatggaagagcaaagttgtcaatctcagtaaaatcagtgtgcatatgtcgtggttccttttctgaccatatataatatatatatgtaatggtaataagttctgtttacggtagtcggctaatttctttagcacacaaattttctgtt

SEQ ID NO: 50117 - DNA, 2086 bp, Zea Mays
gctgactattgggctcgatgaccctgtatatcttcccccgccgccgagtccgcgtcgtcgccaaactcgctgctgccgcgcaattcttgcgaagtgggtacgaccgacgcagcagggatataagcctacgcctcagaactcccagttcccatctccgctacagaaaaccccagcaccagagaggtcaaggagaggagtgtcgcttccatgcgccatctcaagcgaacctgcgattcagtctcgggcaactcacgtgggtggccaacagaagattgcagaagcgcgctcggggttcgcctgtgccatgggcggactggtgtacccggaattgctcgtcagagcgggagcgctgccgtcgtctgccttctaccatgggcagggatcttcgcggcataatcagtgacgagcaagtgattgaggatccaggtgttcagcaggtagaagttgctgagcaggagctcattgaaggcaagttgtgcccttgaccacttttatttacccaataatgttctttataatcattttggcatgcataggcttaattttgatggaacccaataggtcaccctagtttggtaatctttacaccttgtttatccctgaacttttgtgtagtctttgttattgctatatatggttttgggtgttgagatacttattacatatggtcattctttattattattattgttctatttctgttcatgataagactattatgttaattggaacatggagcttaacttgagaaacacgtaccaccacaaggcttgaatgggatgccattggctgactaattaggaaagctagtggaggtctaccttacccgaaaggggcaagggcagtaggggagttggcgtgtagggaggttctcgggttgattttgctgtgatggcggtcagacgggggattcctgcattgagcttcctggaaactgtagtgggttttccgaagctagtggaactttgtaaaggcctcgtagcgttaccttgcctcgcttccttggtagaggtgtatggggtccatacaaccccgtggcagatgggtaacatgacttgtgggtacatggtacaacctctgtagagtgtaaaactagtatactagccatgctcacggtcatgagcagctcaggactctcgcatgattaacttatggaattaaattcaatttgtcatttgcatcacattttggtttattattaattttgatctattattactttggtttggtatctacttacatttagtaactgctaataaaatttgaccaacttattaaaagcaatgctcagctttaacccttatttcttgatcagccttacacttcacatgaactctcacctttggtgagttcatgcacattattccccacaacttgttgagctatgatattttgtgagctcacccttgcgatatataatccccccccacatgagaagaacaggtgctccagaaggagccctacaatgaggagtacgagcttatctaggtggcgtctcccagtcagctttatggcgccaaggattaatatttagttcactttactgttatcatttatttatgtaagacttccgctatgtaataatgatatttgtgacatttatctctatacactttgtcattatatgtgatgttcttctttggcgcacatatgagacacacccaactttatcccttaaatctgagtgtaacataggaaatagttaagccactttccctatcaactagcttcccgaaagttatacaatatgagctcaagctcttcaccctcgaagagcgccctaagctcctgctcttcaatgcgacaaggaccaaggaccccttcatacgtctcagttcgtagaatccgatgagattcttcctctgaccgcaccctctacccttcacgaaggtgtaaggatgtcacacccaacgcctcgtggagcgaaacctaggaatgaggtccacccaatcccatgcaccgccgtctacgactgccttcgcgatcgtgtatagacgaataggcactccctaactttcattttaaaacaccaacacggctccttttgccctttatcgcgggcatcggggcccattcgagggcccct

SEQ ID NO: 50118 - DNA, 285 bp, Zea Mays
atgactggagggcgtggagagatcgcctacacgcgggaggcaagcgacaatggggggaagctgaccgtggggggagctccatggcgatgggatgacgactggcagggaccgaggaagagcgtcggctgggtggggcgtccaaggagggaggatcacaagggaggtccatggcgctggctaggggcggccagcgaggggaagcagttggtggttgggcagtgcctagcggctatggggaggggaggagggagaagagaaagtggcttggtaccatgttacaattag

SEQ ID NO: 50119 - DNA, 603 bp, Zea Mays
ctcgaagtggccgagcgtagggacatggtgggctagtgagggatcgctgcgtgtggaagaggctgtctcagacgaaaggctgctcgtctgagcaggggaggaaggaacagttggagctcttgccgccgactgtgtgtggggagaggcgcgggaaggacatgagcacgagatgtttaggctgcaggatagtttggctctgataccaattgtaagtagagggactctaactctcatcaagaggatgacactatgagttgggacaattttctgtttatttcctcaaacactacacaatgtcatacccatctaagggttggagacccatatttatagccctagaggctgcactaccacaccttctcacacacactacacaacatgattgtcctctagatgctaaagagactacagaggacagtcaaaagcgactgttgtcctctagatgctaaagcgactacagaggacagtcaaaaagcgactgctgtcctctagatgctaaagagactacagaggacagtcaagctgtcctctagatgctaaaggactacagaggacagtcaaaagcgactgttgtcctctagatgctcaagacttattccatca

SEQ ID NO: 50120 - DNA, 2443 bp, Zea Mays
tccacaccatctgcatacagagttgagaggcaaagaacagaaaagtaagcatgactcaagctcattcaaagtcatgcttccaacaattttgggatggagttcatgttaagaggaacagtggcagcttcaccattgagctcctgccatctcttggtgcaacaataaaccaatctaacaagttgcagaggttcatcatatctccctacgatccccgttatagatactgggagttgttccttacagtcttagtcatttactccgcctggatttgcccgtttgaactagcatttttgagggacttgtcctctaagcttctgctggtcgagaacattgtcaatagcgtcttcgctattgatatcgttttgacgttctttgtagcttatgtcgacagcaaaacacatcttcttgtggatgatcgaaagagaattgcagtacctatcaacctggttcatctttgatgtatgttcaacagctccatttcagtcaatcagccttctttttacacataaggggaatgaccttgcttttaagatactcaatatgttgaggctatggcgtcttcaccgagtcagctcgctgtttgcaaggctggagaaggacataagattcaactatttctggactagatgctcaaaacttatttctgttactctgtttgccgtgcattgtgcgggatgtttcaactatatgattgccgatagatatcctgatccagagaaaacatggataggttatggggacctacatgctgagaacccaagagagatgttgtttgatatctgctatatgctgtttaatctgggcctgacagcttaccttattggtaatatgaccaacctggttgttcatgggaccagccgcacccggaattttagggactcaatccaatcggcatcggaatttgcggcacgaaatcagttgcccgagaagataaagcagcaaatgttgtctcacttctgcctacagttcaagacggaggggctcaaccagcaagctatgctaaattgtctcccaaaaggaattcgttcaagcatagcatacaacttattttttactatcatacgacaagcctacctctttcatggagtatctaatgatttcattgcagaactggtaatggaagtacaggctgagtatttcccaccaaaggaagacataatgttgcaaaatgagggggcagctgatatttatgtaatagtttcaggatcagtgaatttgataacaacagtaaacggtaatgaacaggtgtttggaaaagttgaagagagagacatgttcggagaggttggtgctctgtgtgacataccccagccatttacttgtcgcaccagtaccctatcacagctcttgagaataaggaagataagattaacagagatcatgcaagaacacagggaagacagcaatattatattgaacaatctatttcagaagctaaagctgcaggaaaatttaccagaattaaatcaactagatcgaagattcatgcacaagtatgagctattccatgctactcgagaagcatggttgttacctcaaccttacttacaatacactgagcacaaatttgaagacattagtaagaaggccccagcctttggtggagatcatggttcaacaaaactagcagcagaaacaatccagttgagggtgccacagcaaggaaacagtcatgaccatggtaattttggggcgacagataggatggcaagtggagatgacaaacgtaatgatcttcacataaactgtgagaccaaaaaaggaaccaaggaattttgcattcagataaaatcgaaagattgtgaagcagcaagctattggcaaacaagccctgaaacagtgaagctgggttcttcccacagtacattggatgccataactacgagagaaaatcaagatactagtaacataaaatcatctaacaaaagagttacaattcacgcagatcctcataatgcaacaggttctttagtacaaaatgggaagcttatcaatctgccttgttcactggaggagattttcgaaatcggaagtcagaagtttccaggtttccaccctacaaaattggtcagtagagactatgctgagatagatgacgttagtgttattcgagatggtgaccacttattccttcttcagatgtagaaccagaataacatcgatctaacctaacgtaacaataaaggcttcaagtcctccaatctggcaaaaacagcagattgtaaatcgagtggagatatgaagaggaatacctttttacaaattgttccggtcatttctgacattatgtaaatatctatttgcacgagctgctgtctcatgcaaaagtcatgccagaaagcggtttccgttttttttttctttctatttgataataagctctagacaaaaatatggaatctccgcaaaataaacttaataaaggcgaggctttacaaaataa

SEQ ID NO: 50121 - DNA, 1217 bp, Zea Mays
tgaaaacatatttgtacaggtgtttggaaaagttgaagagagagacatgttcggagaggttggtgctctgtgtgacataccccagccatttacttgtcgcaccagtaccctatcacagctcttgagaataaggaagataagattaacagagatcatgcaagaacacagggaagacagcaatattatattgaacaatctatttcagaagctaaagctgcaggaaaatttaccagaattaaatcaactagatcgaagattcatgcacaagtatgagctattccatgctactcgagaagcatggttgttacctcaaccttacttacaatacactgagcacaaatttgaagacattagtaagaaggccccagcctttggtggagatcatggttcaacaaaactagcagcagaaacaatccagttgagggtgccacagcaaggaaacagtcatgaccatggtaattttggggcgacagataggatggcaagtggagatgacaaacgtaatgatcttcacataaactgtgagaccaaaaaaggaaccaaggaattttgcattcagataaaatcgaaagattgtgaagcagcaagctattggcaaacaagccctgaaacagtgaagctgggttcttcccacagtacattggatgccataactacgagagaaaatcaagatactagtaacataaaatcatctaacaaaagagttacaattcacgcagatcctcataatgcaacaggttctttagtacaaaatgggaagcttatcaatctgccttgttcactggaggagattttcgaaatcggaagtcagaagtttccaggtttccaccctacaaaattggtcagtagagactatgctgagatagatgacgttagtgttattcgagatggtgaccacttattccttcttcagatgtagaaccagaataacatcgatctaacctaacgtaacaataaaggcttcaagtcctccaatctggcaaaaacagcagattgtaaatcgagtggagatatgaagaggaatacctttttacaaattgttccggtcatttctgacattatgtaaatatctatttgcacgagctgctgtctcatgcaaaagtcatgccagaaagcggtttccgttttttttttctttctatttgataataagctctagacaaaaatatggaatctccgcaaaataaacttaataaaggcgaggctttacaaaataa

SEQ ID NO: 50122 - DNA, 754 bp, Zea Mays
ctcctgtcggtattgagaatagacagtgcgatcctgagcgtccgtttctgtccagacggtcaaacatttcccgcccaatcaaacccaaaccctcaccggccaccgctcagtcgctcaacagacgccgcctcctcgtcgccggcgaccccagattcaacatccgcatgctctaatcgggcgcgcagctcggtgaggaaggagatggaggagttccaggcggcggttcgaggcggagactcgcgaggaagtgcggaggctgagggaggtgcagagcagtgcgatgtactcgaagtctcgaacaacacagagattgctgcaggagaagctaggaagcctgatctgactgctaagaaggcaaagctgggcgagagcatggcttcagcccgctagttcagagcactgcttcagcagcagctccagaaaacttttcagtcacatgggatcagaaagcagctcaagctaccattttaagcagatatttttcgtttccaggacaccaagaaagccttgttttgtgggtagcacattacaaaattcatcttaatctggtggacactataaaaatgtgcatttatgtatagcacaccatatcaattaataaactccttttgtgcatagaggaggaagcatttccggtaaaagggctgaaatatctttagaattggtcccactcatcaatttcttatctgctttggtataatattaacatacgtctggtatcccattaatatatgtcttcaattttatattattt

SEQ ID NO: 50123 - DNA, 718 bp, Zea Mays
atttcccgcccaatcaaacccaaaccctcaccggccaccgctcagtcgctcaacagacgccgcctcctcgtcgccggcgaccccagattcaacatccgcatgctctaatcgggcgcgcagctcggtgaggaaggagatggaggagttccaggcggcggttcgaggcggagactcgcgaggaagtgcggaggctgagggtatggtcccgatacttggcaaccataaagaggtgcagagcagtgcgatgtactcgaagtctcgaacaacacagagattgctgcaggagaagctaggaagcctgatctgactgctaagaaggcaaagctgggcgagagcatggcttcagcccgctagttcagagcactgcttcagcagcagctccagaaaacttttcagtcacatgggatcagaaagcagctcaagctaccattttaagcagatatttttcgtttccaggacaccaagaaagccttgttttgtgggtagcacattacaaaattcatcttaatctggtggacactataaaaatgtgcatttatgtatagcacaccatatcaattaataaactccttttgtgcatagaggaggaagcatttccggtaaaagggctgaaatatctttagaattggtcccactcatcaatttcttatctgctttggtataatattaacatacgtctggtatcccattaatatatgtcttcaattttatattattt

SEQ ID NO: 50124 - DNA, 1812 bp, Zea Mays
ccgcccgcaccgaggaaaaacttttttgaaaacaaaaaaccccccactcccacgtcccaccacctcgcctcggccgctgcgacagtgcatacgccccctcccctcctgactcctgttgcgtatacaccgtatgtgtctactgtgactccgggtcccgggggggtaagcgaccgagcaaggcttcgtctccggcggcggaggcggatctgggagggatggggaaccggataggcgggcggcgcaagtcgggggtggaggagcggttcacgcggccgcagggtctctacgaccacaaggacatcgaccagaagaagctgcgcaagctcatcctcgaggccaagctcgcgccctgctacccgggcgccgacgacgccgcgcccggcggaggggacctcgaggagtgccccatctgcttcctgtactacccaagcctcaaccgttcaaagtgttgctcaaaggggatatgtacagagtgttttcttcaaatgaaaccaactcatactgctcgacctacacagtgcccattctgcaaaacgcctaattatgctgtggagtatcgtggtgtgaaaacaaaggaggaaaggagcatagagcagtttgaagaacagaaagtcatagaagcacagttgaggatgcgccaaaaagaactccaagatgaagaagctaaaatgagaagaaaacagggcaggtgttcttctagcagaacggtaacaccaacaacagaagttgagtatcgagatatttgcagcacatccttttcagtgccatcatatcaatgtactgagcaaggaaatgaatgctgttcatctgaaccttcatgctctagccaggctaacaggcggcctttccattctagacacaaccgtgatgataatgttgacatgaatctggagaacatgatggttatggaagcaatttggcgttccattcaggaacaaggacatctagtaaatcctgtttgtggcagctactttcctgtaattgagccaccatcacgtgaaaggcaggcatttcttccggctgctcctctagaaatgcctcatccaggtggatactcttgtgttgcggctttggctgagcaccagccaccaagcatggatttctcttacatggctggcagtagcacatacccagtctttgacatgatccgccgaccgtgcaacatgtctagtggaagcttgtgcagcgtcgagaacagttcactagacacctggagcgggatggcaccaaattgcagcagaggagtggtaagagaggagggagagtgctcaaccgaccactggtcggagggtgcggaggcgggaacaagctatgccggatcggacatcatggtggatgcaggggccatgcaaccgctgcctttcgctgagaatttcaccatggctccaagccacttccgcccggagagcatcgaggagcagatgatgttttccatggccgtgtcactagcagaaggtcatcatggtaggacgcaagcgcaaggtctggcatggttgtaagttgtataacactaattttgacgccttgatccctgcccctttctgttggttcgacctgcttcccctgcacctctgcttttttgccactttgtttagctttttgctccttttttttcttttctttcttttttgcatgtgttgcttcatggcttgatatagatcttgctatagtcctccattgtcattgcttatatgtatgtaaaatggaatatgtggaaataggaaagaaaatgggtcgaaagttcttttgccggtaggatgcgcagtgtgttttcgcattgcaaagcattccaagattttgcaaagttgacct

SEQ ID NO: 50125 - DNA, 1305 bp, Zea Mays
tgtacaggtgcccattctgcaaaacgcctaattatgctgtggagtatcgtggtgtgaaaacaaaggaggaaaggagcatagagcagtttgaagaacagaaagtcatagaagcacagttgaggatgcgccaaaaagaactccaagatgaagaagctaaaatgagaagaaaacagggcaggtgttcttctagcagaacggtaacaccaacaacagaagttgagtatcgagatatttgcagcacatccttttcagtgccatcatatcaatgtactgagcaaggaaatgaatgctgttcatctgaaccttcatgctctagccaggctaacaggcggcctttccattctagacacaaccgtgatgataatgttgacatgaatctggagaacatgatggttatggaagcaatttggcgttccattcagcaggaacaaggacatctagtaaatcctgtttgtggcagctactttcctgtaattgagccaccatcacgtgaaaggcaggcatttcttccggctgctcctctagaaatgcctcatccaggtggatactcttgtgttgcggctttggctgagcaccagccaccaagcatggatttctcttacatggctggcagtagcacatacccagtctttgacatgatccgccgaccgtgcaacatgtctagtggaagcttgtgcagcgtcgagaacagttcactagacacctggagcgggatggcaccaaattgcagcagaggagtggtaagagaggagggagagtgctcaaccgaccactggtcggagggtgcggaggcgggaacaagctatgccggatcggacatcatggtggatgcaggggccatgcaaccgctgcctttcgctgagaatttcaccatggctccaagccacttccgcccggagagcatcgaggagcagatgatgttttccatggccgtgtcactagcagaaggtcatcatggtaggacgcaagcgcaaggtctggcatggttgtaagttgtataacactaattttgacgccttgatccctgcccctttctgttggttcgacctgcttcccctgcacctctgcttttttgccactttgtttagctttttgctccttttttttcttttctttcttttttgcatgtgttgcttcatggcttgatatagatcttgctatagtcctccattgtcattgcttatatgtatgtaaaatggaatatgtggaaataggaaagaaaatgggtcgaaagttcttttgccggtaggatgcgcagtgtgttttcgcattgcaaagcattccaagattttgcaaagttgacct

SEQ ID NO: 50126 - DNA, 3154 bp, Zea Mays
gaaaattctcggcgctccctggtcaataagtattctggaatgtttttccgagctcaaatagagaacttctggagctggatatcagtattctgttagggatatgctccaaccaagggaagctgatgtgcctgcactctttcttgtcttcattgtacttcccgtggtagcttattttcttcttgggagatggcatgactctgcaagtaagaaggcaagggcaagtgtgcttgcacagcgagctgcagaagaagcctatagagaggaaacgatggcgtgcccagacattattccgccaggcccttccttgagaactatgccctatttcaaacctgcgccttcgttaagacaggaataccatgagtgtgcaacttgccatgcccctgcaaagactcgttgctccagatgcaagtctgttagatactgctctgggaagtgtcaaatagtacactggaggcaaggacataaggaaacatgccaaaaatggcttggtagtggttctagcagctttggtggatctagcactgaggctactgaacagatgccgttcttggctaacttgaattcacctcttccaggtggtgacattcacttgcgtgacatgaacttcgatactttatcagaaccatcctttcccacaactgatggttacaatctagatactgacccatttccggcagatagaagcaacatgaatagatcaaatcaaggtattcatatgagcgaaaatggtgctgttggtgtatcttttgaaaagaataattataatgctgctgatgaaatacactcttcggagattttatctggaaacaaggtgtcaaacaactattttggttcagatgcaatgagtggtaatggggatgcaacttatcctgccaaaagtaatgcacagcagcctagcagttgtgctcctgacgtgagaaaacaatcaaaagcaagcatcacagtttatcagcctgacatgagtgtctatttaacttctgacatggtcagttcttgtgagggatcatatgtttctgccggtgagccactgcaaaggagcttgtcatctggaagaactattgggaaagtaactgtggtgaataaaaggccttcttacccatcaagtaaggtggtctcagcacaaaagtcacaggataaggtgtctacatcatatcaaaatgatgcccatgagaagaatccttgcaacaaaaatgaccaaagatctacccccacatgtgaatcaagtcaatcaacaagcagcaatctactgaagtctggaacatccaaggttgaagttttaaagaagccttcaaaatttctcaaaaccagccttgtggcattgatcaatgataataagaggaacaaggtattgttcccatatgaagatattgtcaagttttttcagtatgaagcacggggtgtttcccctagaggtcttttcaattgtggaaacagctgctatgctaatgctgttcttcaatgtctcatgtgcacaaagccactgatgatctaccttcttctgagattgcattctaaagattgttgttcaaaaaattggtgccttatgtgtgaacttgagcaatatgcttcaactttacgtgaaagtggtggacccttatctccaagtagaatcctttctaatctgaggaatattggatgtcgcttgggtggtggaactcaggaagatgcccatgagtttctaaggcatcttgtgatgtctatgcaagcagcttgcttggatgggctgggtggtgagaagcacgttgaaccaagtttgcaggaaacaacactgatacaacagatgtttggtggccgtcttaaatccaaggttaagtgcctcagatgctatcacgagtctgaaagatatgagaatataatggatcttactttggagattcatggctgggtagagtccttgcaagatgctttgacacagttcactgctcctgaagatttagatggtgataatatgtataaatgtggaaggtgttctgcctatgttaaagctaggaagcaactgagcgtgcatgaggtgccaaacattttaacagttgttcttaaaagatttcagtcaggaaaatatggcaagatcaacaaatgtgttactttccctgatatgttggacatggttcccttcgtgactgggtctggtgacaatccccctctttatttcttgtacgccgtggttgtacatgtcgatacagaaaatgcatcattctctgggcactatatatcatacgtcaaagatatgcagggtacatggttgagaattgatgattcagaggtccaggttgtatcagtgaatcaggttatgtcagaaggtgcatacatgcttttctacttgaggtcttttccccgaccaccaaggatatacatcgagaaggggctgccggttacatccgcaaagcggcacacgtcgaaatcttccaagggctctaaacacgatcgcaagcagacagagttactctttcctgcaaacgatcaggcatatggcgtctatgatttcagacccgatggcgaaggctatgcccaagatcagcatgcagagctgaggtccagagctttccatcacgccgacgatgcctttgcagactcggttagcgcggacttctcggaagcgacatcaagtgaatggtcgctgtttaccagctccgacgagtcctcgttcaccaccgagagcacaagggattcgttcagcgtcgtggactacggagacaacgccggcctggatccgatttcctccatattcgggccaagctatgctccggagcacggtgctcccggcagtttcgtctcgcgcacaaggttctcaccttccagtccacagacaagatgaggcttattgaatttttagctacatgtcgtttctaggggtagctcgattcgatgtagcgaaaaaaagttagattatgtctatatgcaggtgaaattttagagcatggtgacaagctctgtggcaaccgttttccaatgctaatctcgtaaccctggctgctgcttctggtcttagattaatgtatgtcccaagtgattattccccagcttgttactttctcggaacgttcatgcatttcttagagagaacttagagaccaaagaattgtcagacgatcgacggacttagattgacttatgtttctgatcggagaaagtaacaccggtcaaatgagatttc

SEQ ID NO: 50127 - DNA, 3621 bp, Zea Mays
agcaaattcaccactccccccgatcgagactctggagcgcagagacggcagagagcacagtagccaagcgagtggaggagagttggagactcatcactggagagcatccgaagccgcccagtgctcgcacaaccgctcccgattcccaacccctccgtccgcccaaggggcgccgcaccatctccagcctccaggcctcgatccctaccggaccccgtggccctgctgtgttatctggctggagatccggccggagtggcattcctgctctcggtcaataagtattctggaatgtttttccgagctcaaatagagaacttctggagctggatatcagtattctgttagggatatgctccaaccaagggaagctgatgtgcctgcactctttcttgtcttcattgtacttcccgtggtagcttattttcttcttgggagatggcatgactctgcaagtaagaaggcaagggcaagtgtgcttgcacagcgagctgcagaagaagcctatagagaggaaacgatggcgtgcccagacattattccgccaggcccttccttgagaactatgccctatttcaaacctgcgccttcgttaagacaggaataccatgagtgtgcaacttgccatgcccctgcaaagactcgttgctccagatgcaagtctgttagatactgctctgggaagtgtcaaatagtacactggaggcaaggacataaggaaacatgccaaaaatggcttggtggtgacattcacttgcgtgacatgaacttcgatactttatcagaaccatcctttcccacaactgatggttacaatctagatactgacccatttccggcagatagaagcaacatgaatagatcaaatcaaggtattcatatgagcgaaaatggtgctgttggtgtatcttttgaaaagaataattataatgctgctgatgaaatacactcttcggagattttatctggaaacaaggtgtcaaacaactattttggttcagatgcaatgagtggtaatggggatgcaacttatcctgccaaaagtaatgcacagcagcctagcagttgtgctcctgacgtgagaaaacaatcaaaagcaagcatcacagtttatcagcctgacatgagtgtctatttaacttctgacatggtcagttcttgtgagggatcatatgtttctgccggtgagccactgcaaaggagcttgtcatctggaagaactattgggaaagtaactgtggtgaataaaaggccttcttacccatcaagtaaggtggtctcagcacaaaagtcacaggataaggtgtctacatcatatcaaaatgatgcccatgagaagaatccttgcaacaaaaatgaccaaagatctacccccacatgtgaatcaagtcaatcaacaagcagcaatctactgaagtctggaacatccaaggttgaagttttaaagaagccttcaaaatttctcaaaaccagccttgtggcattgatcaatgataataagaggaacaaggtattgttcccatatgaagatattgtcaagttttttcagtatgaagcacggggtgtttcccctagaggtcttttcaattgtggaaacagctgctatgctaatgctgttcttcaatgtctcatgtgcacaaagccactgatgatctaccttcttctgagattgcattctaaagattgttgttcaaaaaattggtgccttatgtgtgaacttgagcaatatgcttcaactttacgtgaaagtggtggacccttatctccaagtagaatcctttctaatctgaggaatattggatgtcgcttgggtggtggaactcaggaagatgcccatgagtttctaaggcatcttgtgatgtctatgcaagcagcttgcttggatgggctgggtggtgagaagcacgttgaaccaagtttgcaggaaacaacactgatacaacagatgtttggtggccgtcttaaatccaaggttaagtgcctcagatgctatcacgagtctgaaagatatgagaatataatggatcttactttggagattcatggctgggtagagtccttgcaagatgctttgacacagttcactgctcctgaagatttagatggtgataatatgtataaatgtggaaggtgttctgcctatgttaaagctaggaagcaactgagcgtgcatgaggtgccaaacattttaacagttgttcttaaaagatttcagtcaggaaaatatggcaagatcaacaaatgtgttactttccctgatatgttggacatggttcccttcgtgactgggtctggtgacaatccccctctttatttcttgtacgccgtggttgtacatgtcgatacagaaaatgcatcattctctgggcactatatatcatacgtcaaagatatgcagggtacatggttgagaattgatgattcagaggtccaggttgtatcagtgaatcaggttatgtcagaaggtgcatacatgcttttctacttgaggtcttttccccgaccaccaaggatatacatcgagaaggggctgccggttacatccgcaaagcggcacacgtcgaaatcttccaagggctctaaacacgatcgcaagcagacagagttactctttcctgcaaacgatcaggcatatggcgtctatgatttcagacccgatggcgaaggctatgcccaagatcagcatgcagagctgaggtccagagctttccatcacgccgacgatgcctttgcagactcggttagcgcggacttctcggaagcgacatcaagtgaatggtcgctgtttaccagctccgacgagtcctcgttcaccaccgagagcacaagggattcgttcagcgtcgtggactacggagacaacgccggcctggatccgatttcctccatattcgggccaagctatgctccggagcacggtgctcccggcagtttcgtctcgcgcacaaggttctcaccttccagtccacagacaaggtacttctcggagagcacaggctttgtctcggactcttccatgccggcccacccccacggcattgtacatagaggaaggtatccggatagtagggcgtgcgcctcttctgcggaaccgcttgcgtcggcggcgcatcagcggagcgggtatggccggtacccccttagtcgagatggttttgttcaaacatctggtttttgccaaatgtaatcggctcacatttcattagctgtagctggtgcatcggcagttgcggttcttagcactgccgttaatgctgcctcatgttcttttatttcagatgaggcttattgaatttttagctacatgtcgtttctaggggtagctcgattcgatgtagcgaaaaaaagttagattatgtctatatgcaggtgaaattttagagcatggtgacaagctctgtggcaaccgttttccaatgctaatctcgtaaccctggctgctgcttctggtcttagattaatgtatgtcccaagtgattattccccagcttgttactttctcggaacgttcatgcatttcttagagagaacttagagaccaaagaattgtcagacgatcgacggacttagattgacttatgtttctgatcggagaaagtaacaccggtcaaatgagatttc

SEQ ID NO: 50128 - DNA, 3665 bp, Zea Mays
ccccgatcgagactctggagcgcagagacggcagagagcacagtagccaagcgagtggaggagagttggagactcatcactggagagcatccgaagccgcccagtgctcgcacaaccgctcccgattcccaacccctccgtccgcccaaggggcgccgcaccatctccagcctccaggcctcgatccctaccggaccccgtggccctgctgtgttatctggctggagatccggccggagtggcattcctgctctcggtcaataagtattctggaatgtttttccgagctcaaatagagaacttctggagctggatatcagtattctgttagggatatgctccaaccaagggaagctgatgtgcctgcactctttcttgtcttcattgtacttcccgtggtagcttattttcttcttgggagatggcatgactctgcaagtaagaaggcaagggcaagtgtgcttgcacagcgagctgcagaagaagcctatagagaggaaacgatggcgtgcccagacattattccgccaggcccttccttgagaactatgccctatttcaaacctgcgccttcgttaagacaggaataccatgagtgtgcaacttgccatgcccctgcaaagactcgttgctccagatgcaagtctgttagatactgctctgggaagtgtcaaatagtacactggaggcaaggacataaggaaacatgccaaaaatggcttggtagtggttctagcagctttggtggatctagcactgaggctactgaacagatgccgttcttggctaacttgaattcacctcttccaggtggtgacattcacttgcgtgacatgaacttcgatactttatcagaaccatcctttcccacaactgatggttacaatctagatactgacccatttccggcagatagaagcaacatgaatagatcaaatcaaggtattcatatgagcgaaaatggtgctgttggtgtatcttttgaaaagaataattataatgctgctgatgaaatacactcttcggagattttatctggaaacaaggtgtcaaacaactattttggttcagatgcaatgagtggtaatggggatgcaacttatcctgccaaaagtaatgcacagcagcctagcagttgtgctcctgacgtgagaaaacaatcaaaagcaagcatcacagtttatcagcctgacatgagtgtctatttaacttctgacatggtcagttcttgtgagggatcatatgtttctgccggtgagccactgcaaaggagcttgtcatctggaagaactattgggaaagtaactgtggtgaataaaaggccttcttacccatcaagtaaggtggtctcagcacaaaagtcacaggataaggtgtctacatcatatcaaaatgatgcccatgagaagaatccttgcaacaaaaatgaccaaagatctacccccacatgtgaatcaagtcaatcaacaagcagcaatctactgaagtctggaacatccaaggttgaagttttaaagaagccttcaaaatttctcaaaaccagccttgtggcattgatcaatgataataagaggaacaaggtattgttcccatatgaagatattgtcaagttttttcagtatgaagcacggggtgtttcccctagaggtcttttcaattgtggaaacagctgctatgctaatgctgttcttcaatgtctcatgtgcacaaagccactgatgatctaccttcttctgagattgcattctaaagattgttgttcaaaaaattggtgccttatgtgtgaacttgagcaatatgcttcaactttacgtgaaagtggtggacccttatctccaagtagaatcctttctaatctgaggaatattggatgtcgcttgggtggtggaactcaggaagatgcccatgagtttctaagcttgcttggatgggctgggtggtgagaagcacgttgaaccaagtttgcaggaaacaacactgatacaacagatgtttggtggccgtcttaaatccaaggttaagtgcctcagatgctatcacgagtctgaaagatatgagaatataatggatcttactttggagattcatggctgggtagagtccttgcaagatgctttgacacagttcactgctcctgaagatttagatggtgataatatgtataaatgtggaaggtgttctgcctatgttaaagctaggaagcaactgagcgtgcatgaggtgccaaacattttaacagttgttcttaaaagatttcagtcaggaaaatatggcaagatcaacaaatgtgttactttccctgatatgttggacatggttcccttcgtgactgggtctggtgacaatccccctctttatttcttgtacgccgtggttgtacatgtcgatacagaaaatgcatcattctctgggcactatatatcatacgtcaaagatatgcagggtacatggttgagaattgatgattcagaggtccaggttgtatcagtgaatcaggttatgtcagaaggtgcatacatgcttttctacttgaggtcttttccccgaccaccaaggatatacatcgagaaggggctgccggttacatccgcaaagcggcacacgtcgaaatcttccaagggctctaaacacgatcgcaagcagacagagttactctttcctgcaaacgatcaggcatatggcgtctatgatttcagacccgatggcgaaggctatgcccaagatcagcatgcagagctgaggtccagagctttccatcacgccgacgatgcctttgcagactcggttagcgcggacttctcggaagcgacatcaagtgaatggtcgctgtttaccagctccgacgagtcctcgttcaccaccgagagcacaagggattcgttcagcgtcgtggactacggagacaacgccggcctggatccgatttcctccatattcgggccaagctatgctccggagcacggtgctcccggcagtttcgtctcgcgcacaaggttctcaccttccagtccacagacaaggtacttctcggagagcacaggctttgtctcggactcttccatgccggcccacccccacggcattgtacatagaggaaggtatccggatagtagggcgtgcgcctcttctgcggaaccgcttgcgtcggcggcgcatcagcggagcgggtatggccggtacccccttagtcgagatggttttgttcaaacatctggtttttgccaaatgtaatcggctcacatttcattagctgtagctggtgcatcggcagttgcggttcttagcactgccgttaatgctgcctcatgttcttttatttcagatgaggcttattgaatttttagctacatgtcgtttctaggggtagctcgattcgatgtagcgaaaaaaagttagattatgtctatatgcaggtgaaattttagagcatggtgacaagctctgtggcaaccgttttccaatgctaatctcgtaaccctggctgctgcttctggtcttagattaatgtatgtcccaagtgattattccccagcttgttactttctcggaacgttcatgcatttcttagagagaacttagagaccaaagaattgtcagacgatcgacggacttagattgacttatgtttctgatcggagaaagtaacaccggtcaaatgagatttc

SEQ ID NO: 50129 - DNA, 1776 bp, Zea Mays
cggcagagagcacagtagccaagcgagtggaggagagttggagactcatcactggagagcatccgaagccgcccagtgctcgcacaaccgctcccgattcccaacccctccgtccgcccaaggggcgccgcaccatctccagcctccaggcctcgatccctaccggaccccgtggccctgctgtgttatctggctggagatccggccggagtggcattcctgctctcggtcaataagtattctggaatgtttttccgagctcaaatagagaacttctggagctggatatcagtattctgttagggatatgctccaaccaagggaagctgatgtgcctgcactctttcttgtcttcattgtacttcccgtggtagcttattttcttcttgggagatggcatgactctgcaagtaagaaggcaagggcaagtgtgcttgcacagcgagctgcagaagaagcctatagagaggaaacgatggcgtgcccagacattattccgccaggcccttccttgagaactatgccctatttcaaacctgcgccttcgttaagacaggaataccatgagtgtgcaacttgccatgcccctgcaaagactcgttgctccagatgcaagtctgttagatactgctctgggaagtgtcaaatagtacactggaggcaaggacataaggaaacatgccaaaaatggcttggtagtggttctagcagctttggtggatctagcactgaggctactgaacagatgccgttcttggctaacttgaattcacctcttccagatagaagcaacatgaatagatcaaatcaaggtattcatatgagcgaaaatggtgctgttggtgtatcttttgaaaagaataattataatgctgctgatgaaatacactcttcggagattttatctggaaacaaggtgtcaaacaactattttggttcagatgcaatgagtggtaatggggatgcaacttatcctgccaaaagtaatgcacagcagcctagcagttgtgctcctgacgtgagaaaacaatcaaaagcaagcatcacagtttatcagcctgacatgagtgtctatttaacttctgacatggtcagttcttgtgagggatcatatgtttctgccggtgagccactgcaaaggagcttgtcatctggaagaactattgggaaagtaactgtggtgaataaaaggccttcttacccatcaagtaaggtggtctcagcacaaaagtcacaggataaggtgtctacatcatatcaaaatgatgcccatgagaagaatccttgcaacaaaaatgaccaaagatctacccccacatgtgaatcaagtcaatcaacaagcagcaatctactgaagtctggaacatccaaggttgaagttttaaagaagccttcaaaatttctcaaaaccagccttgtggcattgatcaatgataataagaggaacaaggtattgttcccatatgaagatattgtcaagttttttcagtatgaagcacggggtgtttcccctagaggtcttttcaattgtggaaacaggtgatgatggtgccttttggcactcgacttgagttgcaaaatagaaaaaatgccaaatggatgtttgcactcactgcagaagtgatgggggaacttaaacaagtagagcagctgaaaggcccctactaaaaacaagagtttacttaacagtggtttatcatgttgcttgactagttattttttttaaattatcacttaattagtctttgtgcatgcacacactacttatgggacaat

SEQ ID NO: 50130 - DNA, 1929 bp, Zea Mays
cggcagagagcacagtagccaagcgagtggaggagagttggagactcatcactggagagcatccgaagccgcccagtgctcgcacaaccgctcccgattcccaacccctccgtccgcccaaggggcgccgcaccatctccagcctccaggcctcgatccctaccggaccccgtggccctgctgtgttatctggctggagatccggccggagtggcattcctgctctcggtcaataagtattctggaatgtttttccgagctcaaatagagaacttctggagctggatatcagtattctgttagggatatgctccaaccaagggaagctgatgtgcctgcactctttcttgtcttcattgtacttcccgtggtagcttattttcttcttgggagatggcatgactctgcaagtaagaaggcaagggcaagtgtgcttgcacagcgagctgcagaagaagcctatagagaggaaacgatggcgtgcccagacattattccgccaggcccttccttgagaactatgccctatttcaaacctgcgccttcgttaagacaggaataccatgagtgtgcaacttgccatgcccctgcaaagactcgttgctccagatgcaagtctgttagatactgctctgggaagtgtcaaatagtacactggaggcaaggacataaggaaacatgccaaaaatggcttggtagtggttctagcagctttggtggatctagcactgaggctactgaacagatgccgttcttggctaacttgaattcacctcttccaggtggtgacattcacttgcgtgacatgaacttcgatactttatcagaaccatcctttcccacaactgatggttacaatctagatactgacccatttccggcagatagaagcaacatgaatagatcaaatcaaggtattcatatgagcgaaaatggtgctgttggtgtatcttttgaaaagaataattataatgctgctgatgaaatacactcttcggagattttatctggaaacaaggtgtcaaacaactattttggttcagatgcaatgagtggtaatggggatgcaacttatcctgccaaaagtaatgcacagcagcctagcagttgtgctcctgacgtgagaaaacaatcaaaagcaagcatcacagtttatcagcctgacatgagtgtctatttaacttctgacatggtcagttcttgtgagggatcatatgtttctgccggtgagccactgcaaaggagcttgtcatctggaagaactattgggaaagtaactgtggtgaataaaaggccttcttacccatcaagtaaggtggtctcagcacaaaagtcacaggataaggtgtctacatcatatcaaaatgatgcccatgagaagaatccttgcaacaaaaatgaccaaagatctacccccacatgtgaatcaagtcaatcaacaagcagcaatctactgaagtctggaacatccaaggttgaagttttaaagaagccttcaaaatttctcaaaaccagccttgtggcattgatcaatgataataagaggaacaaggtattgttcccatatgaagatattgtcaagttttttcagtatgaagcacggggtgtttcccctagaggtcttttcaattgtggaaacagctgctatgctaatgctgttcttcaatgtctcatgtgcacaaagccactgatgatctaccttcttctgagattgcattctaaagattgttgttcaaaaaattggtgccttatgtgtgaacttgagcaatatgcttcaactttacgtgaaagtggtggacccttatctccaagtagaatcctttctaatctgaggaatattggatgtcgcttgggtggtggaactcaggaagatgcccatgagtttctaaggttctcatgctgtagtatttttagacacttcagaagcct

SEQ ID NO: 50131 - DNA, 3219 bp, Zea Mays
gtaaacaatccgtgacttttgttaggtttccaggtcaataagtattctggaatgtttttccgagctcaaatagagaacttctggagctggatatcagtattctgttagggatatgctccaaccaagggaagctgatgtgcctgcactctttcttgtcttcattgtacttcccgtggtagcttattttcttcttgggagatggcatgactctgcaagtaagaaggcaagggcaagtgtgcttgcacagcgagctgcagaagaagcctatagagaggaaacgatggcgtgcccagacattattccgccaggcccttccttgagaactatgccctatttcaaacctgcgccttcgttaagacaggaataccatgagtgtgcaacttgccatgcccctgcaaagactcgttgctccagatgcaagtctgttagatactgctctgggaagtgtcaaatagtacactggaggcaaggacataaggaaacatgccaaaaatggcttggtagtggttctagcagctttggtggatctagcactgaggctactgaacagatgccgttcttggctaacttgaattcacctcttccaggtggtgacattcacttgcgtgacatgaacttcgatactttatcagaaccatcctttcccacaactgatggttacaatctagatactgacccatttccggcagatagaagcaacatgaatagatcaaatcaaggtattcatatgagcgaaaatggtgctgttggtgtatcttttgaaaagaataattataatgctgctgatgaaatacactcttcggagattttatctggaaacaaggtgtcaaacaactattttggttcagatgcaatgagtggtaatggggatgcaacttatcctgccaaaagtaatgcacagcagcctagcagttgtgctcctgacgtgagaaaacaatcaaaagcaagcatcacagtttatcagcctgacatgagtgtctatttaacttctgacatggtcagttcttgtgagggatcatatgtttctgccggtgagccactgcaaaggagcttgtcatctggaagaactattgggaaagtaactgtggtgaataaaaggccttcttacccatcaagtaaggtggtctcagcacaaaagtcacaggataaggtgtctacatcatatcaaaatgatgcccatgagaagaatccttgcaacaaaaatgaccaaagatctacccccacatgtgaatcaagtcaatcaacaagcagcaatctactgaagtctggaacatccaaggttgaagttttaaagaagccttcaaaatttctcaaaaccagccttgtggcattgatcaatgataataagaggaacaaggtattgttcccatatgaagatattgtcaagttttttcagtatgaagcacggggtgtttcccctagaggtcttttcaattgtggaaacaggcatcttgtgatgtctatgcaagcagcttgcttggatgggctgggtggtgagaagcacgttgaaccaagtttgcaggaaacaacactgatacaacagatgtttggtggccgtcttaaatccaaggttaagtgcctcagatgctatcacgagtctgaaagatatgagaatataatggatcttactttggagattcatggctgggtagagtccttgcaagatgctttgacacagttcactgctcctgaagatttagatggtgataatatgtataaatgtggaaggtgttctgcctatgttaaagctaggaagcaactgagcgtgcatgaggtgccaaacattttaacagttgttcttaaaagatttcagtcaggaaaatatggcaagatcaacaaatgtgttactttccctgatatgttggacatggttcccttcgtgactgggtctggtgacaatccccctctttatttcttgtacgccgtggttgtacatgtcgatacagaaaatgcatcattctctgggcactatatatcatacgtcaaagatatgcagggtacatggttgagaattgatgattcagaggtccaggttgtatcagtgaatcaggttatgtcagaaggtgcatacatgcttttctacttgaggtcttttccccgaccaccaaggatatacatcgagaaggggctgccggttacatccgcaaagcggcacacgtcgaaatcttccaagggctctaaacacgatcgcaagcagacagagttactctttcctgcaaacgatcaggcatatggcgtctatgatttcagacccgatggcgaaggctatgcccaagatcagcatgcagagctgaggtccagagctttccatcacgccgacgatgcctttgcagactcggttagcgcggacttctcggaagcgacatcaagtgaatggtcgctgtttaccagctccgacgagtcctcgttcaccaccgagagcacaagggattcgttcagcgtcgtggactacggagacaacgccggcctggatccgatttcctccatattcgggccaagctatgctccggagcacggtgctcccggcagtttcgtctcgcgcacaaggttctcaccttccagtccacagacaaggtacttctcggagagcacaggctttgtctcggactcttccatgccggcccacccccacggcattgtacatagaggaaggtatccggatagtagggcgtgcgcctcttctgcggaaccgcttgcgtcggcggcgcatcagcggagcgggtatggccggtacccccttagtcgagatggttttgttcaaacatctggtttttgccaaatgtaatcggctcacatttcattagctgtagctggtgcatcggcagttgcggttcttagcactgccgttaatgctgcctcatgttcttttatttcagatgaggcttattgaatttttagctacatgtcgtttctaggggtagctcgattcgatgtagcgaaaaaaagttagattatgtctatatgcaggtgaaattttagagcatggtgacaagctctgtggcaaccgttttccaatgctaatctcgtaaccctggctgctgcttctggtcttagattaatgtatgtcccaagtgattattccccagcttgttactttctcggaacgttcatgcatttcttagagagaacttagagaccaaagaattgtcagacgatcgacggacttagattgacttatgtttctgatcggagaaagtaacaccggtcaaatgagatttc

SEQ ID NO: 50132 - DNA, 3473 bp, Zea Mays
gtcaaacgggtgggagcttcttgagatcatcatataaggtcaataagtattctggaatgtttttccgagctcaaatagagaacttctggagctggatatcagtattctgttagggatatgctccaaccaagggaagctgatgtgcctgcactctttcttgtcttcattgtacttcccgtggtagcttattttcttcttgggagatggcatgactctgcaagtaagaaggcaagggcaagtgtgcttgcacagcgagctgcagaagaagcctatagagaggaaacgatggcgtgcccagacattattccgccaggcccttccttgagaactatgccctatttcaaacctgcgccttcgttaagacaggaataccatgagtgtgcaacttgccatgcccctgcaaagactcgttgctccagatgcaagtctgttagatactgctctgggaagtgtcaaatagtacactggaggcaaggacataaggaaacatgccaaaaatggcttggtagtggttctagcagctttggtggatctagcactgaggctactgaacagatgccgttcttggctaacttgaattcacctcttccaggtggtgacattcacttgcgtgacatgaacttcgatactttatcagaaccatcctttcccacaactgatggttacaatctagatactgacccatttccggcagatagaagcaacatgaatagatcaaatcaaggtattcatatgagcgaaaatggtgctgttggtgtatcttttgaaaagaataattataatgctgctgatgaaatacactcttcggagattttatctggaaacaaggtgtcaaacaactattttggttcagatgcaatgagtggtaatggggatgcaacttatcctgccaaaagtaatgcacagcagcctagcagttgtgctcctgacgtgagaaaacaatcaaaagcaagcatcacagtttatcagcctgacatgagtgtctatttaacttctgacatggtcagttcttgtgagggatcatatgtttctgccggtgagccactgcaaaggagcttgtcatctggaagaactattgggaaagtaactgtggtgaataaaaggccttcttacccatcaagtaaggtggtctcagcacaaaagtcacaggataaggtgtctacatcatatcaaaatgatgcccatgagaagaatccttgcaacaaaaatgaccaaagatctacccccacatgtgaatcaagtcaatcaacaagcagcaatctactgaagtctggaacatccaaggttgaagttttaaagaagccttcaaaatttctcaaaaccagccttgtggcattgatcaatgataataagaggaacaaggtattgttcccatatgaagatattgtcaagttttttcagtatgaagcacggggtgtttcccctagaggtcttttcaattgtggaaacagctgctatgctaatgctgttcttcaatgtctcatgtgcacaaagccactgatgatctaccttcttctgagattgcattctaaagattgttgttcaaaaaattggtgccttatgtgtgaacttgagcaatatgcttcaactttacgtgaaagtggtggacccttatctccaagtagaatcctttctaatctgaggaatattggatgtcgcttgggtggtggaactcaggaagatgcccatgagtttctaaggcatcttgtgatgtctatgcaagcagcttgcttggatgggctgggtggtgagaagcacgttgaaccaagtttgcaggaaacaacactgatacaacagatgtttggtggccgtcttaaatccaaggttaagtgcctcagatgctatcacgagtctgaaagatatgagaatataatggatcttactttggagattcatggctgggtagagtccttgcaagatgctttgacacagttcactgctcctgaagatttagatggtgataatatgtataaatgtggaaggtgttctgcctatgttaaagctaggaagcaactgagcgtgcatgaggtgccaaacattttaacagttgttcttaaaagatttcagtcaggaaaatatggcaagatcaacaaatgtgttactttccctgatatgttggacatggttcccttcgtgactgggtctggtgacaatccccctctttatttcttgtacgccgtggttgtacatgtcgatacagaaaatgcatcattctctgggcactatatatcatacgtcaaagatatgcagggtacatggttgagaattgatgattcagaggtccaggttgtatcagtgaatcaggttatgtcagaaggtgcatacatgcttttctacttgaggtcttttccccgaccaccaaggatatacatcgagaaggggctgccggttacatccgcaaagcggcacacgtcgaaatcttccaagggctctaaacacgatcgcaagcagacagagttactctttcctgcaaacgatcaggcatatggcgtctatgatttcagacccgatggcgaaggctatgcccaagatcagcatgcagagctgaggtccagagctttccatcacgccgacgatgcctttgcagactcggttagcgcggacttctcggaagcgacatcaagtgaatggtcgctgtttaccagctccgacgagtcctcgttcaccaccgagagcacaagggattcgttcagcgtcgtggactacggagacaacgccggcctggatccgatttcctccatattcgggccaagctatgctccggagcacggtgctcccggcagtttcgtctcgcgcacaaggttctcaccttccagtccacagacaaggtacttctcggagagcacaggctttgtctcggactcttccatgccggcccacccccacggcattgtacatagaggaaggtatccggatagtagggcgtgcgcctcttctgcggaaccgcttgcgtcggcggcgcatcagcggagcgggtatggccggtacccccttagtcgagatggttttgttcaaacatctggtttttgccaaatgtaatcggctcacatttcattagctgtagctggtgcatcggcagttgcggttcttagcactgccgttaatgctgcctcatgttcttttatttcagatgaggcttattgaatttttagctacatgtcgtttctaggggtagctcgattcgatgtagcgaaaaaaagttagattatgtctatatgcaggtgaaattttagagcatggtgacaagctctgtggcaaccgttttccaatgctaatctcgtaaccctggctgctgcttctggtcttagattaatgtatgtcccaagtgattattccccagcttgttactttctcggaacgttcatgcatttcttagagagaacttagagaccaaagaattgtcagacgatcgacggacttagattgacttatgtttctgatcggagaaagtaacaccggtcaaatgagatttc

SEQ ID NO: 50133 - DNA, 1006 bp, Zea Mays
ttttttttcctctgttttttttccttttattatccacagatgactacgcacgaagctgctagtttcaatgcaacggaagcatgtttgctagttattagttaaacaaaaaacatagtttcgtactttattttgcatcaggcttcaacagccaataagctccccttggcatctacagcaagcacacaagagaaaggctctgacatgaaaaatcctccagaacacactggcgccggtgtactaactgctcacaggcctacacatatcgtccaccgtctcatgggagacaggttatttgcacaccgaagatcttggcctagccggtgttctgcatgccggcggcgatgcccttcatggtcaggatgagggtgtcctccaggcctggagcgtactcgctctgctggttcagctgcaccagctccgccggctgactctcgtcggtgaactccttggacaggggcggctgcgggctcacctggaagctcgggtcgcgtatccgcttcagggtgtaggcctggcacacgttcagagtggtgatgtaggactcacgcagccgcagacgctgcttcagataaggatcaccttcaaggacgtccttgtgaccagcaacctgcagcgagagatggcaaaaattgggataataatgcaattagactcatgaaatttcaaggtttcagagggactcgtaaaacttgagtgccaataatgggcgacataactacaaaaatacctgaaggagtagctcttttgtctcctcatagttcttcctcagttgctcgccgaaggattgcaaatcatcagccactagcaatttgtcgtacacagctgcgattcccgggtctcccttcgcgaaaaccatctcaagcaaatcaagggtgaccctgaagaatggccactcattgtacatttctctcagtatatggatgttcctgatgtccttctgcatgatgtgctttatcgctgcaccaaatccaagccagacaggcagatggaaccttgtttgtgtcca

SEQ ID NO: 50134 - DNA, 279 bp, Zea Mays
ccaaaaccactcttccagtttccagtgaactcagcagtgtacactttaccttgcttaaagtatggagtctaaaaacctctactgctacacacccatctcttcgattcaggtcaccttgaactgaatgacttgtgtttccataaccattcaaaacctctactaaccatcacagaggtgcccaagttttctttcgtcagttgtactgaaggtggtgaccacgccgtttttctttccacccattcaccgcagtcagccatttcaaagaacacctagaggaag

SEQ ID NO: 50135 - DNA, 3690 bp, Zea Mays
gttttataatggaaaaaatctcctcccgggattcccccagccaccaagcccgactccgctgatcccctcaccacgcaaccctcgccggatcccggcatgccgtcgtggaagcctctcgctggcggcaagctcaagaagccgctcactgacaagcagcgcgctgccgcggagcagcgcctgtcccacctccgcgcccacctcatcctgcgctccctcgactccccagctggcggggcccgttccctaccgccgccgcaggaggcggcgctcgatgccctcggcctgctcatttttttccgcctcgacctgcagtccggcgccccgcgccccgacctcatcgctccgctcgtcgcctactacgaccgtgtctgcaagcgcagcttcgtccgcggcgtccgtgtcggcgtctcgcgccaccacatcatccgcgcgctctgcctaccctcgaagcccgcctctgcggcgccggccccagcagacgtcgatcccgcagcggtggtcgctgccgttatgcagctccttcaggattatgtcctgctcccgttccagggggacgacaggtgcatactaccgcagcaggtggctgccgcagagcagatggtcagggagggggcggcgcatagggttgattggggagagctgatctggggcctcgtcgagaaggagatgctcgagctgcccaagagggaagactgggtgtgctactacgggccgcacctacagcggctcatttatgcccaaaagccacatctgttggagctggtggaggaagggcctgttcaggagccgtctgctaatgtggatttgaaaaggaagagcatggtggagctggagcaaggggatggggatagagaagcgggtaacaatgtcaaaagcaagagcttgaatgattcagaatcggggaaggctggtgcaaggaatgatggtttggacgagttggagttggctgatgctgttacgaggaacaaggtcatgggggagttcggtttaggggatgtagatgctaggaagaacagcatagtgaaactagaggttgtcgacgaagatgcaaggtgcaagtgcttgaatgaaattcaggctgtggatgctatcaacaacaatatagttgaattggatgcggccaatgaagatgcaaggagcaagagcttgaatgaatgtgaggctgtggatgtggatctggatgctatggacatcaatataaatgacagagagacgatcaatggagatacaaggagcaagagtttgaacgaatctgaggctgtggatctggatccagatgccatggaaaacaatatagatgaaatggagacggtcaatgaagatgcaaggactaagagcttggatgaatttgaggctgtggatgtggctccagatgccatggacaacaatatagatgaaatgggtgtggtcaatgaagacgcaaggagcaagggcttgaatgaatctgaggctgtggatgccataaacaacaatatagttgaattggatgcggtcaatgaagatgcgaggtgcaaaagcttgaatgatgaatcagagctggttgaagaggaatttaagagcccaagctttgatgacatgaacaccgtggatgagcacgtcaatggcacagacacggatggattatgtttgggatttgtggaagttgaagcggtgcctgctgtacatgaggcaatgcctgataataatgaagaaacgacagaggaagcaccagcagggggtgctgatgtggcaggcagtgataatgtggcagtgcctacagatgtggattgtgaagaacactatgttgaggcagtagttgtaacacaagaggtagtggctgttgcagaggagttgggggatgaggaggccaagagggatgaagagaaggatgtgatgggattgagcttgggttttaattctaccaatggttatggtgctatggatgtggaaaaggaaaccaatgttgaaagtttggatgaggacgagagtgacagtggcaatgaagaggcagaagagtcagaggatggtgcatttgacgttaatgatggagaggacatgaattggagaattggggatgtcaacgggggtgagggaatgacacattccttacaacgctgtaacacatttgggggcatggagtttgagaacctgaataaaggagaggatgagatgagggatgagttaagatttgacgattttcctgcaagggcatctttggaaaggatgacatcatcaaacctcctccaagccatgaactcaattccctcatcatacaatgtatcagagaatgtgcatgatctgccctctggggatttcttggctatgggggctgatgcacataagagtggagtggacctgggaccagggagctcatatttatttgggaataatggtaagaggaatattgatgatattgatgggtacaatggcaatatgcaggtgcaagaggggtttcctcggtctaatcagcagaagaggatgcggcatagtaacagtagcaacatatcacctggatcaggctttttcaatgcaagcttttcggtgcctatacagaacttgatggttgaggcaagcaggctctatgagcagaatgagcaaaaacttcagagtttgcaatttgagaagcaacattggtctgacatgctgcagcagaaggaagccattatccaatccctaaactcagctcgttttgagcaacataataagtatcaagcggagcttagacgcttcgagcatgatctgaatgttatggctcagttggtcactacatacaaaaaagctttaaaacagacccgggcttcttttgatgagtacaggaagaagttcccttgcaatgttcctctttatggtgatgttgcttgtggcggtggtcttgttcttagtgtgagggagttggagaaaaggcggtgtgaggagcagcagcaaaatattgccatggtaaatggtatgattgaaagattccagtacaaatggctctcaaagtttgaagagtggggactttctgtcaattcactgtggagcagaatggaaggactctataaggagattgagcttctcaaggaaaacagaagagcaagatttgctaccccagctacagaggaatctaccctagctacagaaggatctactccagctacagaggaatgagctccctgacaatcagaggttcagttgtgatgtgaagatgactccctattactgccctaccctctgctggatgttttggtgtcaacgagcatacaagagcaattgtggctgcctggtggtggtacatactgtagtaagataaatagtttcgcttgtaactatggttgtttcctcatgtagggacgttttgattattagtgcttaatttaggtgcatttagggttccgtaatctatatcaaagtgtgcgtttcatatccttttttatgcactaacgacgtgctcatggcctcggaaagccatttaaagactgcatatgctagtggcaccactaatccatactgccttcagcttaactgctggtagtagcttctgcacctgactagtggcctagtgggcggatactgctaggccatgaacaagtttcaggtatcatacgcgatgcactagctgcatttggctctagtggtttgaacgctaatctctatattgggagagggagtttccagtagggtctctgattctaaatcttaattccatgtgtaactaaataatagaatttagga

SEQ ID NO: 50136 - DNA, 3337 bp, Zea Mays
gccagcgcggtcccctccccgaattccccaagccaccatgcccgactccgctgatcccctccccacgcaaccctcgccggatcccgacatgccgccgcggaagcctctcgctggcggcaagctcaagaagccgctcactgacaagcagcgcgctgccgcggagcagcgcctgtcccacctccgcgcccacctcatcctgcgctccctcgactcccccgctggcggggcccgtgccctaccgccgccgcaggaggcggcgctcgatgccctcggcctgctcaatttcttccgcctcgacctgcaatctgacaccccgcgccccgacctcatcgctccgctcgtcgcctactacgacccggtctgcaagcgcagcttcgtccgcggcgtccgtgtcagcgtctcgcgccaccacatcacccgcgcgctctgcctaccctcgaagcccgcctccgcagcgccggccccagcagacgtcgatcccgcagcggtggtccctgccgttatgcagctcctgcaggattacgtcctgctcccgtttcaggggggcgacatgtgcatactgccgcaggaggtggccgccgcagagcagatggtcagggagggggcggcgcatagggttgattggggagggctgatctggggcctcgtcgagaaggagatgctcgagctgcccaagagggaagacggggtgtgctactatgggccgcacctgcagaggctcatttattccgaaaagccacatctgttggagctggtggaggaagggcctgttccggaggcgtccgctgatgtggagatggaggatgaggatggtgatgtggatttgaaaagcaagaacttggtggaactggagccgggggatggggatggagaagcgggtaacgatgtcagaagcgagagcttgaaggattcagaattggggaatgctggtgcaaggaatgatggtttggacaagttggagttgggggatgctgttacaaggaacaaggtcatggaggagttgggtttaagggatgtagatgctaggaacaacagtatagaggaactagaggtggtcgaggaagatgcaaggagcaagagcttgaatgaatgtgaggctgtggatgccataaacaacaatatagttgaattggatgcggtcaatgaagatgcgaggtgcaaaagcttgaatgatgaatcagagctggttgaagaggaatttaagagcccaagctttgatgacatgaacaccgtggatgagcacgtcaatggcacagacacggatggattatgtttgggatttgtggaagttgaagcggtgcctgctgtacatgaggcaatgcctgataataatgaagaaacgacagaggaagcaccagcagggggtgctgatgtggcaggcagtgataatgtggcagtgcctacagatgtggattgtgaagaacactatgttgaggcagtagttgtaacacaagaggtagtggctgttgcagaggagttgggggatgaggaggccaagagggatgaagagaaggatgtgatgggattgagcttgggttttaattctaccaatggttatggtgctatggatgtggaaaaggaaaccaatgttgaaagtttggatgaggacgagagtgacagtggcaatgaagaggcagaagagtcagaggatggtgcatttgacgttaatgatggagaggacatgaattggagaattggggatgtcaacgggggtgagggaatgacacattccttacaacgctgtaacacatttgggggcatggagtttgagaacctgaataaaggagaggatgagatgagggatgagttaagatttgacgattttcctgcaagggcatctttggaaaggatgacatcatcaaacctcctccaagccatgaactcaattccctcatcatacaatgtatcagagaatgtgcatgatctgccctctggggatttcttggctatgggggctgatgcacataagagtggagtggacctgggaccagggagctcatatttatttgggaataatggtaagaggaatattgatgatattgatgggtacaatggcaatatgcaggtgcaagaggggtttcctcggtctaatcagcagaagaggatgcggcatagtaacagtagcaacatatcacctggatcaggctttttcaatgcaagcttttcggtgcctatacagaacttgatggttgaggcaagcaggctctatgagcagaatgagcaaaaacttcagagtttgcaatttgagaagcaacattggtctgacatgctgcagcagaaggaagccattatccaatccctaaactcagctcgttttgagcaacataataagtatcaagcggagcttagacgcttcgagcatgatctgaatgttatggctcagttggtcactacatacaaaaaagctttaaaacagacccgggcttcttttgatgagtacaggaagaagttcccttgcaatgttcctctttatggtgatgttgcttgtggcggtggtcttgttcttagtgtgagggagttggagaaaaggcggtgtgaggagcagcagcaaaatattgccatggtaaatggtatgattgaaagattccagtacaaatggctctcaaagtttgaagagtggggactttctgtcaattcactgtggagcagaatggaaggactctataaggagattgagcttctcaaggaaaacagaagagcaagatttgctaccccagctacagaggaatctaccctagctacagaaggatctactccagctacagaggaatgagctccctgacaatcagaggttcagttgtgatgtgaagatgactccctattactgccctaccctctgctggatgttttggtgtcaacgagcatacaagagcaattgtggctgcctggtggtggtacatactgtagtaagataaatagtttcgcttgtaactatggttgtttcctcatgtagggacgttttgattattagtgcttaatttaggtgcatttagggttccgtaatctatatcaaagtgtgcgtttcatatccttttttatgcactaacgacgtgctcatggcctcggaaagccatttaaagactgcatatgctagtggcaccactaatccatactgccttcagcttaactgctggtagtagcttctgcacctgactagtggcctagtgggcggatactgctaggccatgaacaagtttcaggtatcatacgcgatgcactagctgcatttggctctagtggtttgaacgctaatctctatattgggagagggagtttccagtagggtctctgattctaaatcttaattccatgtgtaactaaataatagaatttagga

SEQ ID NO: 50137 - DNA, 3314 bp, Zea Mays
cccgaattccccaagccaccatgcccgactccgctgatcccctccccacgcaaccctcgccggatcccgacatgccgccgcggaagcctctcgctggcggcaagctcaagaagccgctcactgacaagcagcgcgctgccgcggagcagcgcctgtcccacctccgcgcccacctcatcctgcgctccctcgactcccccgctggcggggcccgtgccctaccgccgccgcaggaggcggcgctcgatgccctcggcctgctcaatttcttccgcctcgacctgcaatctgacaccccgcgccccgacctcatcgctccgctcgtcgcctactacgacccggtctgcaagcgcagcttcgtccgcggcgtccgtgtcagcgtctcgcgccaccacatcacccgcgcgctctgcctaccctcgaagcccgcctccgcagcgccggccccagcagacgtcgatcccgcagcggtggtccctgccgttatgcagctcctgcaggattacgtcctgctcccgtttcaggggggcgacatgtgcatactgccgcaggaggtggccgccgcagagcagatggtcagggagggggcggcgcatagggttgattggggagggctgatctggggcctcgtcgagaaggagatgctcgagctgcccaagagggaagacggggtgtgctactatgggccgcacctgcagaggctcatttattccgaaaagccacatctgttggagctggtggaggaagggcctgttccggaggcgtccgctgatgtggagatggaggatgaggatggtgatgtggatttgaaaagcaagaacttggtggaactggagccgggggatggggatggagaagcgggtaacgatgtcagaagcgagagcttgaaggattcagaattggggaatgctggtgcaaggaatgatggtttggacaagttggagttgggggatgctgttacaaggaacaaggtcatggaggagttgggtttaagggatgtagatgctaggaacaacagtatagaggaactagaggtggtcgaggaagatgcaaggagcaagagcttgaatgaatgtgaggctgtggatgccataaacaacaatatagttgaattggatgcggtcaatgaagatgcgaggtgcaaaagcttgaatgatgaatcagagctggttgaagaggaatttaagagcccaagctttgatgacatgaacaccgtggatgagcacgtcaatggcacagacacggatggattatgtttgggatttgtggaagttgaagcggtgcctgctgtacatgaggcaatgcctgataataatgaagaaacgacagaggaagcaccagcagggggtgctgatgtggcaggcagtgataatgtggcagtgcctacagatgtggattgtgaagaacactatgttgaggcagtagttgtaacacaagaggtagtggctgttgcagaggagttgggggatgaggaggccaagagggatgaagagaaggatgtgatgggattgagcttgggttttaattctaccaatggttatggtgctatggatgtggaaaaggaaaccaatgttgaaagtttggatgaggacgagagtgacagtggcaatgaagaggcagaagagtcagaggatggtgcatttgacgttaatgatggagaggacatgaattggagaattggggatgtcaacgggggtgagggaatgacacattccttacaacgctgtaacacatttgggggcatggagtttgagaacctgaataaaggagaggatgagatgagggatgagttaagatttgacgattttcctgcaagggcatctttggaaaggatgacatcatcaaacctcctccaagccatgaactcaattccctcatcatacaatgtatcagagaatgtgcatgatctgccctctggggatttcttggctatgggggctgatgcacataagagtggagtggacctgggaccagggagctcatatttatttgggaataatggtaagaggaatattgatgatattgatgggtacaatggcaatatgcaggtgcaagaggggtttcctcggtctaatcagcagaagaggatgcggcatagtaacagtagcaacatatcacctggatcaggctttttcaatgcaagcttttcggtgcctatacagaacttgatggttgaggcaagcaggctctatgagcagaatgagcaaaaacttcagagtttgcaatttgagaagcaacattggtctgacatgctgcagcagaaggaagccattatccaatccctaaactcagctcgttttgagcaacataataagtatcaagcggagcttagacgcttcgagcatgatctgaatgttatggctcagttggtcactacatacaaaaaagctttaaaacagacccgggcttcttttgatgagtacaggaagaagttcccttgcaatgttcctctttatggtgatgttgcttgtggcggtggtcttgttcttagtgtgagggagttggagaaaaggcggtgtgaggagcagcagcaaaatattgccatggtaaatggtatgattgaaagattccagtacaaatggctctcaaagtttgaagagtggggactttctgtcaattcactgtggagcagaatggaaggactctataaggagattgagcttctcaaggaaaacagaagagcaagatttgctaccccagctacagaggaatctaccctagctacagaaggatctactccagctacagaggaatgagctccctgacaatcagagttgtgatgtgaagatgactccctattactgccctaccctctgctggatgttttggtgtcaacgagcatacaagagcaattgtggctgcctggtggtggtacatactgtagtaagataaatagtttcgcttgtaactatggttgtttcctcatgtagggacgttttgattattagtgcttaatttaggtgcatttagggttccgtaatctatatcaaagtgtgcgtttcatatccttttttatgcactaacgacgtgctcatggcctcggaaagccatttaaagactgcatatgctagtggcaccactaatccatactgccttcagcttaactgctggtagtagcttctgcacctgactagtggcctagtgggcggatactgctaggccatgaacaagtttcaggtatcatacgcgatgcactagctgcatttggctctagtggtttgaacgctaatctctatattgggagagggagtttccagtagggtctctgattctaaatcttaattccatgtgtaactaaataatagaatttagga

SEQ ID NO: 50138 - DNA, 2005 bp, Zea Mays
ctgtaatcaagacaatttgataactgcttactaacgattatcctgtgacatttgatgttcagatttcggggagtgagctgtttttccctgttgcatcagaagctccactcctacgaagatgaactcatccctctgcttgatgtcctagcaaacaaagtgaacgctatcaggaggcttagggaactcttgacaaccaatcttcctacaggcacatttccagtcaaggaagtcatagctgctacaatgataagaagaaagtagaggaaaaggaacagatctcgactgtaattctgcagatgaagcataccaataaaaaggcatatgaccagactctgtaacaatatctgcacatcagtaccttggcagactctccaagcaggtttgtacgatcacatatgtaaaaataaagtagataccctccaaattcggatctgaaaatataattgcaacccagttagcagaatagtgcaactagaaagcttgaatgattggaggagagcaactgtagcttacattgccctcagtgttaaacgattctccagaagcaactggtccatgaatataagtctgttgaacccaacattttctttttgtcagagacacaatgccttcggatactgatattgagaaattgtaaatttataatttatagagaacctgagtatttgtgatgtgagggaagtataagctggctttgcagccattgcttggccaccctcctccaataacattgtctggtcttctgctttgactgaactgtcatccatcactgctagattgacatctgaatgtctactgacaaagatgactgttggttgattcctcactgtgtcttgttgttgtcgtagtttcgttcaatcattaatggcacccattagtcgccaaagatgttgtcctgttacaaatattctgatgttcctgagaattagtaatcgaattacccattggtcgccattgtttgaaatatattctcacaacttctcttactgcttcattgtatgaaatattaagaaacaaactaaatgatagatatttaaatgttccagtttctaattaatatatgtggaatatattctattgttgttagcatgggttaagaccagtgttgtggttgacaccggatttccctctgaacactgatgaactcatccctctgcttgatgtcctagcaaacaaagtgaaggctatctggaggcttagtgaactcttgacaaccaaacttcctacaggcacatttccagtcaaggtaaactatctggcaccttggttacattacccgtgcttccagcagattacatcttgccatttattccaatcacaatgcatggttcaatccaatcatgagaagtggcaatctgtgaggtttttgcaagggagatgagctcaccttggcaatggtagttaatcttattaatgcaaacaaggatgattaatttgatgtacttttctatgcctcgtggtgcccattctcacaagaatgcatttgaggaatctgcaattaggccaaggcgtcccacacaggtgtttcttccataagaagactaccgacatgggatacgtctcttcagtttgtttgtcaatattttgtaggaatcagaagaggtgttcaacatgtgggttaattttgttttcaagtgtgctcctctaatgacacccttttcttttttggagtaccttttgataataacaaatttgggttctatttttgtttctagactcaagtctagagttccatgaattaaaatattggtttatttgttgtggccacctatggtctcattatcttctctccacttagttatttgttcctgcaatttgggtttggccagtatcaaatttggtaaggaaggaggcaactagatgcttaccgaatttactctcaattttgctttccttatcgcagttttactttgacatgcactaccattccccctctaatctctaccaaccatatgcaaaattggaatcatctcaatgtttagataggttttggtgtttatataag

SEQ ID NO: 50139 - DNA, 2289 bp, Zea Mays
ctactatcccatatgagcagagcgagggcgtccaccacctaccgtgcccccgcccggccccgcgcatcccgctccccgaaaacctctccctccgtgccagggctcatccccaccgtgtcgtagccgccatcatcgcccaaatcctcgctcgccccacgccgcgccgaaatcctcatgccccacgcctgcccctgcccctgcctcccaaaccgcgcccattcgaaccggccgcccgaatctagcgcaagcacgcaggcggtgatgacggccacgggagacagccggcgctcggcgtgattcccgccccgccgcgagccaagaggttcgaggtcaagttcgcggaccccccgccgtgccccgcgctcccacgcccgcacaggcatctagcccccatccccctcccgctcgagatatccgccgatctagcctgtcggggggtccgcgacgtgtggaagggtgagcatcgacgatggcggtagaagaggaggaagccttcgatggtgcgctcaccgacgagcagctgcgagagatgaactcatccctctgcttgatgtcctagcaaacaaagtgaacgctatcaggaggcttagggaactcttgacaaccaatcttcctacaggcacatttccagtcaaggaagtcatagctgctacaatgataagaagaaagtagaggaaaaggaacagatctcgactgtaattctgcagatgaagcataccaataaaaaggcatatgaccagactctgtaacaatatctgcacatcagtaccttggcagactctccaagcaggtttgtacgatcacatatgtaaaaataaagtagataccctccaaattcggatctgaaaatataattgcaacccagttagcagaatagtgcaactagaaagcttgaatgattggaggagagcaactgtagcttacattgccctcagtgttaaacgattctccagaagcaactggtccatgaatataagtctgttgaacccaacattttctttttgtcagagacacaatgccttcggatactgatattgagaaattgtaaatttataatttatagagaacctgagtatttgtgatgtgagggaagtataagctggctttgcagccattgcttggccaccctcctccaataacattgtctggtcttctgctttgactgaactgtcatccatcactgctagattgacatctgaatgtctactgacaaagatgactgttggttgattcctcactgtgtcttgttgttgtcgtagtttcgttcaatcattaatggcacccattagtcgccaaagatgttgtcctgttacaaatattctgatgttcctgagaattagtaatcgaattacccattggtcgccattgtttgaaatatattctcacaacttctcttactgcttcattgtatgaaatattaagaaacaaactaaatgatagatatttaaatgttccagtttctaattaatatatgtggaatatattctattgttgttagcatgggttaagaccagtgttgtggttgacaccggatttccctctgaacactgatgaactcatccctctgcttgatgtcctagcaaacaaagtgaaggctatctggaggcttagtgaactcttgacaaccaaacttcctacaggcacatttccagtcaagggagatgagctcaccttggcaatggtagttaatcttattaatgcaaacaaggatgattaatttgatgtacttttctatgcctcgtggtgcccattctcacaagaatgcatttgaggaatctgcaattaggccaaggcgtcccacacaggtgtttcttccataagaagactaccgacatgggatacgtctcttcagtttgtttgtcaatattttgtaggaatcagaagaggtgttcaacatgtgggttaattttgttttcaagtgtgctcctctaatgacacccttttcttttttggagtaccttttgataataacaaatttgggttctatttttgtttctagactcaagtctagagttccatgaattaaaatattggtttatttgttgtggccacctatggtctcattatcttctctccacttagttatttgttcctgcaatttgggtttggccagtatcaaatttggtaaggaaggaggcaactagatgcttaccgaatttactctcaattttgctttccttatcgcagttttactttgacatgcactaccattccccctctaatctctaccaaccatatgcaaaattggaatcatctcaatgtttagataggttttggtgtttatataag

SEQ ID NO: 50140 - DNA, 2308 bp, Zea Mays
ctactatcccatatgagcagagcgagggcgtccaccacctaccgtgcccccgcccggccccgcgcatcccgctccccgaaaacctctccctccgtgccagggctcatccccaccgtgtcgtagccgccatcatcgcccaaatcctcgctcgccccacgccgcgccgaaatcctcatgccccacgcctgcccctgcccctgcctcccaaaccgcgcccattcgaaccggccgcccgaatctagcgcaagcacgcaggcggtgatgacggccacgggagacagccggcgctcggcgtgattcccgccccgccgcgagccaagaggttcgaggtccgcgacgtgtggaagggtgagcatcgacgatggcggtagaagaggaggaagccttcgatggtgcgctcaccgacgagcagctgcgagagatgaactcatccctctgcttgatgtcctagcaaacaaagtgaacgctatcaggaggcttagggaactcttgacaaccaatcttcctacaggcacatttccagtcaaggaagtcatagctgctacaatgataagaagaaagtagaggaaaaggaacagatctcgactgtaattctgcagatgaagcataccaataaaaaggcatatgaccagactctgtaacaatatctgcacatcagtaccttggcagactctccaagcaggtttgtacgatcacatatgtaaaaataaagtagataccctccaaattcggatctgaaaatataattgcaacccagttagcagaatagtgcaactagaaagcttgaatgattggaggagagcaactgtagcttacattgccctcagtgttaaacgattctccagaagcaactggtccatgaatataagtctgttgaacccaacattttctttttgtcagagacacaatgccttcggatactgatattgagaaattgtaaatttataatttatagagaacctgagtatttgtgatgtgagggaagtataagctggctttgcagccattgcttggccaccctcctccaataacattgtctggtcttctgctttgactgaactgtcatccatcactgctagattgacatctgaatgtctactgacaaagatgactgttggttgattcctcactgtgtcttgttgttgtcgtagtttcgttcaatcattaatggcacccattagtcgccaaagatgttgtcctgttacaaatattctgatgttcctgagaattagtaatcgaattacccattggtcgccattgtttgaaatatattctcacaacttctcttactgcttcattgtatgaaatattaagaaacaaactaaatgatagatatttaaatgttccagtttctaattaatatatgtggaatatattctattgttgttagcatgggttaagaccagtgttgtggttgacaccggatttccctctgaacactgatgaactcatccctctgcttgatgtcctagcaaacaaagtgaaggctatctggaggcttagtgaactcttgacaaccaaacttcctacaggcacatttccagtcaaggtaaactatctggcaccttggttacattacccgtgcttccagcagattacatcttgccatttattccaatcacaatgcatggttcaatccaatcatgagaagtggcaatctgtgaggtttttgcaagggagatgagctcaccttggcaatggtagttaatcttattaatgcaaacaaggatgattaatttgatgtacttttctatgcctcgtggtgcccattctcacaagaatgcatttgaggaatctgcaattaggccaaggcgtcccacacaggtgtttcttccataagaagactaccgacatgggatacgtctcttcagtttgtttgtcaatattttgtaggaatcagaagaggtgttcaacatgtgggttaattttgttttcaagtgtgctcctctaatgacacccttttcttttttggagtaccttttgataataacaaatttgggttctatttttgtttctagactcaagtctagagttccatgaattaaaatattggtttatttgttgtggccacctatggtctcattatcttctctccacttagttatttgttcctgcaatttgggtttggccagtatcaaatttggtaaggaaggaggcaactagatgcttaccgaatttactctcaattttgctttccttatcgcagttttactttgacatgcactaccattccccctctaatctctaccaaccatatgcaaaattggaatcatctcaatgtttagataggttttggtgtttatataag

SEQ ID NO: 50141 - DNA, 1122 bp, Zea Mays
cgtggtccgtcctgttcatttgaagatgaactcatccctctgcttgatgtcctagcaaacaaagtgaacgctatcaggaggcttagggaactcttgacaaccaatcttcctacaggcacatttccagtcaaggaagtcatagctgctacaatgataagaagaaagtagaggaaaaggaacagatctcgactgtaattctgcagatgaagcataccaataaaaaggcatatgaccagactctgtaacaatatctgcacatcagtaccttggcagactctccaagcagcaaacaaagtgaaggctatctggaggcttagtgaactcttgacaaccaaacttcctacaggcacatttccagtcaaggtaaactatctggcaccttggttacattacccgtgcttccagcagattacatcttgccatttattccaatcacaatgcatggttcaatccaatcatgagaagtggcaatctgtgaggtttttgcaagggagatgagctcaccttggcaatggtagttaatcttattaatgcaaacaaggatgattaatttgatgtacttttctatgcctcgtggtgcccattctcacaagaatgcatttgaggaatctgcaattaggccaaggcgtcccacacaggtgtttcttccataagaagactaccgacatgggatacgtctcttcagtttgtttgtcaatattttgtaggaatcagaagaggtgttcaacatgtgggttaattttgttttcaagtgtgctcctctaatgacacccttttcttttttggagtaccttttgataataacaaatttgggttctatttttgtttctagactcaagtctagagttccatgaattaaaatattggtttatttgttgtggccacctatggtctcattatcttctctccacttagttatttgttcctgcaatttgggtttggccagtatcaaatttggtaaggaaggaggcaactagatgcttaccgaatttactctcaattttgctttccttatcgcagttttactttgacatgcactaccattccccctctaatctctaccaaccatatgcaaaattggaatcatctcaatgtttagataggttttggtgtttatataag

SEQ ID NO: 50142 - DNA, 557 bp, Zea Mays
ggccgcggaggatgaggtcgtggaccttgaggtcatggtgtatgtcggctgggagcgacggcttggcctcctggtgtttcttccataagaagactaccgacatgggatacgtctcttcagtttgtttgtcaatattttgtaggaatcagaagaggtgttcaacatgtgggttaattttgttttcaagtgtgctcctctaatgacacccttttcttttttggagtaccttttgataataacaaatttgggttctatttttgtttctagactcaagtctagagttccatgaattaaaatattggtttatttgttgtggccacctatggtctcattatcttctctccacttagttatttgttcctgcaatttgggtttggccagtatcaaatttggtaaggaaggaggcaactagatgcttaccgaatttactctcaattttgctttccttatcgcagttttactttgacatgcactaccattccccctctaatctctaccaaccatatgcaaaattggaatcatctcaatgtttagataggttttggtgtttatataag

SEQ ID NO: 50143 - DNA, 1625 bp, Zea Mays
ctcaaattacagatacagacatatagggacccatgtgtaaaactcttgcagcgctaacgacaccgcatgctggttctatgattgaagggaatgatccagtcacgggtcatataatctcaacaaccattggagggaagaatggagagcctaaaaagactatcagctacatggcagagagagttgtgggaactggatcattcggaatcgtcttccaggcaaaatgtctggagactggtgagactgttgctatcaagaaggttttgcaggacaagcgctacaagaacagggagctgcaaatcatgcgatccatggatcactgcaatgctgtttccttgaagcattgtttcttctccaccacaagcagagatgaactttttcttaacttagtgatggagtttgttcctgagtcactacatcgtgtgctgaagcactacagcaatatgaaccagaggatgccgcttatttatgttaaattatatacctaccagatatttcgaggtttagcctatattcacacagtacctggtgtttgccacagggatgtgaaaccacagaatcttttggttgatccattgactcaccaagtgaagatatgtgattttgggagtgccaaaatgttggtcaaaggtgaagcaaacatttcatatatatgctcacgttattaccgtgctccagagctcatatttggggcaaccgagtacacaacatcaattgatatttggtcagctggatgtgttcttgctgagctgcttcttggccagcctctcttccctggcgaaagtgctgtggatcaacttgttgagataataaaggttcttggtactccaacacgtgaggaaatccgttgtatgaatccaaactacaccgagtttagatttcctcagatcaaagctcacccatggcacaagattttccacaagcggatgcctccagaagctatagatctcgcttcacgtttgctccagtactcaccaaatctaagatgcactgctcttgaagcgtgtgcacatccattctttgatgagttgcgagagccacatgcgaggttgccaaatggacggccatttcctccactgttcaactttaaacaggaactagcaaatgcctccccggagctcatcaacaggctgatcccagaccatgctaggcggcatcttgggctcactttattgcccaccgctggaccataggcgaaggctctatggtgtttaaaccttgctctttctgattcttcgttgtgccataggcaattcaaggtgtagaatctgaccattattggaaagccaaacacgagctggcgccaatgtgttgcataaggagaggcggtatgttcgtgcagccagccttttgccgcctgttttaatgcaaaatctgattttacttaagcagtgtgaggggaagtgggttggtgtattgttaagctattgaaggaattcaatccctggtattgtattactttctccaacgttaaatgttgtagttcgcctgtaagtgttccacatcgcctgttatcagtccgcaatccttcgtgtaaatgttattaatgaaaaaaatacatcttgctatgttaccgatcgactcattccaatcacattccgtcctgttgcaaacaaattcttgttttc

SEQ ID NO: 50144 - DNA, 1889 bp, Zea Mays
ccggtacggtattctcgaaattctcctgtccttgcctacaaaattcctcattctcgtagcagcgtagtgggtggcggtctggcggaggacaggaaggaaaaacaaggcgaaaaaggaggttcggggcgggttccatggcgctgccttcctagcccagccgcctcaccaacctccctcctcaccgaggagagaccgaggcgccaagagagaacaggacactacgagaagaggaggttcatttccgcgtcgtctccgccagcagccccacccaccacatggcagccatgccgggtggggcccacgccgccggcgccgcggaccagatgcagcatgctggttctatgattgaagggaatgatccagtcacgggtcatataatctcaacaaccattggagggaagaatggagagcctaaaaagactatcagctacatggcagagagagttgtgggaactggatcattcggaatcgtcttccaggcaaaatgtctggagactggtgagactgttgctatcaagaaggttttgcaggacaagcgctacaagaacagggagctgcaaatcatgcgatccatggatcactgcaatgctgtttccttgaagcattgtttcttctccaccacaagcagagatgaactttttcttaacttagtgatggagtttgttcctgagtcactacatcgtgtgctgaagcactacagcaatatgaaccagaggatgccgcttatttatgttaaattatatacctaccagatatttcgaggtttagcctatattcacacagtacctggtgtttgccacagggatgtgaaaccacagaatcttttggttgatccattgactcaccaagtgaagatatgtgattttgggagtgccaaaatgttggtcaaaggtgaagcaaacatttcatatatatgctcacgttattaccgtgctccagagctcatatttggggcaaccgagtacacaacatcaattgatatttggtcagctggatgtgttcttgctgagctgcttcttggccagcctctcttccctggcgaaagtgctgtggatcaacttgttgagataataaaggttcttggtactccaacacgtgaggaaatccgttgtatgaatccaaactacaccgagtttagatttcctcagatcaaagctcacccatggcacaagattttccacaagcggatgcctccagaagctatagatctcgcttcacgtttgctccagtactcaccaaatctaagatgcactgctcttgaagcgtgtgcacatccattctttgatgagttgcgagagccacatgcgaggttgccaaatggacggccatttcctccactgttcaactttaaacaggaactagcaaatgcctccccggagctcatcaacaggctgatcccagaccatgctaggcggcatcttgggctcactttattgcccaccgctggaccataggcgaaggctctatggtgtttaaaccttgctctttctgattcttcgttgtgccataggcaattcaaggtgtagaatctgaccattattggaaagccaaacacgagctggcgccaatgtgttgcataaggagaggcggtatgttcgtgcagccagccttttgccgcctgttttaatgcaaaatctgattttacttaagcagtgtgaggggaagtgggttggtgtattgttaagctattgaaggaattcaatccctggtattgtattactttctccaacgttaaatgttgtagttcgcctgtaagtgttccacatcgcctgttatcagtccgcaatccttcgtgtaaatgttattaatgaaaaaaatacatcttgctatgttaccgatcgactcattccaatcacattccgtcctgttgcaaacaaattcttgttttc

SEQ ID NO: 50145 - DNA, 1654 bp, Zea Mays
cccccttttccgccgctggcgtgtggctccggcgtcccggagcggtcgcgcaggcctaccggatctctccgctccggccccggcgtcgtgcttgcatgctggttctatgattgaagggaatgatccagtcacgggtcatataatctcaacaaccattggagggaagaatggagagcctaaaaagactatcagctacatggcagagagagttgtgggaactggatcattcggaatcgtcttccaggcaaaatgtctggagactggtgagactgttgctatcaagaaggttttgcaggacaagcgctacaagaacagggagctgcaaatcatgcgatccatggatcactgcaatgctgtttccttgaagcattgtttcttctccaccacaagcagagatgaactttttcttaacttagtgatggagtttgttcctgagtcactacatcgtgtgctgaagcactacagcaatatgaaccagaggatgccgcttatttatgttaaattatatacctaccagatatttcgaggtttagcctatattcacacagtacctggtgtttgccacagggatgtgaaaccacagaatcttttggttgatccattgactcaccaagtgaagatatgtgattttgggagtgccaaaatgttggtcaaaggtgaagcaaacatttcatatatatgctcacgttattaccgtgctccagagctcatatttggggcaaccgagtacacaacatcaattgatatttggtcagctggatgtgttcttgctgagctgcttcttggccagcctctcttccctggcgaaagtgctgtggatcaacttgttgagataataaaggttcttggtactccaacacgtgaggaaatccgttgtatgaatccaaactacaccgagtttagatttcctcagatcaaagctcacccatggcacaagattttccacaagcggatgcctccagaagctatagatctcgcttcacgtttgctccagtactcaccaaatctaagatgcactgctcttgaagcgtgtgcacatccattctttgatgagttgcgagagccacatgcgaggttgccaaatggacggccatttcctccactgttcaactttaaacaggaactagcaaatgcctccccggagctcatcaacaggctgatcccagaccatgctaggcggcatcttgggctcactttattgcccaccgctggaccataggcgaaggctctatggtgtttaaaccttgctctttctgattcttcgttgtgccataggcaattcaaggtgtagaatctgaccattattggaaagccaaacacgagctggcgccaatgtgttgcataaggagaggcggtatgttcgtgcagccagccttttgccgcctgttttaatgcaaaatctgattttacttaagcagtgtgaggggaagtgggttggtgtattgttaagctattgaaggaattcaatccctggtattgtattactttctccaacgttaaatgttgtagttcgcctgtaagtgttccacatcgcctgttatcagtccgcaatccttcgtgtaaatgttattaatgaaaaaaatacatcttgctatgttaccgatcgactcattccaatcacattccgtcctgttgcaaacaaattcttgttttc

SEQ ID NO: 50146 - DNA, 1541 bp, Zea Mays
ccggatctctccgctccggccccggcgtcgtgcttgcatgctggttctatgattgaagggaatgatccagtcacgggtcatataatctcaacaaccattggagggaagaatggagagcctaaaaagactatcagctacatggcagagagagttgtgggaactggatcattcggaatcgtcttccaggcaaaatgtctggagactggtgagactgttgctatcaagaaggttttgcaggacaagcgctacaagaacagggagctgcaaatcatgcgatccatggatcactgcaatgctgtttccttgaagcattgtttcttctccaccacaagcagagatgaactttttcttaacttagtgatggagtttgttcctgagtcactacatcgtgtgctgaagcactacagcaatatgaaccagaggatgccgcttatttatgttaaattatatacctaccagatatttcgaggtttagcctatattcacacagtacctggtgtttgccacagggatgtgaaaccacagaatcttttggttgatccattgactcaccaagtgaagatatgtgattttgggagtgccaaaatgttgagctcatatttggggcaaccgagtacacaacatcaattgatatttggtcagctggatgtgttcttgctgagctgcttcttggccagcctctcttccctggcgaaagtgctgtggatcaacttgttgagataataaaggttcttggtactccaacacgtgaggaaatccgttgtatgaatccaaactacaccgagtttagatttcctcagatcaaagctcacccatggcacaagattttccacaagcggatgcctccagaagctatagatctcgcttcacgtttgctccagtactcaccaaatctaagatgcactgctcttgaagcgtgtgcacatccattctttgatgagttgcgagagccacatgcgaggttgccaaatggacggccatttcctccactgttcaactttaaacaggaactagcaaatgcctccccggagctcatcaacaggctgatcccagaccatgctaggcggcatcttgggctcactttattgcccaccgctggaccataggcgaaggctctatggtgtttaaaccttgctctttctgattcttcgttgtgccataggcaattcaaggtgtagaatctgaccattattggaaagccaaacacgagctggcgccaatgtgttgcataaggagaggcggtatgttcgtgcagccagccttttgccgcctgttttaatgcaaaatctgattttacttaagcagtgtgaggggaagtgggttggtgtattgttaagctattgaaggaattcaatccctggtattgtattactttctccaacgttaaatgttgtagttcgcctgtaagtgttccacatcgcctgttatcagtccgcaatccttcgtgtaaatgttattaatgaaaaaaatacatcttgctatgttaccgatcgactcattccaatcacattccgtcctgttgcaaacaaattcttgttttc

SEQ ID NO: 50147 - DNA, 1639 bp, Zea Mays
agcatgccggcttgggtcgcctttgcatactggtgtactacgtgatcacaactgtgttccaaatggggaattaaactagcatgctggttctatgattgaagggaatgatccagtcacgggtcatataatctcaacaaccattggagggaagaatggagagcctaaaaagactatcagctacatggcagagagagttgtgggaactggatcattcggaatcgtcttccaggcaaaatgtctggagactggtgagactgttgctatcaagaaggttttgcaggacaagcgctacaagaacagggagctgcaaatcatgcgatccatggatcactgcaatgctgtttccttgaagcattgtttcttctccaccacaagcagagatgaactttttcttaacttagtgatggagtttgttcctgagtcactacatcgtgtgctgaagcactacagcaatatgaaccagaggatgccgcttatttatgttaaattatatacctaccagatatttcgaggtttagcctatattcacacagtacctggtgtttgccacagggatgtgaaaccacagaatcttttggttgatccattgactcaccaagtgaagatatgtgattttgggagtgccaaaatgttggtcaaaggtgaagcaaacatttcatatatatgctcacgttattaccgtgctccagagctcatatttggggcaaccgagtacacaacatcaattgatatttggtcagctggatgtgttcttgctgagctgcttcttggccagcctctcttccctggcgaaagtgctgtggatcaacttgttgagataataaaggttcttggtactccaacacgtgaggaaatccgttgtatgaatccaaactacaccgagtttagatttcctcagatcaaagctcacccatggcacaagattttccacaagcggatgcctccagaagctatagatctcgcttcacgtttgctccagtactcaccaaatctaagatgcactgctcttgaagcgtgtgcacatccattctttgatgagttgcgagagccacatgcgaggttgccaaatggacggccatttcctccactgttcaactttaaacaggaactagcaaatgcctccccggagctcatcaacaggctgatcccagaccatgctaggcggcatcttgggctcactttattgcccaccgctggaccataggcgaaggctctatggtgtttaaaccttgctctttctgattcttcgttgtgccataggcaattcaaggtgtagaatctgaccattattggaaagccaaacacgagctggcgccaatgtgttgcataaggagaggcggtatgttcgtgcagccagccttttgccgcctgttttaatgcaaaatctgattttacttaagcagtgtgaggggaagtgggttggtgtattgttaagctattgaaggaattcaatccctggtattgtattactttctccaacgttaaatgttgtagttcgcctgtaagtgttccacatcgcctgttatcagtccgcaatccttcgtgtaaatgttattaatgaaaaaaatacatcttgctatgttaccgatcgactcattccaatcacattccgtcctgttgcaaacaaattcttgttttc

SEQ ID NO: 50148 - DNA, 2233 bp, Zea Mays
cttgggtcgcctttgcatactggtgtactacgtgatcacaactgtgttccaaatggggaattaaactagcatgctggttctatgattgaagggaatgatccagtcacgggtcatataatctcaacaaccattggagggaagaatggagagcctaaaaagactatcagctacatggcagagagagttgtgggaactggatcattcggaatcgtcttccaggcaaaatgtctggagactggtgagactgttgctatcaagaaggttttgcaggacaagcgctacaagaacagggagctgcaaatcatgcgatccatggatcactgcaatgctgtttccttgaagcattgtttcttctccaccacaagcagagatgaactttttcttaacttagtgatggagtttgttcctgagtcactacatcgtgtgctgaagcactacagcaatatgaaccagaggatgccgcttatttatgttaaattatatacctaccagatatttcgaggtttagcctatattcacacagtacctggtgtttgccacagggatgtgaaaccacagaatcttttggttgatccattgactcaccaagtgaagatatgtgattttgggagtgccaaaatgttggtcaaaggtgaagcaaacatttcatatatatgctcacgttattaccgtgctccagagctcatatttggggcaaccgagtacacaacatcaattgatatttggtcagctggatgtgttcttgctgagctgcttcttggccagcctctcttccctggcgaaagtgctgtggatcaacttgttgagataataaaggttcttggtactccaacacgtgaggaaatccgttgtatgaatccaaactacaccgagtttagatttcctcagatcaaagctcacccatggcacaagattttccacaagcggatgcctccagaagctatagatctcgcttcacgtttgctccagtactcaccaaatctaagatgcactgctgtgagtattttctgcctatttgactgattctagtcaactaaagaagcctattaatgattgcaaagcttagatatgacaataattgttttttcctagttggttggtcatgtcgacccgtcgcttcaattttagctgttaaatttatataactgccgatgattggatatgatggtgccatatcattttcctttctattctcataaatgatgtacaagcctttacctgatatcctccgtagcaagacaatgcttctctttatacccagccaaaatggacttctctgtaagccccaactgttaaaaagggaccatgaaggtcttatattgccttatctggactacctttgtcaagactcaagaagtcaggaggctgttagcattgacagagttggaagcgtatactgctcttagctggatttcaattcagcactgtaattccttgtgaaattctctccttggaaatgaaattactggacttgcataacaggacttagagtgtcttctttaagaggacaatgttgtaatgcatcaaccatcaagtctgagatgcctagcctaaccaactcctgctgtgattttattgctaattttggtagctcttgcagcttgaagcgtgtgcacatccattctttgatgagttgcgagagccacatgcgaggttgccaaatggacggccatttcctccactgttcaactttaaacaggaactagcaaatgcctccccggagctcatcaacaggctgatcccagaccatgctaggcggcatcttgggctcactttattgcccaccgctggaccataggcgaaggctctatggtgtttaaaccttgctctttctgattcttcgttgtgccataggcaattcaaggtgtagaatctgaccattattggaaagccaaacacgagctggcgccaatgtgttgcataaggagaggcggtatgttcgtgcagccagccttttgccgcctgttttaatgcaaaatctgattttacttaagcagtgtgaggggaagtgggttggtgtattgttaagctattgaaggaattcaatccctggtattgtattactttctccaacgttaaatgttgtagttcgcctgtaagtgttccacatcgcctgttatcagtccgcaatccttcgtgtaaatgttattaatgaaaaaaatacatcttgctatgttaccgatcgactcattccaatcacattccgtcctgttgcaaacaaattcttgttttc

SEQ ID NO: 50149 - DNA, 1603 bp, Zea Mays
ctggtgtactacgtgatcacaactgtgttccaaatggggaattaaactagcatgctggttctatgattgaagggaatgatccagtcacgggtcatataatctcaacaaccattggagggaagaatggagagcctaaaaagactatcagctacatggcagagagagttgtgggaactggatcattcggaatcgtcttccaggcaaaatgtctggagactggtgagactgttgctatcaagaaggttttgcaggacaagcgctacaagaacagggagctgcaaatcatgcgatccatggatcactgcaatgctgtttccttgaagcattgtttcttctccaccacaagcagagatgaactttttcttaacttagtgatggagtttgttcctgagtcactacatcgtgtgctgaagcactacagcaatatgaaccagaggatgccgcttatttatgttaaattatatacctaccagatatttcgaggtttagcctatattcacacagtacctggtgtttgccacagggatgtgaaaccacagaatcttttggttgatccattgactcaccaagtgaagatatgtgattttgggagtgccaaaatgttggtcaaaggtgaagcaaacatttcatatatatgctcacgttattaccgtgctccagagctcatatttggggcaaccgagtacacaacatcaattgatatttggtcagctggatgtgttcttgctgagctgcttcttggccagcctctcttccctggcgaaagtgctgtggatcaacttgttgagataataaaggttcttggtactccaacacgtgaggaaatccgttgtatgaatccaaactacaccgagtttagatttcctcagatcaaagctcacccatggcacaagattttccacaagcggatgcctccagaagctatagatctcgcttcacgtttgctccagtactcaccaaatctaagatgcactgctcgtgtgcacatccattctttgatgagttgcgagagccacatgcgaggttgccaaatggacggccatttcctccactgttcaactttaaacaggaactagcaaatgcctccccggagctcatcaacaggctgatcccagaccatgctaggcggcatcttgggctcactttattgcccaccgctggaccataggcgaaggctctatggtgtttaaaccttgctctttctgattcttcgttgtgccataggcaattcaaggtgtagaatctgaccattattggaaagccaaacacgagctggcgccaatgtgttgcataaggagaggcggtatgttcgtgcagccagccttttgccgcctgttttaatgcaaaatctgattttacttaagcagtgtgaggggaagtgggttggtgtattgttaagctattgaaggaattcaatccctggtattgtattactttctccaacgttaaatgttgtagttcgcctgtaagtgttccacatcgcctgttatcagtccgcaatccttcgtgtaaatgttattaatgaaaaaaatacatcttgctatgttaccgatcgactcattccaatcacattccgtcctgttgcaaacaaattcttgttttc

SEQ ID NO: 50150 - DNA, 2572 bp, Zea Mays
tacccacgccctcgccgccgcccccgctcgcgctacacttcgcttccccagtctcccctcccccgctcactatggcgtccacaccgcggctcgctcgcctcgccgcagccgtcgcggcgtggatgctagccgctgctgcttctgctggtgtggaggccggggatccgccgctttcgcccaaggggctcaactacgaagtggcggcgctcatggcggttaagagccggctgcgggacgagaggggggtcatggccctctgggacatcaactccgtcgacccctgcacctggtccatggtcgcctgctccccggacaagttcgtcgtctcgctccagatggccaacaacggcctgtccgggacgctgtcgccgagcatcgggagcctcagccacctccagacaatgtcactacagaataacagaatatcaggtgaaattcctccagagatagggaagctgatcaatctgaatgctcttgacctttccagtaatgagttcattggtgatatcccaagttcattggggcacctgactcgactaaattatctacgccttgataggaataacttgtctgggccgatcccaacagatgttgctaggcttccaggtctcacattccttgacttgtcattcaacaatttaagtggcccagttccaaaaatctatgcacatgattacagggaataatgtatggaatgatttgtgggttgtttattagaagatgatgaagaaagggagtgagaataaataaaggagagaaagggtaatctgcatatgtgttgtatatgtctaagtaagtttacaaattctataggccatgtgcttttgaaatggatagagtactgctttactccattttctcatccaaaatcctttgtcagttgcaatgaatgattatttgctccccacctttctgacaatgaagttttcttgttgcattgcttaagctgagactgaccacacacatttttttctgatagttttgacatttcactgaagataacttcttttacttttttcagtcttgcgggaaatcgattcctttgcaattcctcagttatacatggttgttcagatgtgacagcaatgactaatgggacaatgtcgagacaggtccaaaaggccaagaaccaccatcaattagctttggcaatttctctaagtgtcacctgttccacaatattagttttgttgttcgtgtattggctaagttattgcagatggcgcttgccttttgcttcagctgatcaagatctagaattcgaattgggccatgtgaagcattttgcttttcacgatctgcaaagtgcaacggacaattttaattccaagaatatattaggtcaaggaggttttggtattgtgtataaaggctgtttgagaaatggaactttagtggcagtgaagagattaaaagatcctgatgttaccggtgaagtccagtttcagacagaagttgagttgattggccttgctgtgcacaggaatctcttgcgtttgtatggattttgcatgacctctaaagaacggttgcttgtatatccatatatgccaaatggcagtgttgctgaccgtttgagagattatcgcaatggaaaaccatctcttgattggagtaaacgcatgcggattgctcttggtgctgccagggggttactctaccttcatgaacaatgcaatcctaagatcatccacagggacgtcaaagctgcaaacatattgctcgatggaaatttcgaagcaatcgtcggggattttggattggcgaaacttcttgaccgtcaggaatcgcatgttactactgcagttcggggcactattgggcatattgctcccgagtatctctcaactggacagtcctcggaaaagactgatgtttatgggtttggcattctcctgttggaactgattactggtcctaaaaccttgagcaatggacatggccagtctcagaaaggcatgattctagactgggttagagagctaaaggaggacaagagaccggataagctggtcgacagggatctcagagattcatttgatattcttgagctggagtgttcagttgacgtgatcatccaatgcacgcagacgaaccctatgctgcggcctaagatgtccgaaattctgcacgctcttgaagccaatgtcacgctggcggaaaccagcgtcgagttgaacagggaacctcttccttatggtgtgcctcgcagtttctctgtgaggcatgaggacccccacgattcgtcgtccttcataatagagccaattgagctatctggtcccagatgacagctgttgtcagtgtggttgaggcgaaaagaaaagaaagcatggaaacaatacaattgtacaaaacatgtatatcgtggatgtagttcaacttagcaagagtttgctgggcgtgttgccataccttacataatattttgaacgtggagctggagcgaaccttgttggctatttttgttgcttacgttttcatctgccatccatgaggcactgaggcggtcatgcatttttgccgaaaattttccgccagaaaattgtttggaaaatgttacactccgtac

SEQ ID NO: 50151 - DNA, 2046 bp, Zea Mays
agaaacaacattatcccctgtatttatcagtattaataatacagcatgtcgtgaaaggtagagaagatagagagaaaagaatatcagcagaaactgtaaaaagcagtccgatttcagtagctcagttgacgccctgcagtttcagtgttggttctgtacatagcatgggcggcaatactgcgatatcagcagtgccgtgccgcaatgaaatgctgaatcttatgaacaaagatgtcgcgcagaattcagaaattacccttgcctttcgtaataggtacaagcatcaatcaagtgtccgaaagcatcccattcgtctgaagcaggggagggatgctctgctcgctccagaacacctggtcgggatccacctcggccttcaccatggccagcctcctgaagttgcccctgaagtacatctccccccacgccctggccgcctcgtagctcgtctccccctccaagttctgccccaggtccaggtccctgaagttgacgtacgccgcccggggcctggcgctcgcgtacggcgtcatgaaccggtgcacgccacgcacccacgccaggtgcgcgtcctcgtacgacacgttggcgtcgccgccccacttgacgaagtactgcacgttgtacaggtaccctcgccggtgcgcgtacggcgtgtccgactccggcgtctcgctcatcgccccgccctgcgggtccacgtcgacggacccgcccctgtcctccacgaccctggcgaggagcccgcccagcccggccgcggggatcggggacgtcaggtgggcgctcatctcggcgaccatcccgctgcagttcccgaggaacagtgacttgaaggtcaccgatggatgcctctcgccggcgtcgtcgacctccggctccatggccaccttcacgaacaggtcctcgggaagcgcgtgcgccacgcgctgccattttgtcaggaggcggacagccgcctgggtctgccgctggtccccgcggcgcacgaggcggcgcacggtgaaggcggaaacgacgggcggcacgggaaccagccgcaccgtccaggagaccacgacgccgaagctcccgccgccgccgccgcggatcgcccagaagaggccctcgcccatggcggcgcggtccaggagcctcccctcggcgtccaccacctcggcgtcgaccacgttgtccgcgccgaggccgtgcttgcgcatcatgggcccgaacccgccgccgctgaggtggccgccgacgcagaccgtggggcagatccccgcggggaacccgagcgccccgccgctctcgcgcgtcacggcgtagtagagctccccgagcgtggcgcccgggccggcccgcgccacgcggcgcccggcgtccacgcggacgtcgcggagcgcggcgacgtcgaccacggcgaagggccgggcgcccgccacggatcggtaggagaggccctcgtagtcgtggccgccgctgcgggcccggaccgtgaggccgtggcgcctgcagcaggtgacgcaggcccgcgcctcggcgacggtcgccggggtcagcagcagcgccgggcgcggcgtccgcggggacgcgaagcggaggttctggatcgtggcgttcagaagggaagggtacgaagcggccgacggggcgtggacgagcctggacgtgtcggtggtggccggcgagaggcgcgcgacgcagcggacgaagctcccgtggagggcgccgccgccgccttgctcctgcggggaacaagtctgggcgaggagcagcaggaagaggaaagggaggtgccaggatcttggtcgcacagccgccttcgtcttgctcatcatctcttgcacttacacgggaaggggtatcgaggtgagtggcattgttgagatgaagacgatggcagctgacgggcgctctgcagccatgtatgatatgtattggcatgttctaggccagaaaggggcaatcaaagatacttgatgtatgtgttgtatgtgttttatatatgtatgtgtctagatttattatcgatcatttaaatagacaaaaaaaatcaacaccgaaaac

SEQ ID NO: 50152 - DNA, 536 bp, Zea Mays
cacaataggaagataggaaatattttcagatcctatacaagcaaaatttaattctgagtagtcaagagcgaaaagagaagggtaccatgttgcgtgtccgaatcaggagaagctaatgcagatgagccaaggtcgtagccgaagaggagagcaggtggtgaatctgggggaggccaagatcgggagagagatgattttggggaaggaggggcagagatcgtgttttccctctgtaggatcatcgctgctcgatccgcagctcgtcccgtcactattgtcgtcagtctcccggaggccggagccaccagccgcaccttatcccaactcccacccttccacacagtttgccgtctctcggatctgggagctcagctccggaggcggcaatagcccaggttgagcgcgtggaagagatcgaggaagggggccgctgggcgggagccgagagatgacagaggcggcaggcggcgtcggtcggaaaggaagacgagcgtgcgaggtagggagcctggcgaggggctagacggctgttttct

SEQ ID NO: 50153 - DNA, 683 bp, Zea Mays
gagcccctccgtccgtcccatccggccatccgcgcagtgcccccacaccacaggcatcttgccccgctaccaagaaagacaggagccagcatgccgccatcaccgtcgttgctggacctcatgagcctgccgcccgacctgtctccgtctgccgaggaagcggcggactcgtcgtcctcggaaggcagcagctgtggcttggtgcaggtggtgccgagggacctctccgacgagctcctcggcaagttcgaggacaccagcgagttcggcttcgagtacagccagagcggcctctggtcgccgctggtcctgcggcccgaggtcctcgcgaccgcggtgcgggaccgacgcaggcgcagccgccggagttggaggaggaaggttcgtatggtgttctgttgctgctgacatccggtttatgttgggacaagctcttgtctctactaaaaactcctccgcagcttctcatgtaaaaactgtttcgtacttaatttcgtgatgaagttagtttgtactttggttataatgaagattactttttactgggatgtaaactagaatgcctgcgggtttgtaagtgctggtgtccactgattttgggttctcgaatatttgtcgtccgctagtttattttgaactaaaccgcgaaaaataaaaaagaagggagagagtcctgattaaat

SEQ ID NO: 50154 - DNA, 669 bp, Zea Mays
cctccgtccgtcccatccggccatccgcgcagtgcccccacaccacaggcatcttgccccgctaccaagaaagacaggagccagcatgccgccatcaccgtcgttgctggacctcatgagcctgccgcccgacctgtctccgtctgccgaggaagcggcggactcgtcgtcctcggaaggcagcagctgtggcttggtgcaggtggtgccgagggacctctccgacgagctcctcggcaagttcgaggacaccagcgagttcggcttcgagtacagccagagcggcctctggtcgccgctggtcctgcggcccgaggtcctcgcgaccgcggtgcgggaccgacgcaggcgcagccgccggagttggaggaggaaggtgttctgttgctgctgacatccggtttatgttgggacaagctcttgtctctactaaaaactcctccgcagcttctcatgtaaaaactgtttcgtacttaatttcgtgatgaagttagtttgtactttggttataatgaagattactttttactgggatgtaaactagaatgcctgcgggtttgtaagtgctggtgtccactgattttgggttctcgaatatttgtcgtccgctagtttattttgaactaaaccgcgaaaaataaaaaagaagggagagagtcctgattaaat

SEQ ID NO: 50155 - DNA, 222 bp, Zea Mays
atgagcagcaccaggcaccagcagcagctttgtttgcgcctcgctttgcgcttgtggaggctatatagcttcacacttacaacattgccaggcagacgccggcgaaaggttttcattccgctgtttcccccggcaggagaggacaggacaggacagctagcgacacgtcaatacctgtacccactctcggcggcatacttgctcctcacgtacggatcgtag

SEQ ID NO: 50156 - DNA, 1659 bp, Zea Mays
gcccaatctactctacagtggcggtcatggctcccccttccatagacggcacgcgcaggcacaacttcctccacccaatccacgcctccctcatggaaggaatacacgctgatgccgggatgtatgggatccatgtggaagtcgtggaggggaagcaaaatccaagcctcaccaccggccccttccatcctcggcgtcctcttaccattgacggcgcccttcaacacaccatctgctcgtgctatatattaatccaaagggagaacaccgtagagttgattttgcaaaccaagaactgttttctttcatcagataatcctccacgtggacagaataaaactgagaagagtttgccgctgatatatcaaagtatgtacatgcttgtttttaaaactgagaagagttgatttcaatacagtttgttgaaggacacaaactcagtatgccatttcaatacaattcatttttagtatgccatttcaatttatgtgcttgttgttcattgtccaaaactgctagagtagcttctccaaattgtgtcaaactgttaggcagatggagaagagcagattttgcaaaatgattttatgtataactgcaacaatgaaagtgttcagttacattatgtgacaacatcatcactatactccactgggatacgatgtgacaaccaaaaaattagtaatcatatccagtttcttgtaaattttttctcttcatacttttggtcaatggtgaacatgttagatgtgttccccgagtataaaatagatttaattccaatttctttattgggtcttttctctcagtttgattcattttcttgatttcaatacataaaacattgaaggacacaaactcagatttcatacagttgttcgttgaagcttcattttcagtatgccatgtgcttgatgttcgtgtccaatactgctagagtaggtataagagttctcttaaattggtgctatctacgaattgtctgatgaacatttatgtgccaagaagattttgattaaatgtatgtgatttctgctaaaaataccttttcaaaagcacaatgaataccttatctacctaatgtatctgtctttgtaaaaaggctcaagtacttgtttctgtttggtaaaggaggtaaccgatcaatagtatttacaatgtgacaccacatcaatcgtaaaggaggtaaccaattttcctagactggcatttatttgtttttgtaccaacctacagtactgaaaaatctttattttacttgaaagtggcatgcatgttcaagtgtcactgtattcagagatttgtttatgtatagtacaaaggtttgcttgatttcaatacataagacattgcaatacataaactcagtgtgcttgattaatatagctgttcgttgaagtttcatttccagtatgccatttcaatttatgtgcttgatgttcagtgtccaatactgctatagtagcttctccaagttgtgacacactgttaggaagatggttcaacttctctcgaaatgaagcttctatcttcctatgtatagacaagttgttcagttaggaggtttaggttctcttaaaatggtgctatctacgagttaggaggtctaggagcacactgaatgttttagaggttgatgaaatcgttgttttcctaaaa

SEQ ID NO: 50157 - DNA, 976 bp, Zea Mays
tattaatccaaagggagaacaccggcaaggcagcaactacaacttcatcctcctcacgtttctaaaatccattttccatctcctattttcagtagagttgattttgcaaaccaagaactgttttctttcatcagataatcctccacgtggacagaataaaactgagaagagtttgccgctgatatatcaaagtatgtacatgcttgtttttaaaactgagaagagttgatttcaatacagtttgttgaaggacacaaactcagtatgccatttcaatacaattcatttttagtatgccatttcaatttatgtgcttgttgttcattgtccaaaactgctagagtagcttctccaaattgtgtcaaactgttaggcagatggagaagagcagattttgcaaaatgattttatgtataactgcaacaatgaaagtgttcagttacattatgtgacaacatcatcactatactccactgggatacgatgtgacaaccaaaaaattagtaatcatatccagtttcttgtaaattttttctcttcatacttttggtcaatggtgaacatgttagatgtgttccccgagtataaaatagatttaattccaatttctttattgggtcttttctctcagtttgattcattttcttgatttcaatacataaaacattgcaatacataaactcagtgtgcttgattaatatagctgttcgttgaagtttcatttccagtatgccatttcaatttatgtgcttgatgttcagtgtccaatactgctatagtagcttctccaagttgtgacacactgttaggaagatggttcaacttctctcgaaatgaagcttctatcttcctatgtatagacaagttgttcagttaggaggtttaggttctcttaaaatggtgctatctacgagttaggaggtctaggagcacactgaatgttttagaggttgatgaaatcgttgttttcctaaaa

SEQ ID NO: 50158 - DNA, 1450 bp, Zea Mays
gcgacgaggagtgggctgggccggggcttggcggcaataaataggcggccgggtcatcggccaaccccccatcgccgcctgctctctacctctgcactccaatcagatcatcagatagatcactggccccgtgctgattaccgcgcttcccatctgagcagccagcctcccagggtacagggagagacgcagaagagacagctgctgcctcgctgagacgatggccggaggcggagaccactcccagacgaacggaggccacgtcgaccagagggccttggaggagggcaggaaggaggagttcgctgaccagggctgcgccgccatggtcgtctccgtcccatttatccagaagatcatcgcggagatcttcggcacctacttcctgatgttcgcggggtgcggcgcggtgacgatcaacgcgagcaagaacgggcagatcacgttcccgggcgtggcgatcgtgtgggggctagcggtgatggtgatggtgtacgccgtgggccacatctccggcgcgcacttcaacccggcggtgaccctggccttcgccaccagcgggcggttcccgtggcggcagctgccggcgtacgtgctggcgcagatgctgggcgccacgctcgcctccgggacgctgcgcctcatgttcggcggccggcacgagcacttccccggcacgctgcccacgggctccgaggtgcagtcgctcgtcatcgagatcatcaccacattctacctcatgttcgtcatctccggcgtcgccacggacaacagagcaatcggggagctggctgggctggccgtgggcgcaaccatcctgcttaacgtgctcattgccggaggtggaaaaaagaacgaaaacaaagaaacaaacacgagcttttgctagctgacggcccgttgctttgtgctgtgccaacaagcaggcccgtctccggcgcgtcgatgaacccggcccggagcgtgggcccggcgctggtgagcggggagtacacgtccatctgggtgtacgtggtggggccggtggtgggggccgtggccggggcgtgggcctacaacctcatccgcttcaccaacaagcccctccgcgagatcaccaagagcacgtctttcctcaagagcacgagcaggatgaactccgccgcctccgcctgatggatctccatggccggtaatttagcctacaaaactatatattcacccgtgtcgtcgtgtcagtacgtgagaggatatagatatataattcctgcgtgcgtgtgcgtttgtgtgtggatggaaaacatatgaaagaagaggtatggtttgtgtgtggatggaaaacgtactgtgcctgccttcgaccctgggcaacgtcgctctaccccgtgaacgtgcttaacctgttgccgcatgttttgttaactcaattttaatgtgttggcgagatcatacgcatcactgtgcttagcct

SEQ ID NO: 50159 - DNA, 564 bp, Zea Mays
caaccaactcggtgcgctagctgcgtggtgagtcggcatcggggtataaagacggggctaccctcgacgaccatcgcggccgcgacaccaaccagaccaccatgcgccatacccaacggaaactaggccactgcggctacctctcgagctcgctatcgccagcgttcatggaagggctgggaaggacccccatgccatgtggatcgtgcgcgggcagctaatcaggctcggggagtcggaggtcggcgacaattcctcaccaagaaatcagcgccgccgtagatccgccgagagctgaggccagcaacctctgtgtgcaagattctcgcatggttgcaaatcacttgaagaccaactgagtacctgggagtctcgagtctaaggtcaagaacaggtaccactggacgaggcacatgaaggatgctgtgatgagttcgtgagtggtctaggctgtcgtctcgcagtcaactttgggttgctggatcgttgtcttcgtatgatgtaattatttaactattttgtacagaactccattatatattaaagatgtgacattcatttctg

SEQ ID NO: 50160 - DNA, 508 bp, Zea Mays
accctcgacgaccatcgcggccgcgacaccaaccagaccaccatgcgccatacccaacggaaactaggccactgcggctacctctcgagctcgctatcgccagcgttcatggaagggctgggaaggacccccatgccatgtggatcgtgcgcgggcagctaatcaggctcggggagtcggaggtcggcgacaattcctcaccaagaaatcagcgccgccgtagatccgccgagagctgaggccagcaacctctgtgtgcaagattctcgcagcatggttgcaaatcacttgaagaccaactgagtacctgggagtctcgagtctaaggtcaagaacaggtaccactggacgaggcacatgaaggatgctgtgatgagttcgtgagtggtctaggctgtcgtctcgcagtcaactttgggttgctggatcgttgtcttcgtatgatgtaattatttaactattttgtacagaactccattatatattaaagatgtgacattcatttctg

SEQ ID NO: 50161 - DNA, 1265 bp, Zea Mays
accctcgacgaccatcgcggccgcgacaccaaccagaccaccatgcgccatacccaacggaaactaggccactgcggctacctctcgagctcgctatcgccagcgttcatggaagggctgggaaggacccccatgccatgtggatcgtgcgcgggcagctaatcaggctcggggagtcggaggtcggcgacaattcctcaccaagaaatcagcgccgccgtagatccgccgagagctgaggccagcaacctctgtgtgcaagattctcgcatggttgcaaatcacttgaagaccaactgagtacctgggagtctcgagtctaaggcaagttgtgcccttgatcactcttctttacctaataatgttctggttaatcactgtgacatgctcaggttaatttggtgggacctaataggtttcccaagccttgcaaacatatgaactattgggtagatttggttttgctctacctggttttgggaaattaatgttatactgtgatcatgttccaattatattgttgtttaattattgttcatgaaaagattattgtgtcaattggaacatggagcttaacttgagatcacagtgctaccacaagggtggaactagtggaactttggaaaggcctcgttgtgctaccctgcctctcttcctcgctagaggtgtatggggtttgatcaaccccgtggaaaatgggtaacacgacttgtgggtaaagatgtgtaacctctatagagtgtaaaactggtatatctgtcgtgctcacggtcaagagcgactcatgactctctcatgattaatttatggaactaaacttaatctatcatatgcattgcatcacgagtgttattatcaattgtgatatcttatttagttgggttggtatctacttatacctagtaactgttaataaaattttgaccaactttaaaagcaatgctcagctttaaccatctccttttgtaagccttacacttcacatgagctcccacccttggtgagttcatgaacattattccccgcaacttgttgagcaatgaacgtatgtgagctcacccttgctatactcacatccccccaggtcaagaacaggtaccactggacgaggcacatgaaggatgctgtgatgagttcgtgagtggtctaggctgtcgtctcgcagtcaactttgggttgctggatcgttgtcttcgtatgatgtaattatttaactattttgtacagaactccattatatattaaagatgtgacattcatttctg

SEQ ID NO: 50162 - DNA, 1136 bp, Zea Mays
accgcgcccagcgtcctccctgctcctctgcagcgtgcgtcccggtgccctatctactccagccatggcgtgtctctgctccatctccctcgcggcgccctttccaggcgtgctctctgctgcatctcgccatcgacgctggtcgagtcctcgtctccaacttcctcacgctcggctcccaggattgaaggtgagcctgtcaacctcacggaagataatccagtcactcatggaatcactgctgctagacacgatatcctacaatttggattggcttcaacacctgcaatgttcaatagtacacttacagaagatgagagtagtcatttacctgttgttggagtcataatgatgacatattattcagtcaaggggagattccaagagtggtggattgaggagaaagtgaagctcagttcaaagttcgtcaggtgttcgattgaaggcttcaatcagagactgtcgtcattcttgcaaatattaagtcaagttgattatgcagccccttactcctcgtcgtcgatccacgccgcgtccacgacatgcccgtcgatcccgacgatctatcttcctatgcgcgccacttgcgttgagatccgaagctcccctgtcatgctcgaccctggaggtctccaacttgtcgacatcccttacgtcgtcttaaaatcccaagagtttggataaaccaacaaatcccgtgtggtgcttgccgggtgctccgcaaaaaggtcttaacaagaatcattgacgtctgcgcgaatttatggtcaatatggtacgttaaataactacgtgatgcggggaaccagagctgagtcaaccccaagatgatgtagcgggtggactactacgcatggtgaagctgatggaccaacctgaagatggttaaatcaagcaagtgctcggtcgagggatgctcgtcaagtggacgtcgtctaacaaacactaacctagtgttatccaggtaagccccggtgcatttgccacctccttgtgttttaaaatctttatcaccttgtttgatgcattaggtgataggagttgtgtgccaaacaattgatgcatttccttccttgaaaaatcgattacccttccttgataccctttttgaaaagaattttatgatgcttagcctt

SEQ ID NO: 50163 - DNA, 800 bp, Zea Mays
atggcgcgtctctgctccatctccctcgcggcgccctttccagccgtgctctttgctgtatctcaccatcgacgctggtcgagtcctcgtctccaacttcctcacgctcggctcccaggattgaaggtgagcctgtcaacctcacggaagatgtcactaaagctatagctgcagcttttgccgcatggctattaaacaagaaactagatgacttgagacgtttaagaatctctgttggacatgattcacgaatttctgcacataaattgcagaatccagtcacttatggaatcactgctgctggacacgatatcctacaatttggattggcttcaacacctgcaatgttcaacagtacacttacagaagatgagagtagtcatatacctgttgttggagccataatgatgacagattattcagtcaaggggagattccaagagtggtggattgaggagaaagtgaagctcatcagtttaatgttcattaggtgttcgatcgaaggcttcaatcagagactatcgtcattcttgcaaatattaagtcgagttgattatgcagccccatactcctcgttgtcgatccacgtcgcgtccgcgacatgcccgtcgatcccaatcttcctatgcgcgccacttgtgttgagctccgaagcccccctgtcatgctcgaccctagaggtctccaacttgtcgacatcccttacgtcgtctaaaactcctgagagtttggataaagcaacaaatcctgtgtggtgcttgccgggtgctcggcaaaaaggtcttaacaagaatcattga

SEQ ID NO: 50164 - DNA, 1108 bp, Zea Mays
cccgtctcagtctgtctttgtccatcaacaaggaggaagcgcatgtgaacatttgtgcatttgtcggacgttcagatctggactcacgatgctttcggtaaaacttgcctctgctctgatccacctccaccttcaacgacttggcaccctcgaagaccaatcctgcaagcaattctttgttccaagaagacattgaggccctcacaaagaagacacaagatggtgggacaaaagtggttgaagcaaaggctggcaaagggctctgcaacattgtctatggcataagtttagaacatatgaatcgttgtcactgtcagcatgtctattggttacactatagaatatcttgtctgtttattagccttttagaattttatgattactttcttctatgctttgtaactattcaatcagtagatgcttcttgccttcattgatttttctatgaaaggactacttgtcattcattgaattttctatgagactatggtataaattagttgctgcatgattgcctattacatgttcatgcacagattgtctggtaatgttaagcttataacttccaagctagttaaatgcatgggaccaaaatttactatatttacaactactgttttatgattgttcctgtattcatttgattgtctctctattgcatcagttccctgtcaaaactagttgtatagctaccaagttatgtaactgtaataaacattgttggggcgaaggcgaagacgctacccttcgcttcaggccctcgtcaactcgctgcaccagcggaggcaagatgaccggcgcggcccaccccttcgccctcttcaccgcaagacgaaggcctacgacgaagtctctccatcccacgtcctcactcgacctggaggcccacgtgggattcggcccattgtaacaggctccgcagggacaggcgtgttacgggcctgatttgtaatagctttcctataatgacagtctgtaaccctcccttatgggaatattctagggataatccaggtgcctgagggcacaagcgtctttacatggagacgttgggcactcggacacctataaatatccccgtacagtgcccttgagaggctagattaat

SEQ ID NO: 50165 - DNA, 2076 bp, Zea Mays
attctcttctcacgaacgtttacacgccgggtgcgcgcgctctgctctccctccttcccttgcccaactctcactctctcgcccgcgcggcgcggccttgctttctggtggcaccgactggccggctgccaccgtctcctcctcgctggtgcccaggtcttcgtcggtcccttggtgtctgccccttatcctggtctttgtcaggccctcgcctttcgcccgcgacgagcaccacctgcaggaacaaaatgaagtgcaatgcttgctggcgggatttggaagggcaagctgtatcaaccacctgtggtcatcttttatgtgcagatgatgctaggaaaatactcaataatgatggtacatgtccaatttgtgatcaggtgctctcaaaaagccatatgaaacctatggatataaatccaggtgatgattggacaaatatggcaatggttggaatatccccacaaatacgtatccttcatttccattgacctttcactacatccacagtggggtttatcttgcactgctttttttatggcatagtaatctgcattttccaatctatgcctaacatgtttaagtagcactattatgcaatgcaaccaatctgagaacataaatggggaacttgttaaagaataacagtggcattacttttgtgacctgtgtccaaatttaatgcttaaggagttcggtagatatcttgcatttccttaaatatgatgaaaatcagttatgaagagtgcatacagaagcgtaatgttctacattggacaaaaggaactggagatgcagtacaagatgaacagaattgttggtcaatgtaggcaaaaatgtgaacttatgcaggcgaaatttactgagaaactggaagaagtacataccgcataccagaagatggcgaaaagatgtcagttgttggagcaagagaatgaaaacttgaacagagataagcacgagctgcaagaaaaatttgctgagaaatccaggcagaagaggaagcttgatgagatgtatgaccaactgaggaatgaatatgagtcggtgaagcgttctgcccttcaacctgcaaataactacttagcaagacctcagccagacttatttgcaggcatgcccaacgtgatggatggtggcgaccatctgagacaagggcagagagatgagggctggggtccaccgccaaggcaacgtcactgcacctctggtccctttgatctgtccaccgggtctcctgcccatgccgtggctcctccggctgatatcaggcccagacagcagacacggtcagtcttcggagctacactgaacaatccatcaagcaccctgcgaaacctcataatctcacctgtcaagcgtccccagacgtcccgtaatcgccaacacatattcacgttgtagagagttggaatagctgacgctgacggggtgctccgcattggaaatcaaatggagatatggttgattatacgcagacttcgtccatttctacagttacatgtacagcaggaagtttcatctatacccctaatcttagccttggtagtatgacaactgtggttaacatttttctaactcatccgcatctgaacagaccaagtaatcctgtgtgctgattgaggacctaaacgagttgtttaagtgcaagtgatttggaactggaattacttggatgttatcctaaataaactccaagtggagtttgcctcctgtcttaaacttccatagcatcacttgagagttggaaaccgacgactatattcaagggtttgaaacagttagcacaggctagagtagccgctgtccgcactgaacatgcagggtggcatcagaagtctgcccgccgccgccggtgaggagccccgtgaagtcgaaaccatcctcaccaccgcctaagaccccatcggtgcgcctccccgctgctttgtcaccattgccatttccgctgcccagctggccggcggtcactgtcactgtcaggaagaccccgtcgctctcgctgccaccggtcccggcgaggacgcggcgcagcacctgcgagtcgacagcaaccttggcgaggaagaacgccagcat

SEQ ID NO: 50166 - DNA, 1830 bp, Zea Mays
attctcttctcacgaacgtttacacgccgggtgcgcgcgctctgctctccctccttcccttgcccaactctcactctctcgcccgcgcggcgcggccttgctttctggtggcaccgactggccggctgccaccgtctcctcctcgctggtgcccaggtcttcgtcggtcccttggtgtctgccccttatcctggtctttgtcaggccctcgcctttcgcccgcgacgagcaccacctgcagttaatctaataatttgtaggaacaaaatgaagtgcaatgcttgctggcgggatttggaagggcaagctgtatcaaccacctgtggtcatcttttatgtgcagatgatgctaggaaaatactcaataatgatggtacatgtccaatttgtgatcaggtgctctcaaaaagccatatgaaacctatggatataaatccaggtgatgattggacaaatatggcaatggttggaatatccccacaaatacttatgaagagtgcatacagaagcgtaatgttctacattggacaaaaggaactggagatgcagtacaagatgaacagaattgttggtcaatgtaggcaaaaatgtgaacttatgcaggcgaaatttactgagaaactggaagaagtacataccgcataccagaagatggcgaaaagatgtcagttgttggagcaagagaatgaaaacttgaacagagataagcacgagctgcaagaaaaatttgctgagaaatccaggcagaagaggaagcttgatgagatgtatgaccaactgaggaatgaatatgagtcggtgaagcgttctgcccttcaacctgcaaataactacttagcaagacctcagccagacttatttgcaggcatgcccaacgtgatggatggtggcgaccatctgagacaagggcagagagatgagggctggggtccaccgccaaggcaacgtcactgcacctctggtccctttgatctgtccaccgggtctcctgcccatgccgtggctcctccggctgatatcaggcccagacagcagacacggtcagtcttcggagctacactgaacaatccatcaagcaccctgcgaaacctcataatctcacctgtcaagcgtccccagacgtcccgtaatcgccaacacatattcacgttgtagagagttggaatagctgacgctgacggggtgctccgcattggaaatcaaatggagatatggttgattatacgcagacttcgtccatttctacagttacatgtacagcaggaagtttcatctatacccctaatcttagccttggtagtatgacaactgtggttaacatttttctaactcatccgcatctgaacagaccaagtaatcctgtgtgctgattgaggacctaaacgagttgtttaagtgcaagtgatttggaactggaattacttggatgttatcctaaataaactccaagtggagtttgcctcctgtcttaaacttccatagcatcacttgagagttggaaaccgacgactatattcaagggtttgaaacagttagcacaggctagagtagccgctgtccgcactgaacatgcagggtggcatcagaagtctgcccgccgccgccggtgaggagccccgtgaagtcgaaaccatcctcaccaccgcctaagaccccatcggtgcgcctccccgctgctttgtcaccattgccatttccgctgcccagctggccggcggtcactgtcactgtcaggaagaccccgtcgctctcgctgccaccggtcccggcgaggacgcggcgcagcacctgcgagtcgacagcaaccttggcgaggaagaacgccagcat

SEQ ID NO: 50167 - DNA, 2566 bp, Zea Mays
  misc_feature (1)..(2): n is a, c, g, or t
nnattaagatcgtcatatgaggagagcagcaagttgttagaatctaagaaggaagatgtagttaaacttgttacagacaaggaaacgaatgacaacataattttgcaactcaggcaagaacttgaggcaacaaaaaagttgcatgaggcagagactcagcaattagagaccaaagctgccaaagtaaataaggagtttgaacagaggataaaagaaatagaactcatgttagaagattctacaaagaggagaagagaacttgaggaatctactgaatctagaatccaattttggaagcagaaggaaatagtggtaaacaaatttgtgggtttgcaagtaaagaatgctcaggaattgaggctctcttctgtttcagttagacttgaaatacaaaattgtcaaaaaagatggtttgaagaattggctggccttggacaaaatcttaagatggtaacaagtgctgcagaaaaatatcatgcaactcttgcagataatagaaaactattcaacgagatccaggaactgaaaggaaatattagagtttattgccggataagaccttttcgaccctgggaggatgagaagtccacttcagtggaatatattggtgagaatggtgaactggttttatcaaaccctacaaagaagggaaaggaagccggcaagaatttcacttttaacaaggtttttggccctacagctacacaagatatggttttcaacgatattcggccactaattagatcagttcttgatggctacaatgtttgcatttttgcatatggtcaaactggatcaggaaaaacacatacaatgatgggtccggaaaacgcaactgagaaagaatggggtgtcaactatcgagcactaaatgaccttttcaacatctcacatgatcgtcgggacacaattaaatatgaacttggtgttcaaatggttgagatctacaacgagcaaatccgtgatctacttggtaccggtggctcgcagaagaaactagggatccagaataccacccagcccaatggacttgcagttcctgatgcaacaatgtgtcctgttgattcgacttctcatgttattgaactaatgcaaacagggcacaacaatagatccatgagtgcaacagccttgaacgagaggagcagcagatctcacagtgttgtgaccatccatgtccagggccaggatttaaaaactggtaacactttgcgtggtgctctgcatcttgtggaccttgcaggaagtgaaagggtggaccgatctgcagttacaggagacaggctcaaagaagcacagcatatcaacaagtctttggctgcacttggggatgttatattttctttatcacaaaagaatgctcatgtaccatacaggaatagcaagcttacacaagtcttacaaacttctttgggtgggcatgcaaagactctaatgtttgtgcaagtcaacccagatgtttcatcatacactgagactttaagtacactgaaatttgctgaacgtgtatctggtgtagaactaggtgctgcaaggaccaacaaggagggcaaagatgtcaaagaattaatggaccagctttcactgctcaaagataccattgcaaagaaggatgatgaaattgatcagctccaactagccaacagtagcaattccctactgaagtccacgaaacatggtgactccttgttgaagcattcggcctcttctccaggaatgacatccttaggaaaagtggcaagctttggtagcggggcagcttctgatcttgacaactgctctgacaccagtgataggcattccgaagctgggtccatgctctctactgacgaggcccgacagctgagccagaactcggctgatcctggtggtgattcagatggaaggctaagtgatatatcagatggcggtatacccgcgggtgcagaaactgacagttcagcgaacaacgttgtggaccaagaacaagacaaaacatccgctactggaaaagagcggttagccaaagcagtaagtcgagtccagaagctaacagtacccaaagtcggccaagcatcaagcttgaggcctaaaccaagagatccttctgctcctaaatcttcagtcacaccaggtgtgcgaaaaggtaccaccactcaagcaactccaccagcaaaagcaagcggcacttcaaaaagagtaccatagatcaagataatcatttggcgaagccgcttcccagccatttttctttttgcatagctttttcagatcttattgccatgtgtaacaccgatgccaattactgacttgtgcatctcaggtggataggttcttttcttttcattgtttgcaatgagggtgttaactgcatcagtatgtgatgttagcatgccatgagatatcattgctcaatgtgttagtacaaacagtgaaggaattcggattgatccattcatgttgatattgtggcgttcagcagtccctgtaatttcatgcaacaacgcagagtcgttcatcgtaaccaaaacctcaatattcaaaaatatataacctgttaatctgttttgttcttcagcaccttatc

SEQ ID NO: 50168 - DNA, 2563 bp, Zea Mays
  misc_feature (1)..(1): n is a, c, g, or t
nattaagatcgtcatatgaggagagcagcaagttgttagaatctaagaaggaagatgtagttaaacttgttacagacaaggaaacgaatgacaacataattttgcaactcaggcaagaacttgaggcaacaaaaaagttgcatgaggcagagactcagcaattagagaccaaagctgccaaagtaaataaggagtttgaacagaggataaaagaaatagaactcatgttagaagattctacaaagaggagaagagaacttgaggaatctactgaatctagaatccaattttggaagcagaaggaaatagtggtaaacaaatttgtgggtttgcaagtaaagaatgctcaggaattgaggctctcttctgtttcagttagacttgaaatacaaaattgtcaaaaaagatggtttgaagaattggctggccttggacaaaatcttaagatggtaacaagtgctgcagaaaaatatcatgcaactcttgcagataatagaaaactattcaacgagatccaggaactgaaaggaaatattagagtttattgccggataagaccttttcgaccctgggaggatgagaagtccacttcagtggaatatattggtgagaatggtgaactggttttatcaaaccctacaaagaagggaaaggaagccggcaagaatttcacttttaacaaggtttttggccctacagctacacaagatatggttttcaacgatattcggccactaattagatcagttcttgatggctacaatgtttgcatttttgcatatggtcaaactggatcaggaaaaacacatacaatgatgggtccggaaaacgcaactgagaaagaatggggtgtcaactatcgagcactaaatgaccttttcaacatctcacatgatcgtcgggacacaattaaatatgaacttggtgttcaaatggttgagatctacaacgagcaaatccgtgatctacttggtaccggtggctcgcagaagaatagggatccagaataccacccagcccaatggacttgcagttcctgatgcaacaatgtgtcctgttgattcgacttctcatgttattgaactaatgcaaacagggcacaacaatagatccatgagtgcaacagccttgaacgagaggagcagcagatctcacagtgttgtgaccatccatgtccagggccaggatttaaaaactggtaacactttgcgtggtgctctgcatcttgtggaccttgcaggaagtgaaagggtggaccgatctgcagttacaggagacaggctcaaagaagcacagcatatcaacaagtctttggctgcacttggggatgttatattttctttatcacaaaagaatgctcatgtaccatacaggaatagcaagcttacacaagtcttacaaacttctttgggtgggcatgcaaagactctaatgtttgtgcaagtcaacccagatgtttcatcatacactgagactttaagtacactgaaatttgctgaacgtgtatctggtgtagaactaggtgctgcaaggaccaacaaggagggcaaagatgtcaaagaattaatggaccagctttcactgctcaaagataccattgcaaagaaggatgatgaaattgatcagctccaactagccaacagtagcaattccctactgaagtccacgaaacatggtgactccttgttgaagcattcggcctcttctccaggaatgacatccttaggaaaagtggcaagctttggtagcggggcagcttctgatcttgacaactgctctgacaccagtgataggcattccgaagctgggtccatgctctctactgacgaggcccgacagctgagccagaactcggctgatcctggtggtgattcagatggaaggctaagtgatatatcagatggcggtatacccgcgggtgcagaaactgacagttcagcgaacaacgttgtggaccaagaacaagacaaaacatccgctactggaaaagagcggttagccaaagcagtaagtcgagtccagaagctaacagtacccaaagtcggccaagcatcaagcttgaggcctaaaccaagagatccttctgctcctaaatcttcagtcacaccaggtgtgcgaaaaggtaccaccactcaagcaactccaccagcaaaagcaagcggcacttcaaaaagagtaccatagatcaagataatcatttggcgaagccgcttcccagccatttttctttttgcatagctttttcagatcttattgccatgtgtaacaccgatgccaattactgacttgtgcatctcaggtggataggttcttttcttttcattgtttgcaatgagggtgttaactgcatcagtatgtgatgttagcatgccatgagatatcattgctcaatgtgttagtacaaacagtgaaggaattcggattgatccattcatgttgatattgtggcgttcagcagtccctgtaatttcatgcaacaacgcagagtcgttcatcgtaaccaaaacctcaatattcaaaaatatataacctgttaatctgttttgttcttcagcaccttatc

SEQ ID NO: 50169 - DNA, 2482 bp, Zea Mays
  misc_feature (1)..(1): n is a, c, g, or t
nattaagatcgtcatatgaggagagcagcaagttgttagaatctaagaaggaagatgtagttaaacttgttacagacaaggaaacgaatgacaacataattttgcaactcaggcaagaacttgaggcaacaaaaaagttgcatgaggcagagactcagcaattagagaccaaagctgccaaagtaaataaggagtttgaacagaggataaaagaaatagaactcatgttagaagattctacaaagaggagaagagaacttgaggaatctactgaatctagaatccaattttggaagcagaaggaaatagtggtaaacaaatttgtgggtttgcaagtaaagaatgctcaggaattgaggctctcttctgtttcagttagacttgaaatacaaaattgtcaaaaaagatggtttgaagaattggctggccttggacaaaatcttaagatggtaacaagtgctgcagaaaaatatcatgcaactcttgcagataatagaaaactattcaacgagatccaggaactgaaaggaaatattagagtttattgccggataagaccttttcgaccctgggaggatgagaagtccacttcagtggaatatattggtgagaatggtgaactggttttatcaaaccctacaaagaagggaaaggaagccggcaagaatttcacttttaacaaggtttttggccctacagctacacaagatatggttttcaacgatattcggccactaattagatcagttcttgatggctacaatgtttgcatttttgcatatggtcaaactggatcaggaaaaacacatacaatgatgggtccggaaaacgcaactgagaaagaatggggtgtcaactatcgagcactaaatgaccttttcaacatctcacatgatcgtcgggacacaattaaatatgaacttggtgttcaaatggttgagatctacaacgagcaaatccgtgatctacttggtaccggtggctcgcagaagaaactagggatccagaataccacccagcccaatggacttgcagttcctgatgcaacaatgtgtcctgttgattcgacttctcatgttattgaactaatgcaaacagggcacaacaatagatccatgagtgcaacagccttgaacgagaggagcagcagatctcacaggaagtgaaagggtggaccgatctgcagttacaggagacaggctcaaagaagcacagcatatcaacaagtctttggctgcacttggggatgttatattttctttatcacaaaagaatgctcatgtaccatacaggaatagcaagcttacacaagtcttacaaacttctttgggtgggcatgcaaagactctaatgtttgtgcaagtcaacccagatgtttcatcatacactgagactttaagtacactgaaatttgctgaacgtgtatctggtgtagaactaggtgctgcaaggaccaacaaggagggcaaagatgtcaaagaattaatggaccagctttcactgctcaaagataccattgcaaagaaggatgatgaaattgatcagctccaactagccaacagtagcaattccctactgaagtccacgaaacatggtgactccttgttgaagcattcggcctcttctccaggaatgacatccttaggaaaagtggcaagctttggtagcggggcagcttctgatcttgacaactgctctgacaccagtgataggcattccgaagctgggtccatgctctctactgacgaggcccgacagctgagccagaactcggctgatcctggtggtgattcagatggaaggctaagtgatatatcagatggcggtatacccgcgggtgcagaaactgacagttcagcgaacaacgttgtggaccaagaacaagacaaaacatccgctactggaaaagagcggttagccaaagcagtaagtcgagtccagaagctaacagtacccaaagtcggccaagcatcaagcttgaggcctaaaccaagagatccttctgctcctaaatcttcagtcacaccaggtgtgcgaaaaggtaccaccactcaagcaactccaccagcaaaagcaagcggcacttcaaaaagagtaccatagatcaagataatcatttggcgaagccgcttcccagccatttttctttttgcatagctttttcagatcttattgccatgtgtaacaccgatgccaattactgacttgtgcatctcaggtggataggttcttttcttttcattgtttgcaatgagggtgttaactgcatcagtatgtgatgttagcatgccatgagatatcattgctcaatgtgttagtacaaacagtgaaggaattcggattgatccattcatgttgatattgtggcgttcagcagtccctgtaatttcatgcaacaacgcagagtcgttcatcgtaaccaaaacctcaatattcaaaaatatataacctgttaatctgttttgttcttcagcaccttatc

SEQ ID NO: 50170 - DNA, 1532 bp, Zea Mays
ctctctgtgccaagcggttggctgtccagaagcaagtattgagccaccagccagaggaagaaacgggcacaacaatagatccatgagtgcaacagccttgaacgagaggagcagcagatctcacagtgttgtgaccatccatgtccagggccaggatttaaaaactggtaacactttgcgtggtgctctgcatcttgtggaccttgcaggaagtgaaagggtggaccgatctgcagttacaggagacaggctcaaagaagcacagcatatcaacaagtctttggctgcacttggggatgttatattttctttatcacaaaagaatgctcatgtaccatacaggaatagcaagcttacacaagtcttacaaacttctttgggtgggcatgcaaagactctaatgtttgtgcaagtcaacccagatgtttcatcatacactgagactttaagtacactgaaatttgctgaacgtgtatctggtgtagaactaggtgctgcaaggaccaacaaggagggcaaagatgtcaaagaattaatggaccagctttcactgctcaaagataccattgcaaagaaggatgatgaaattgatcagctccaactagccaacagtagcaattccctactgaagtccacgaaacatggtgactccttgttgaagcattcggcctcttctccaggaatgacatccttaggaaaagtggcaagctttggtagcggggcagcttctgatcttgacaactgctctgacaccagtgataggcattccgaagctgggtccatgctctctactgacgaggcccgacagctgagccagaactcggctgatcctggtggtgattcagatggaaggctaagtgatatatcagatggcggtatacccgcgggtgcagaaactgacagttcagcgaacaacgttgtggaccaagaacaagacaaaacatccgctactggaaaagagcggttagccaaagcagtaagtcgagtccagaagctaacagtacccaaagtcggccaagcatcaagcttgaggcctaaaccaagagatccttctgctcctaaatcttcagtcacaccaggtgtgcgaaaaggtaccaccactcaagcaactccaccagcaaaagcaagcggcacttcaaaaagagtaccatagatcaagataatcatttggcgaagccgcttcccagccatttttctttttgcatagctttttcagatcttattgccatgtgtaacaccgatgccaattactgacttgtgcatctcaggtggataggttcttttcttttcattgtttgcaatgagggtgttaactgcatcagtatgtgatgttagcatgccatgagatatcattgctcaatgtgttagtacaaacagtgaaggaattcggattgatccattcatgttgatattgtggcgttcagcagtccctgtaatttcatgcaacaacgcagagtcgttcatcgtaaccaaaacctcaatattcaaaaatatataacctgttaatctgttttgttcttcagcaccttatc

SEQ ID NO: 50171 - DNA, 1605 bp, Zea Mays
gcccaccttcttgagccctcatcaccgtcatgttataaaggatccagaataccacccagcccaatggacttgcagttcctgatgcaacaatgtgtcctgttgattcgacttctcatgttattgaactaatgcaaacagggcacaacaatagatccatgagtgcaacagccttgaacgagaggagcagcagatctcacagtgttgtgaccatccatgtccagggccaggatttaaaaactggtaacactttgcgtggtgctctgcatcttgtggaccttgcaggaagtgaaagggtggaccgatctgcagttacaggagacaggctcaaagaagcacagcatatcaacaagtctttggctgcacttggggatgttatattttctttatcacaaaagaatgctcatgtaccatacaggaatagcaagcttacacaagtcttacaaacttctttgggtgggcatgcaaagactctaatgtttgtgcaagtcaacccagatgtttcatcatacactgagactttaagtacactgaaatttgctgaacgtgtatctggtgtagaactaggtgctgcaaggaccaacaaggagggcaaagatgtcaaagaattaatggaccagctttcactgctcaaagataccattgcaaagaaggatgatgaaattgatcagctccaactagccaacagtagcaattccctactgaagtccacgaaacatggtgactccttgttgaagcattcggcctcttctccaggaatgacatccttaggaaaagtggcaagctttggtagcggggcagcttctgatcttgacaactgctctgacaccagtgataggcattccgaagctgggtccatgctctctactgacgaggcccgacagctgagccagaactcggctgatcctggtggtgattcagatggaaggctaagtgatatatcagatggcggtatacccgcgggtgcagaaactgacagttcagcgaacaacgttgtggaccaagaacaagacaaaacatccgctactggaaaagagcggttagccaaagcagtaagtcgagtccagaagctaacagtacccaaagtcggccaagcatcaagcttgaggcctaaaccaagagatccttctgctcctaaatcttcagtcacaccaggtgtgcgaaaaggtaccaccactcaagcaactccaccagcaaaagcaagcggcacttcaaaaagagtaccatagatcaagataatcatttggcgaagccgcttcccagccatttttctttttgcatagctttttcagatcttattgccatgtgtaacaccgatgccaattactgacttgtgcatctcaggtggataggttcttttcttttcattgtttgcaatgagggtgttaactgcatcagtatgtgatgttagcatgccatgagatatcattgctcaatgtgttagtacaaacagtgaaggaattcggattgatccattcatgttgatattgtggcgttcagcagtccctgtaatttcatgcaacaacgcagagtcgttcatcgtaaccaaaacctcaatattcaaaaatatataacctgttaatctgttttgttcttcagcaccttatc

SEQ ID NO: 50172 - DNA, 614 bp, Zea Mays
atatcaaatagtcaaggcagaagtctttcatctttaaaatcttcagccatgagcttgtggaggaacggtaacaatggtggcgctgatggaagcaatgcggggagcacggtattggacctgcaactacgcctcgcacaacccacagggaggatagaggttaacagtggcaatggtagtggctcgtcatcatctagctcatgtgtgtcatcagatatttcatcagtgctggtgctcggtggatgcaaacggtgttggaggtattgcatggtgagcaaggagctcccaatctgcatcaactgcaagcagccctgctttatcggcttcaacactgaagagaagcatggctagagcaagtgaagggaggctagcaagctagagcttattggacttggtctatttggttcaatagtaggctggctagtagagtctaagcttagtttcctatgtggagtaagttttgttcttttatggggtatggactaggtggttcttaatgttgtggtaataatgattgcagttgtcacagtgccctgattaataagtttttttccaagatttgcttgaaacatgttattttgaatttgaataaatacttgggttcttatgagtgaatt

SEQ ID NO: 50173 - DNA, 1897 bp, Zea Mays
cggccctgcgtgcgtgatgatagtagctggacagcagcagcagcagctatacatgccctcatgaatgaatcatcgaccaccccaacccaaccccctgccgcgcccgcacccagcgccccgagccctgctcccccatcgtcttcttccttgtccgtctccactaccgaccaacgggctgcctgctcacacttcgccactactgctgctgcgcgttggcgagcgcgcgtggttcacgagcgagctccaccacaagcccagtcgcgcacggcagccgttttgcttgttttgtttgctttccgcctcttccgtgcttcctcttttgggcggcctggctgggctagctagctgttctgttcattccgagttcccggcatagaacacgaggttggagttagaggcttaccgagggagcagacagcagaggacactataagagtagctagccctacccaatatcttcagccgtgcttgccaacttggagagagagagagagagagagagagagagagagagagagagagagagagagagagagagagagagagagagagagagagagagagagagagagagaagagaagagaagagaagagaagggagtgagtgatcgcaggaaggaggatcggagtgatgggagacgcagcagagaccaacaagactcttcacaactggatgggcgagccgaggccgaggtcgagcgaccagcgcgacgaggaggagacgcttcagctcagcctcggcctccccggaggaggagcaagtgcgggtggtggggtagcacccgccgcctggagaatgctgccggccagagacgaggagatgcgctctgctgctgctgtcgtcgacacctccctgctctctctcggctactccgccccagctttctcgccccgctcaccaggcaaggcaaaggggtccccagcagcagctacagagaatgcccttgcatccaccaacaacgcctcccagagaagatctccaaataccccggttattgggtggcctccagttcgtgccttcagaagaaatctggccacctctagcagagcatcccttgaacatcagaatgggaagaaggaagacaaacctgaacagaccacaaaaagagctccatttgtaaagatcaacatggacggcatccctattggtagaaaaatcgatctgagtgccctcggtagttacgatgagctgtctctgtctgtcgacaagctattccgggggcttcttgcagcacaacaagaccctctggctgccggcgcaaaggagtgttcacaggaagaggtggcgatatcgggtttactagatggaactggggagtacactctggtttatgaggattatgaaggcgatagggtgctggttggcgatgtcccctgggggatgtttgtttcttcggtgaagaggctgcgcgttctgaagacatctgacctctcttcatctctaacagcacctcctggccagaagaggacggtaactgagtgtccagtgtttacctcttagacacttccttgcagtgatgttggtgtgctgtgaagaagaaaacgtcttctgagcttgtatcatctttcttcgtggtttcttcctcttcttttccctactttctcttggaagggatcatcaaagaaccgaaccgaccttttgggttttcctgctcttgtttattttgtttctctttccgggaagcgatgtgaccttttgggttgtatgtaaatgttcagacgaaccagctctatgtttatgcagcctatcctgtctgttgccttttacacaccgaggacatgtactgtttgttgtggtcatgatggctgaaatcgacgatttttttcccgtcaacatgcatgaacaattctggtcatgttatccgtttggtgggggtttgcagcggggatcttgaag

SEQ ID NO: 50174 - DNA, 1070 bp, Zea Mays
caatgcatgtccattactcattcttttttatcctatggtcttgttctgcacaaagtcctttcgtttgttcctggtgcaaggcaaaggggtccccagcagcagctacagagaatgcccttgcatccaccaacaacgcctcccagagaagatctccaaataccccggttattgggtggcctccagttcgtgccttcagaagaaatctggccacctctagcagagcatcccttgaacatcagaatgggaagaaggaagacaaacctgaacagaccacaaaaagagctccatttgtaaagatcaacatggacggcatccctattggtagaaaaatcgatctgagtgccctcggtagttacgatgagctgtctctgtctgtcgacaagctattccgggggcttcttgcagcacaacaagaccctctggctgccggcgcaaaggagtgttcacaggaagaggtggcgatatcgggtttactagatggaactggggagtacactctggtttatgaggattatgaaggcgatagggtgctggttggcgatgtcccctgggggatgtttgtttcttcggtgaagaggctgcgcgttctgaagacatctgacctctcttcatctctaacagcacctcctggccagaagaggacggtaactgagtgtccagtgtttacctcttagacacttccttgcagtgatgttggtgtgctgtgaagaagaaaacgtcttctgagcttgtatcatctttcttcgtggtttcttcctcttcttttccctactttctcttggaagggatcatcaaagaaccgaaccgaccttttgggttttcctgctcttgtttattttgtttctctttccgggaagcgatgtgaccttttgggttgtatgtaaatgttcagacgaaccagctctatgtttatgcagcctatcctgtctgttgccttttacacaccgaggacatgtactgtttgttgtggtcatgatggctgaaatcgacgatttttttcccgtcaacatgcatgaacaattctggtcatgttatccgtttggtgggggtttgcagcggggatcttgaag

SEQ ID NO: 50175 - DNA, 948 bp, Zea Mays
gtcctgttcaaaattttatgcccccaatctccaaataccccggttattgggtggcctccagttcgtgccttcagaagaaatctggccacctctagcagagcatcccttgaacatcagaatgggaagaaggaagacaaacctgaacagaccacaaaaagagctccatttgtaaagatcaacatggacggcatccctattggtagaaaaatcgatctgagtgccctcggtagttacgatgagctgtctctgtctgtcgacaagctattccgggggcttcttgcagcacaacaagaccctctggctgccggcgcaaaggagtgttcacaggaagaggtggcgatatcgggtttactagatggaactggggagtacactctggtttatgaggattatgaaggcgatagggtgctggttggcgatgtcccctgggggatgtttgtttcttcggtgaagaggctgcgcgttctgaagacatctgacctctcttcatctctaacagcacctcctggccagaagaggacggtaactgagtgtccagtgtttacctcttagacacttccttgcagtgatgttggtgtgctgtgaagaagaaaacgtcttctgagcttgtatcatctttcttcgtggtttcttcctcttcttttccctactttctcttggaagggatcatcaaagaaccgaaccgaccttttgggttttcctgctcttgtttattttgtttctctttccgggaagcgatgtgaccttttgggttgtatgtaaatgttcagacgaaccagctctatgtttatgcagcctatcctgtctgttgccttttacacaccgaggacatgtactgtttgttgtggtcatgatggctgaaatcgacgatttttttcccgtcaacatgcatgaacaattctggtcatgttatccgtttggtgggggtttgcagcggggatcttgaag

SEQ ID NO: 50176 - DNA, 2319 bp, Zea Mays
aggaagttgaataagtagagggagactggtattgcagccaagaagcaagaaaagggatgcaaaagtaaccacctactatttgtccgcccaacaaatacaagcgtgaagtatggagaagacgttgaatatatcataaagagcataagaaaaacatgcagaataatcatccatctattctttaaaagaaattatgtaaaatataattaaatgttgccattttaacttagaataccgaatacagatgctagatacacaagttacagaagtcgttaaaaagttgcgcccttcacagtttcaaagagaaaaacaaaatatgcaacatttaagcagcgaacgagcataactttatgcataaactacccgcatgagtagcgtccaaccaagctccttaagacgagtatttctgtctatcccaagcatggcacacatagcaacatcagctgcagtgcccttcctacgttttcccgtatacaatgaagagatttagcatcttatagctttcctcctctcagcgccaaaagcatccttcaacaacagcacgagaggtttctcttgatcgggttgaggatgccactcaagaattactttctcttcttcaatggtctcacgaatatgctgatacatgttcatggctatcctggaatggaaatcacagccagctatgaaagcatctaacatgcttttgcaatcagcaggatgcaccaagatcccgagttccagctgcacgtaaaacaagtttgtctttttacttgaaacaaaatcgcttgatgattcactttggctgctagatttgatacaaccaattgtaacttttctctggttcttgagccagcaacatgaccaaccttggcaaccttgctaaaagcaccattcagaccgagagttccagcagacagatacctgaacgacttgcggggaggcttctgctggtatttgctgagtctctctagtgcagaagtacaagtacagaaccatcccaattaccacgattaggatcccaagtatgtttctccagctaaataggtcgtgaagcaggacatagccaaaggtgaggaccaagcatgttttcagatggccaagtactttgtaggttacaggagacgtcttcccgatcacgagaaaagtgctgaagttcaccgagactgaaatcaggcacgacagcatgatgaaaaactgcagatgcaacaaatgcagacccatgatcagatggagcgatatcgacagttaacacaaaatccccaaagcctggtttaatgcttaccagaacttgagttgtgtagtcgaaagcaaagacattttggttagtcaaaaatccatcgaggaatggaccgacaaggaacaacgtcaatgcccggtatgggcatgactagtacaggagctgtgttgaagataccttaaacttcttctgtattgtatttcaacgggatataattggcccgtgcgttgcaacgggagataacaaaatttcaaagcgatatgtacattgccatataacaatatctgaaataatagcaattctctttaggcatgtgagaacaaataatgtagtatttcttttcatatgtcaggagaaggcttgtatttatttttttaaaaatgtctacatatacatattatcgaacaaaatggacaacttgcatggaccacggttccgatggatactcatcctatttcattgggactgtgctggttgtctgaagcactatgtgtcacattttcgagttcatctgcatgtctatcaaattgctttgattctgctatttgtctgatgatgtgtaggcggcagcagagaaacaaattcagattggtcaaagaaatcaccggtctgtttcacaaactacgataacatctcaagtgacaaaagtgacaattctatcacacatatcaactacggttatagaaatctgtacagcaagggggcagcggcttggtagaggcatcagtcccgctcccctttgcttgcaccgccccattagaaccacctcatgcgcctccagcctccatgtacgttgttcctctttggagttcccagcctctagatcaaagtagaagcaccaaggctaagcagcaagcgattacaggaacaaaccaaccagcatgggaaatcatgggcctccagcatgggaacagatggtgtgtgcaactaccaccagccacaccacaccaactttatctgtgcttgtgctggctagattagagcatcatatgtcatgattaacccaattatctagtcctcccaacttcttagcgattaaataacagtggtttggaaggagatgcctatctttttgcctcctatatataatacaagaaaataac

SEQ ID NO: 50177 - DNA, 951 bp, Zea Mays
gaaagcaccttcttgccgccataatctaccttatccttcctaatccgctgggataactctctttttcttggccggagagacggagttcataagtaataaaatagcacaagaaatgaagaaatattaatgtactaatctatcaagatcacatggagtaagggcaactatcactcgctctccggccgtgagttcacaaaatttctccgactaaacaagacgcttatccaaccacttggatagctctccctttttctcctatatatatccacataagctgcgtccctttgatgtcaaaacattgaatggcagagccttacaacttagcacctcatggagtaccctcgtgtcacaaggagatttgcaataaaccagcatcttcgagcacgttgcatctggacgccgagggtcccctgtatgagttatcctcgctgctagatgagcttccaatcaggaaagggctgtccaattactaccaagggaaggcccaatcattcacgtctatatctgatgctacaagtgttcaagaccttgcaaagaaagtttcatacagtaagaggatgagagcaagcaaaagctattcagtaggattagacatgaaccaacggacaatcattgtatcaaggccgtgcaacaagatgatagcaaagaggccctcaaatggttcatttgctagagtaatgccaggaactagcaacaccagcaatttgaacatcagcactaaatcatatgcccaccagaacaagagagttgcaacacatattgatctgtaacaaagggaaaactagggtgacaagcctccactttccattgacgagctgtgcttcgtgtgtgctttatgcatgaaaatctgaacaatatttgtttctacaatcaacctgatttcttatgtgcttcatttcatgataaataaaaagatcgatcaatcaaatggatgtaatgagtaacggtgag

SEQ ID NO: 50178 - DNA, 1604 bp, Zea Mays
ctcggatgttcaataaaaatttctatttctcgatcgtgcctatctctgtttatcaggctttctcttggaagttcaccgaattcagagttaattgatcgcgagaaacaaccatttttggagcgtgttaaaacttttatcctcggcacggatgcaaactcaaaaatcattctcgaattataaatctcatctgaagctcatttaatcaaactctcgacaactgttaattgatctgagcccgagtctaatttttcgaaccttgatctatgttcgactattttatccgggtccgtattctccgacggaatactcagtatgtcgtcctctaatcaattttatccgactcggccaaatatctcaagtccgaactgaattcaaaaccccgtattgctagcaattttaaaatgtcacgatttgccttctccaactaaaaatccaaagccgatcaaatctcaggacggtttattttcgaatcacgcgtagggaattattttcgagcgaaatctaattagactctcggccgaattaattgctcaaccgtccgttcgccgaaatctatttcgctctgttctgtgtacagacaaattccgcaggaacattttattccggaaaatgtttagcgcaacccaataacgtgtttgggccagcccaacccagcccactaaggaaaccctaaccctagctcatgcctataaatacgaatccccctcacttgcatttgggaaattttcattcccacccctagccgccaccaacagcctcctcttcctccccacgctctccttcatccttctgccgtgcagcacctctgctcccctttccatggtgcctagcaggaactccatggccagccgcccctcttctgctcggccaactctgggtaagcggcgccatgggtgcaacttctcctcagtctgtgatccgaccagcggtcacggcgtctgagttccctgcgagctcttctctgcccctgcgttatccatggctgcgagctctccctggcgcaccttacctctggccggcaacctgcacagcatccccctccccaggctcctagcgcagggcatttctctaggtccgagctcgagcaggtgagctcgccccatggcctgggctccttgttcgcttcctgcacgtacgctccctctcccatatggcttcctgcccttctcaagtccggccatccccaccttgccgtggattccctcgagcagtcccatctggccgccatcctcccagatcgagtttccccttttttttgtgcagctcaccatctccccctgcgcgcgctggctagatgccattcgagctccggtctgcaactccctctcgctgcttaccttgaacgccggagctccaaggccgcacccccgtccccatggctgaccagcaaacttcgatggtcgagccctctaacacttccctctcccatggcgtggctgccccatggatgaagccccagtttaccagcatcctctctgctctatggccgagggcccatttccctagcaccctcctcgcatgggcaggctgcaggtgcccgacaaaatgcccgtgagaggcttggtgttggggacagccccgcccacgacgtcgtcgaccctcgg

SEQ ID NO: 50179 - DNA, 896 bp, Zea Mays
taaaaactcgattcgaatcgtctgcttctcgcagctaatgagactgcttgatccatgctgctacattgagtaacaagtggaattgtgatgagatgatataagatgttgattgctaaaaatgtttgctactatgtatgaatagatagtacatctttagccttaagagagtcacacttaatttgagaaagttaaaaacttgatttagaaactcagctagtgcttttggcaaccaaaccccacagccaaacagctgcatgtctagaggtagaggagtagactcctcacaccaggtaagtctagctgagtattagtatactcagccttgcttgtggcataatttttgcaggtactccttaggatgattggttgatggtgtgacttggccttcatccctgccaccgggatagatggtcgagtgggttactgcttccgcaggagaggaccaggaggagtagcgtggccaggcttcgccatgttactcgggtttctccgttagttatttccgctgcattaaaatttatggtaattatttctaaaactccgataatgtaatcactaattatacttattaaatttgtggtattatgttttattgtatttctctgtgcctcaccttcgagtgagctagtggtattcgatcctggtaagtggctttatcggactagatccgagggactgacgagttattcctgtttaagtgcgttgctgcccttaagggtgcgacttgggcacttaagctggaataattcgggcggttccgccacacccagtgccatgcgggacttcatgaccgcatgcgactactgcctttccgactgtttcgacggtagccgcagcctcggcgacgaggactgcggcccaagtcgtgaatgtttccacgtcgatctagggggtcc

SEQ ID NO: 50180 - DNA, 1423 bp, Zea Mays
atggccgtccggccggcagtgagggtggcggcgaggctctcttcttcgcgttggtggcgcgctccgcagcaggccggcaagccatccctcgtgcggctgcgtggagttgactgggtggctgctgcggctgtggcggcgccggcgggtgcccgcgcaagtgcaggggacggcggctggggtcgctggcccgtggcccaggcggtcggatccggtgctcgggggccagatctggaccctgtcgaccggatctacctcaacaactggcagttggtgcggtggtggccggtggcggttgcggtggcggcagttggttggggcttgtgcagggcggcggaggtagcttgcttttgtcctggagcctcgcttggcattgtgctggggttttcttgggcgaaagccttggcgacggcgacgcccctgggcgccgcttcccctgttgagggcgtcgtgcttcccagcactgtcttacatgggcgaaagccccgttcatttcggaccggcgacggtggcgtcctcgacgtcactcccttcctgaaggcgtcgctactgctggcgggggtaggacagaggatcaaagttttggaagtctcgctggtgaagaatcggagctgtctcgagtggggtgtctcgtgcttggcaacgacgacgcgccgcattcttcctcctcttgggccgatgtttgtagtcgtcgtcgtttttcatttagccttgtgctgcctatcttgggaagtcggagctgctcgtcacctttgttgagctcggcaacgatgactcaggatgtgtattgtgtggggggttgctgttgtctggattgtttgtatgccctgtgtaggttttgggtccggtttcccttaaaactggatcaattcctttcttcttaattgagaggcagagctcctgccattacgttcaagaaacaagggatggtgaggtagaggatgagataggataactgttgttgacagcctaagggcatgtataacctaaatactatgttacggttctctagacacactatatatacctaagaaactcgtttatatatcctaatgtattttttaagcgttgtatcgtagtcactcaaacccctcaaagcaaagctcatttatatgggttgtatgagtagagccgtatattatacttaccatactagagacgtttcttcattaacatatgtatcttgtgggttttttttacactttactctttatatactctttaagatacgagtcatttatgtgagttgaacatgcaaattcttaaatgaagaaaaagactttggatacagatcacaacttcagccaacgtcaagttctaaagtcaaaacaaatgggaattgcagtgttttaacagcttctggttacctgtcacatttgtctagcagccaaaaaaaaagaagatccgctctagaaagaaaaaaaag

SEQ ID NO: 50181 - DNA, 1676 bp, Zea Mays
acgtgcacgggggcaatagctctgttgatctagcccctcacgggcactgtgcgggggtatttataggtgtctgagtgcccagcgtcttgtcttaaggacgcatgtgccctcagacgcctagtttatccccggaatattcccataaagcagggttacaagctgtaattacaagtatgcctttacaagtcaggcccgtaatacagaggcggccacgcggggcccgttacaatgggccagatcacacgtgggccttggggctgaatgaggccgcgccgtgtgaggacgtcgccgcaggtcttcgtcaaagtgtcgagtcctgcgaagggtgtccctgcccgctttgcctccgtcggaccagcggctgcagcgaaggcctggagcgaagggtggcgtctttgccttcgccccaacacctgcggccgacgcgacgcggcagcctaccgggcggacggatccgcggacgaacggatctccggcgcctgacagatcttcggcgcgcggcctactgggtggacggatctccggtgcctggtatatcctcggcgtcgtggcttgcttcttcaccggcgccgcggcctgattctttgacggcacggcggcctgccggtcttctccaggcgggtggatcttcaccagcgcggcagcctgcttcttcaccggcgcggcggcctgcttcttcgacgacgcggaggccggcggcggacgcgacgcggcagcctaccgggcggacggatccgcggacgaacggatctccggcgcctgacagatcttcggcgcgcggcctactgggtggacggatctccggtgcctggtatatcctcggcgtcgcggcttgcttcttcaccggcgccgcggcctgattctttgacggcacggcggcctgccggtcttctccaggcgggtggatcttcaccagcgcggcatcctgcttcttcaccggcgcggcggcctgcttcttcgacgacgcggaggcctgcggcggacgcgacgcggcagcctaccgggcggacggatccgcggacgaacggatctccggcgcctgacagatcttcggcgcgcggcctaccgggtggacggatctccggtgcctggcgggcagatgcggcagcctgtcggtcttctccaggcgggtggatcttcaccagcgtggaggcctgcttcttcaccggcgcggcggcctacttcttcaccggcacagcagcctcttcttcaccggcgcggcggcctgcggcggacgcgacgcggcgacctaccgggcggacggatccgcggtcggtcttcagctgctccgtgcctctgctgctccgtggcctgagctccgggtggacggatccgcgtcggcctccagcggctccgctgcctctgttactccgtgtctccagcggctccgtgcctctgctgctcggcggcctgagctccaaccgtctcgcgctgtccttgcctctagcggcctgagctctggtcgtctcgcgctgaattttagctgaatttggtgaaataactgaagcgctcggtttgctgaaataactgaagtcacttgctgaaataactgaatttgctgaaataactgaaagtgctcagtttgctgttgcttgtgctcggtgtgcagacttgaaatgaaacttgctgttgcttgtgctcgcagactttaactgaaacttgttgtcgcttgctcc

SEQ ID NO: 50182 - DNA, 1555 bp, Zea Mays
acgtgcacgggggcaatagctctgttgatctagcccctcacgggcactgtgcgggggtatttataggtgtctgagtgcccagcgtcttgtcttaaggacgcatgtgccctcagacgcctagtttatccccggaatattcccataaagcagggttacaagctgtaattacaagtatgcctttacaagtcaggcccgtaatacagaggcggccacgcggggcccgttacaatgggccagatcacacgtgggccttggggctgaatgaggccgcgccgtgtgaggacgtcgccgcaggtcttcgtcaaagtgtcgagtcctgcgaagggtgtccctgcccgctttgcctccgtcggaccagcggctgcagcgaaggcctggagcgaagggtggcgtctttgccttcgccccaacacctgcggccgacgcgacgcggcagcctaccgggcggacggatccgcggacgaacggatctccggcgcctgacagatcttcggcgcgcggcctactgggtggacggatctccggtgcctggcgggtggatcttcaccagcgcggcagcctgcttcttcaccggcgcggcggcctgcttcttcgacgacgcggaggccggcggcggacgcgacgcggcagcctaccgggcggacggatccgcggacgaacggatctccggcgcctgacagatcttcggcgcgcggcctactgggtggacggatctccggtgcctggtatatcctcggcgtcgcggcttgcttcttcaccggcgccgcggcctgattctttgacggcacggcggcctgccggtcttctccaggcgggtggatcttcaccagcgcggcatcctgcttcttcaccggcgcggcggcctgcttcttcgacgacgcggaggcctgcggcggacgcgacgcggcagcctaccgggcggacggatccgcggacgaacggatctccggcgcctgacagatcttcggcgcgcggcctaccgggtggacggatctccggtgcctggcgggtggatcttcaccagcgtggaggcctgcttcttcaccggcgcggcggcctacttcttcaccggcacagcagcctcttcttcaccggcgcggcggcctgcggcggacgcgacgcggcgacctaccgggcggacggatccgcggtcggtcttcagctgctccgtgcctctgctgctccgtggcctgagctccgggtggacggatccgcgtcggcctccagcggctccgctgcctctgttactccgtgtctccagcggctccgtgcctctgctgctcggcggcctgagctccaaccgtctcgcgctgtccttgcctctagcggcctgagctctggtcgtctcgcgctgaattttagctgaatttggtgaaataactgaagcgctcggtttgctgaaataactgaagtcacttgctgaaataactgaatttgctgaaataactgaaagtgctcagtttgctgttgcttgtgctcggtgtgcagacttgaaatgaaacttgctgttgcttgtgctcgcagactttaactgaaacttgttgtcgcttgctcc

SEQ ID NO: 50183 - DNA, 1600 bp, Zea Mays
gtgctagggtttcccccgtcttatcgcttcctcgttcccgcagccgccgcccaaaccctagcaaacccgtcctccgccatggccgacgaccactactcgtccaagcggaagtacgacgacccctcgccgccgccgcggcgcacggggttctcttctggcccgccgcctgcctcgccgcccgctggcggcgccccgtcgtacaacagcgttgcgccgccccccgatgagatccagctcgcgaagcagcgtgcgcaggagatcgcggcgcggatctttaacgccgcagaggccaagcgccctcgcgtcgacaacggcgacgatgacgtcggcggcttcggtggaggaagttccctgggtggcagcggtggtggtggtggtggccgcatcgggggcgcaggacttggcttctcgtcctctgccggtggtgggcatggggcttctatcccaccgttatcttctcagagcagtgcaccacagtactcatatggtggacatcagggtacaagcaaaaagattgaaattccaaatggaagggagcaaagattcaagttacgagagaccatgaagctgaacctggtgcactgacaaggcaagttgagctttctggcaatcctgagcagataagcaaagctgaacagttgatcaaagaagttatagcagaggctgatgctgggtcatccggtgctgtatctggtggccggaaatacaatgcaccacagccaggcgctgagacattccagatgaaaattgctaataataaggtgggattgattattgggaagggtggtgagaccataaagtctatgcaggccaaatctggagcccgcattcaggttattcctttgcatctgcctgctggtgatacttcaactgaaagaactgtgcatattgatggcactcaagaacaaattgaacatgcaaagcagctggtggctgaggttaccagtgaggtctgctttctttctcttgttgtgtctgatatctgtgattgctttgctctcttgtgctttaacctgtcatttaggttgcttctggttcgttctgtttattatattgttttatgattttcccctgttctttttgaaaatcttgtttcttttgcttctttgccgccgtacattgattatactgctgtgctaaccaatgtctgaaacatattgttcgtgggtacagccacaacatgcaaggagattgttatacgacttattccctttttctgaacatagcttattaatagttttgggcaaggttttcatgacttaagtattatataataaagcgaagagttgtatttgtaaactaacttgttctttatcaattagccactaccgtaggcctgttaaatggtattccatagaatctgcagctaaagttttgacaagtcttgatttgaaattcatatgattgttcacgtcatatggaatatggatgatactcttgggcaaagaccaatgagtccttgttgctcagtggttattgtttattcatttctccacaaagagccaattagtgtcaatagcttgccaggaggactgcaaactatcctggagagcaggtttgttactgtttaatgtcaatgtcctactggatagaacaatgt

SEQ ID NO: 50184 - DNA, 1617 bp, Zea Mays
atcgacaccttgaagcgtgctagggtttcccccgtcttatcgcttcctcgttcccgcagccgccgcccaaaccctagcaaacccgtcctccgccatggccgacgaccactactcgtccaagcggaagtacgacgacccctcgccgccgccgcggcgcacggggttctcttctggcccgccgcctgcctcgccgcccgctggcggcgccccgtcgtacaacagcgttgcgccgccccccgatgagatccagctcgcgaagcagcgtgcgcaggagatcgcggcgcggatctttaacgccgcagaggccaagcgccctcgcgtcgacaacggcgacgatgacgtcggcggcttcggtggaggaagttccctgggtggcagcggtggtgggcatggggcttctatcccaccgttatcttctcagagcagtgcaccacagtactcatatggtggacatcagggtacaagcaaaaagattgaaattccaaatggaagggttggtgttattattggaaaagctggggaaactattaggtatatccaacttcaatcaggagcaaagattcaagttacgagagaccatgaagctgaacctggtgcactgacaaggcaagttgagctttctggcaatcctgagcagataagcaaagctgaacagttgatcaaagaagttatagcagaggctgatgctgggtcatccggtgctgtatctggtggccggaaatacaatgcaccacagccaggcgctgagacattccagatgaaaattgctaataataaggtgggattgattattgggaagggtggtgagaccataaagtctatgcaggccaaatctggagcccgcattcaggttattcctttgcatctgcctgctggtgatacttcaactgaaagaactgtgcatattgatggcactcaagaacaaattgaacatgcaaagcagctggtggctgaggttaccagtgaggtctgctttctttctcttgttgtgtctgatatctgtgattgctttgctctcttgtgctttaacctgtcatttaggttgcttctggttcgttctgtttattatattgttttatgattttcccctgttctttttgaaaatcttgtttcttttgcttctttgccgccgtacattgattatactgctgtgctaaccaatgtctgaaacatattgttcgtgggtacagccacaacatgcaaggagattgttatacgacttattccctttttctgaacatagcttattaatagttttgggcaaggttttcatgacttaagtattatataataaagcgaagagttgtatttgtaaactaacttgttctttatcaattagccactaccgtaggcctgttaaatggtattccatagaatctgcagctaaagttttgacaagtcttgatttgaaattcatatgattgttcacgtcatatggaatatggatgatactcttgggcaaagaccaatgagtccttgttgctcagtggttattgtttattcatttctccacaaagagccaattagtgtcaatagcttgccaggaggactgcaaactatcctggagagcaggtttgttactgtttaatgtcaatgtcctactggatagaacaatgt

SEQ ID NO: 50185 - DNA, 1802 bp, Zea Mays
gtaatctagctgatttttatatatcctgtcatttagcaatgaattgaatattttagatggtagtgaaagcacctttctatatcacatacatctctagacatctattggaactctattccacggcattgctattcaacatatgtatatgtatatgttcgtctagtccaatcttcattagccccatagttttgcacatgggcaacgctagatgggcatcactagcctgacgattttgatcgaatcgtgccaggaatccaatgtctggtggctattctcagcagggctatcaccctcctcgtcctcagtcaaactggggcccgccttctgcgccaccccagcagtctggttatggttatatgcagcctggggcttatcctggggcaccgccacagtatggtgcacctcagcaaccttatggtagctatcccccaacatctggtggctatcagactgggtgggatcagtctcaaaaccagcaatctcatacaactccccctggtactgggtatgattattatagccagcagcagcaacctcaacaacaacaatctgcccctgggactgctgcttctactgatgccactagctacaattatggccagccttcaacatatgcttcacaaggatatgattctacctatactcagcatagtggtgggcagcaagcatatggacatgatggctactctggttaccagacccaaggccagcagcagggctactctcagcagactggttatgaccagcagggatatggtgcatctgcttatggatcagctgcgaactcgacccaggatgggtccagctatggtggtcctggtggggccacccaggcatctccggggcagcaaacttcaaccccagctgctggaagccaccctggctatgccagtcaaccgcctactagtgctgcagcaagctatccagttcaaggttcagctccatctggatatggtgctccaccaccccagcctggctatggcacccaacctccacagcaaggtggatatggtccgggcgcttatgggcagccttctccacacggcgagaaacctcctgcatcttcaccttatggacaagctccgcctcctggatctgctcagggtggttatgtgcagtatggttacagccaacctgcatacggtgcaccaccagcttaccctggtgcacccactgcaagccacccgggctatggccaacagcagtcttatggcgatgcttatggtagtggaagctatgggcagcctacagcctacactactgaagcagcagctcctgctgcatcccaggatcactctgccgcacctgccgcggcccctggaacaacagctgcgccagctcctgacaacaatgggggtgccaaaacttctgcggaaacttgatcttcaacagctaattgggaacaaactttttacaagcctctgttgtgtcgtttcctccactgttgcttaatattacacatctagtttaggctccacatctacaggttatatctttctgcctgttgttttgaccccatgaatcgctctttccgtgctgttgattagtactttgttgtttttttattgctggttagatgtttggactggtgatatatgtgtttgtgcggttactcttgttggactctaatgggtacctaccggcttggtctggacatatactgtcctatatttgtttttagcctccttttacattggttattatgtgtgctgtacaactgtcggacgtttccataagctggtgatagttatggatgaaaatttggtttcaatattgtctaagatgatcataaaaggtttaag

SEQ ID NO: 50186 - DNA, 713 bp, Zea Mays
cgcacacggctcatataaaatgccggagccgtctgcgcattggactcaaagcgaacctcgccgccgcctcttccgtctctctcatctccgtcctcctgcaatctcacccctccctctaaacccgcaggccgcagtagcgccgctacggtttgctcaggattcgaaccccaccttctgattgctccgaatccgaggcggcggttgcgcagaagtttgcggcatggcggggtacccggaggacaaccagcacgcgttgaacgggtacgacgatgaggaggtcgacgaggaggggcaccccgggcggcggggaggtcgggatggggcgtctgggtacggcgatgctggcggagaggatgtgaggggggcgggcggcgactcatcggggaagatttttgtcggaggcgttgcttgggagacaactgaagaatcattctccaagcattttgagaagtatggggcaataactgattctgtaattatgaaggacaagcatactaagatgcctcgtggatttggattcgttacattttctgatccatctgttatagacaaggttttggaggatgaacacgttatagatggcagaacggtggaagtcaagaggacagttccgagggaagagatgaataccaaagatggccctaagacaagaaagatcttcatcggtgggctacctgcatctcttactgaagttattttttttgtatggtttc

SEQ ID NO: 50187 - DNA, 1950 bp, Zea Mays
cgcacacggctcatataaaatgccggagccgtctgcgcattggactcaaagcgaacctcgccgccgcctcttccgtctctctcatctccgtcctcctgcaatctcacccctccctctaaacccgcaggccgcagtagcgccgctacggtttgctcaggattcgaaccccaccttctgattgctccgaatccgaggcggcggttgcgcagaagtttgcggcatggcggggtacccggaggacaaccagcacgcgttgaacgggtacgacgatgaggaggtcgacgaggaggggcaccccgggcggcggggaggtcgggatggggcgtctgggtacggcgatgctggcggagaggatgtgaggggggcgggcggcgactcatcggggaagatttttgtcggaggcgttgcttgggagacaactgaagaatcattctccaagcattttgagaagtatggggcaataactgattctgtaattatgaaggacaagcatactaagatgcctcgtggatttggattcgttacattttctgatccatctgttatagacaaggttttggaggatgaacacgttatagatggcagaacggtggaagtcaagaggacagttccgagggaagagatgaataccaaagatggccctaagacaagaaagatcttcatcggtgggctacctgcatctcttactgaagatgagttgaaggatcacttttcattgtatggtaaggtgcttgaacatcagataatgcttgatcatagcactgggcgttctagagggtttggttttgtcacttttgaaagtgaagattctgttgaaagagtcatatcagaggggagaatgcgtgatcttggtgggaagcaggttgaaataaagaaggctgaaccaaagaaacatggatctgataacatcggtaatgggagatcaagccaagggggtggaggttaccgcagtacttaccgtggtggtggtggagctggtagtggcagcagcggcagcggtgggggtggttatgggtttggtgatgcttatcgatctgctgcagcgagttatggatatgatggtggcgcaggagcaggatatggctatggtagagggtatggctatggaggcaatgctggctttgcgtctggttttggtggtgggtatggtggatccatgtatggaggcgcatatggtgcatatggggcatacggtggtggtgcttatggaggtggtggttatggcactggtggatacggcagttatggtggagcaggtggtactggtggtgggagtacaggtgctcggggttcaagtaggtaccatccatatggaaaataagctacaagttcaatcaagttttctcggtgtcgggagtttctctggtcctcctagttcagttttcatgccatgtccacctaaacaggggcattggagcatagttgggttgaacacgtcaccaccggaacaattgtgtaactgcagctgttgagcctgcccgcctgccttcgcttgctgtacaagctacacatgaaacctgtgttgtattctttagttcggtatgcagagtttagaaccctgagaaacaagcattttatggtagggacagtatttggtccggtagaactatattctgtgctgtaacttgctgttgcaagttttaactgctgtccttgtccgtccggttgcacagaaatcgaaagggattaaaggagatcaaatccctttctatttaattttaactaggaagggatttaaggcctgtttggttcgctgcctaatttatcacattttactacacttgtgtctaagtttagtttttcaattcgaataattaatcttagacaaagtgtgacatagttagacacaaaccaaacaggcccttaatgtccctcagtcacttcgcaaccgaataatccaggtacatcttacgactattgctttacattcggcaaacgaattgaaatgaa

SEQ ID NO: 50188 - DNA, 1881 bp, Zea Mays
cgcacacggctcatataaaatgccggagccgtctgcgcattggactcaaagcgaacctcgccgccgcctcttccgtctctctcatctccgtcctcctgcaatctcacccctccctctaaacccgcaggccgcagtagcgccgctacggtttgctcaggattcgaaccccaccttctgattgctccgaatccgaggcggcggttgcgcagaagtttgcggcatggcggggtacccggaggacaaccagcacgcgttgaacgggaagatttttgtcggaggcgttgcttgggagacaactgaagaatcattctccaagcattttgagaagtatggggcaataactgattctgtaattatgaaggacaagcatactaagatgcctcgtggatttggattcgttacattttctgatccatctgttatagacaaggttttggaggatgaacacgttatagatggcagaacggtggaagtcaagaggacagttccgagggaagagatgaataccaaagatggccctaagacaagaaagatcttcatcggtgggctacctgcatctcttactgaagatgagttgaaggatcacttttcattgtatggtaaggtgcttgaacatcagataatgcttgatcatagcactgggcgttctagagggtttggttttgtcacttttgaaagtgaagattctgttgaaagagtcatatcagaggggagaatgcgtgatcttggtgggaagcaggttgaaataaagaaggctgaaccaaagaaacatggatctgataacatcggtaatgggagatcaagccaagggggtggaggttaccgcagtacttaccgtggtggtggtggagctggtagtggcagcagcggcagcggtgggggtggttatgggtttggtgatgcttatcgatctgctgcagcgagttatggatatgatggtggcgcaggagcaggatatggctatggtagagggtatggctatggaggcaatgctggctttgcgtctggttttggtggtgggtatggtggatccatgtatggaggcgcatatggtgcatatggggcatacggtggtggtgcttatggaggtggtgcctatggaggtggtgcatatggaggcagcgcctatggtggcgccccaggtggtggttatggcactggtggatacggcagttatggtggagcaggtggtactggtggtgggagtacaggtgctcggggttcaagtaggtaccatccatatggaaaataagctacaagttcaatcaagttttctcggtgtcgggagtttctctggtcctcctagttcagttttcatgccatgtccacctaaacaggggcattggagcatagttgggttgaacacgtcaccaccggaacaattgtgtaactgcagctgttgagcctgcccgcctgccttcgcttgctgtacaagctacacatgaaacctgtgttgtattctttagttcggtatgcagagtttagaaccctgagaaacaagcattttatggtagggacagtatttggtccggtagaactatattctgtgctgtaacttgctgttgcaagttttaactgctgtccttgtccgtccggttgcacagaaatcgaaagggattaaaggagatcaaatccctttctatttaattttaactaggaagggatttaaggcctgtttggttcgctgcctaatttatcacattttactacacttgtgtctaagtttagtttttcaattcgaataattaatcttagacaaagtgtgacatagttagacacaaaccaaacaggcccttaatgtccctcagtcacttcgcaaccgaataatccaggtacatcttacgactattgctttacattcggcaaacgaattgaaatgaa

SEQ ID NO: 50189 - DNA, 913 bp, Zea Mays
cggaaagtattttccttgtttttaatcaagtttgtgaatttttgtatcttctgtttggaatttgtgaatgatatacctgcgtgactagtcataaaaactatggtatgattgatgatgcacttgatagatacatgtttctttgcatgttctgtgcttctgagcatatttttggtgcttatcatttcaaatttgttttcactataatactgggaaatgtgggataaagtaaaaactgtgaacccctgcatcatgcccagatttgcttttactcgttgtactgcctttgtaatttgtattggtttatatatcccacttggtttttattgaggatacacaagcaaggaaatctgttccatcttttccaatggttgttactcggttttgttctattagtgaaccatttctcccataatccatattaaattgtaaaattataacatttctgttctgtgtggtcaagtgcattgtgcttatggggggtgacatttggggtgaaaacccctccaacggttcccctctacagcccactccatacgggggagagaggcagctccccccatatatggggtgagttccaatctcccccacacttcaattacatcattactttgtgatattaactctttttaagtaccttaatctgaaaacaatgtgtattatctatactactctattaagaacctaatgtgggcacctagtgctaccatgacttcaccctccgcgttgacactctaggcctgccccacgcgccccgccttggcgccgtgccctgtgggtccacgtccagcgcccgcgcatcactctctcggctactgccctgtggacccccagcgcccgcgcaaccagctactgcgcccgcctagcacccgacttcgcccgcgcaactaccacaccatgcaaaaacagttcagag

SEQ ID NO: 50190 - DNA, 1708 bp, Zea Mays
atttctgttctgtgtggtcaagtgcattgtgcttatggggggtgacatttggggtgaaaacccctccaacggttcccctctacagcccactccatacgggggagagaggcagctccccccatatatgggaatcattctccaagcattttgagaagtatggggcaataactgattctgtaattatgaaggacaagcatactaagatgcctcgtggatttggattcgttacattttctgatccatctgttatagacaaggttttggaggatgaacacgttatagatggcagaacggtggaagtcaagaggacagttccgagggaagagatgaataccaaagatggccctaagacaagaaagatcttcatcggtgggctacctgcatctcttactgaagatgagttgaaggatcacttttcattgtatggtaaggtgcttgaacatcagataatgcttgatcatagcactgggcgttctagagggtttggttttgtcacttttgaaagtgaagattctgttgaaagagtcatatcagaggggagaatgcgtgatcttggtgggaagcaggttgaaataaagaaggctgaaccaaagaaacatggatctgataacatcggtaatgggagatcaagccaagggggtggaggttaccgcagtacttaccgtggtggtggtggagctggtagtggcagcagcggcagcggtgggggtggttatgggtttggtgatgcttatcgatctgctgcagcgagttatggatatgatggtggcgcaggagcaggatatggctatggtagagggtatggctatggaggcaatgctggctttgcgtctggttttggtggtgggtatggtggatccatgtatggaggcgcatatggtgcatatggggcatacggtggtggtgcttatggaggtggtgcctatggaggtggtgcatatggaggcagcgcctatggtggcgccccaggtggtggttatggcactggtggatacggcagttatggtggagcaggtggtactggtggtgggagtacaggtgctcggggttcaagtaggtaccatccatatggaaaataagctacaagttcaatcaagttttctcggtgtcgggagtttctctggtcctcctagttcagttttcatgccatgtccacctaaacaggggcattggagcatagttgggttgaacacgtcaccaccggaacaattgtgtaactgcagctgttgagcctgcccgcctgccttcgcttgctgtacaagctacacatgaaacctgtgttgtattctttagttcggtatgcagagtttagaaccctgagaaacaagcattttatggtagggacagtatttggtccggtagaactatattctgtgctgtaacttgctgttgcaagttttaactgctgtccttgtccgtccggttgcacagaaatcgaaagggattaaaggagatcaaatccctttctatttaattttaactaggaagggatttaaggcctgtttggttcgctgcctaatttatcacattttactacacttgtgtctaagtttagtttttcaattcgaataattaatcttagacaaagtgtgacatagttagacacaaaccaaacaggcccttaatgtccctcagtcacttcgcaaccgaataatccaggtacatcttacgactattgctttacattcggcaaacgaattgaaatgaa

SEQ ID NO: 50191 - DNA, 2013 bp, Zea Mays
gtaaattgccccttcaactgcacatctcctctccatcgtctccttgaggcttattatatgcatgcatcatccctgatctctttcatctcttccttgctagctacttctctagttatagctctctctctctctctctctctctctctctctctctctctctctagctctcttctctctcgtagtacatgtctaccgtcttcatgacccaactgccgcgtactctccgtctaatggagggagagcaggatcagggactctttccggcgtcgaccttccatgtcgcaaaggaccctccaatcttgttcccgttcatgatcaccagccccgtccatgtagatcagctccaagggcaaagcagctatggtgatcagcacttggggcagcatgtcttgtctgaatctactcaacagttcaccgatcggacgatgataagtgggtcagaagtcttccctaggcggccatcgccgttcgggcagactatccaaagcatcgatggtgatatgatccagccatctgcgtatgatccatatgatatagtggagaaccagcgcacggaaggattgagcggcggcggctggacagtgtcgtcgtcctcgtcgtcaccgccggcgaagatgaagatcatgcgcaaggcgacgagcgagtatcccgagggtggagctgcaagaaagccaaggagaagagcccaagcgcaccaagacgagagccagctactgacgatgcagcagcaggctatgggcgtcgtcgttagagtgtgctccgactgcaacaccacaaagacccccttgtggaggagtggtcctcgtggccccaaggtgaattaccaagtaattgggaaacgccctgatctgcgcgttcgtttgaggttctagctcagcggcgcaagttgcgcaacctgcacctgcagtagtagtggaggagtggtccttgtggtggtcacatcccctatatatattaattaacactcactaattcatgggctaatatattccctcttgatattaatgtgtgtgttgtgccttttgcatgctgcacacagtctctctgcaacgcatgtggcataaggcaaaggaaggcgaggcgggcgatggtggccgcggccgcggcagctgctgccagcaacggaggcgcgcctccacaagcggtgagcggcgttgccacccagcagcagccgaagccgaagccggccaggaaggagaagaggtcggacgccgccgaccggtcgctgccgttcaagaagcggtgcaagatggtggttgtcgatcacgctgccggtgcagcggcagccacggcgacgccagaggccgcagctgctcggagtaccaaggatcaagcggatcacgtctccggcgacaagcaggttgttgcccctgccgccgcgatgaggagtctggatcagagcgagatcgccactcctcctccctcggcggtgtcgtcgtttcatgctgctttcccggccgacgagatcaccgacgccgccatgctgctcatgaccctgtcctgtggtctcgtccgcagctagctatatatggctagcttctacctgctgagaaatccgtcgctagcaagtgcaacctgattctgcacctaaaaagtaccctagctacatctaccatatcttaatatcgcttgtgttcttttgtttgattttgtgttgagaccggaagaggaaggagatcgccaggagatatatagagtgatcacatgtccaaggcggacgacaataattatgcgaaaaactctcgctagccaggaattagtcattttctaccataagagtgagccttttaatttcaccctttttcagttcttcggctaattatatattcaagtccactatatgctatgtaactttctttgttccataatttgtattacttatatatgttgtactggatcatcggagctaaataaaaatattgaggatatacagtgatcgaggggtgttgcatggttgtggcgttttttcactgttacatttgtgtagtgtatgtcagctgctactgagctgag

SEQ ID NO: 50192 - DNA, 1801 bp, Zea Mays
gtaaattgccccttcaactgcacatctcctctccatcgtctccttgaggcttattatatgcatgcatcatccctgatctctttcatctcttccttgctagctacttctctagttatagctctctctctctctctctctctctctctctctctctctctctctagctctcttctctctcgtagtacatgtctaccgtcttcatgacccaactgccgcgtactctccgtctaatggagggagagcaggatcagggactctttccggcgtcgaccttccatgtcgcaaaggaccctccaatcttgttcccgttcatgatcaccagccccgtccatgtagatcagctccaagggcaaagcagctatggtgatcagcacttggggcagcatgtcttgtctgaatctactcaacagttcaccgatcggacgatgataagtgggtcagaagtcttccctaggcggccatcgccgttcgggcagactatccaaagcatcgatggtgatatgatccagccatctgcgtatgatccatatgatatagtggagaaccagcgcacggaaggattgagcggcggcggctggacagtgtcgtcgtcctcgtcgtcaccgccggcgaagatgaagatcatgcgcaaggcgacgagcgagtatcccgagggtggagctgcaagaaagccaaggagaagagcccaagcgcaccaagacgagagccagctactgacgatgcagcagcaggctatgggcgtcgtcgttagagtgtgctccgactgcaacaccacaaagacccccttgtggaggagtggtcctcgtggccccaaggtgaattaccaatctctctgcaacgcatgtggcataaggcaaaggaaggcgaggcgggcgatggtggccgcggccgcggcagctgctgccagcaacggaggcgcgcctccacaagcggtgagcggcgttgccacccagcagcagccgaagccgaagccggccaggaaggagaagaggtcggacgccgccgaccggtcgctgccgttcaagaagcggtgcaagatggtggttgtcgatcacgctgccggtgcagcggcagccacggcgacgccagaggccgcagctgctcggagtaccaaggatcaagcggatcacgtctccggcgacaagcaggttgttgcccctgccgccgcgatgaggagtctggatcagagcgagatcgccactcctcctccctcggcggtgtcgtcgtttcatgctgctttcccggccgacgagatcaccgacgccgccatgctgctcatgaccctgtcctgtggtctcgtccgcagctagctatatatggctagcttctacctgctgagaaatccgtcgctagcaagtgcaacctgattctgcacctaaaaagtaccctagctacatctaccatatcttaatatcgcttgtgttcttttgtttgattttgtgttgagaccggaagaggaaggagatcgccaggagatatatagagtgatcacatgtccaaggcggacgacaataattatgcgaaaaactctcgctagccaggaattagtcattttctaccataagagtgagccttttaatttcaccctttttcagttcttcggctaattatatattcaagtccactatatgctatgtaactttctttgttccataatttgtattacttatatatgttgtactggatcatcggagctaaataaaaatattgaggatatacagtgatcgaggggtgttgcatggttgtggcgttttttcactgttacatttgtgtagtgtatgtcagctgctactgagctgag

SEQ ID NO: 50193 - DNA, 1214 bp, Zea Mays
aaaacaataatttgtaaacatgacccttacactagatcttagaaactctctctctaaacaaaaggcaccctgtttcccgttcgtgagaaattcctcgcagacacgggcgcgcctactcaaccgaggccaacaagtcaaggcgagtgcggagtagaggcacaaggtcggatgcctagagagatttcccggtcgcctccgccattccgccggcgaggctcccctcctttgcggtacgctagccggagaaacagacgagatcggagccgctccccttacgcctctcggtcaaccttttcattaggcgaaaaactcgttctccttctccactatgggataggagcaactcaccaagtccaagaaggcatagaagcccactatctccaaggagacacagaagacagagaagtcggagcactacaagttcattagagaataacccatccagtccaagtcacgcatcagagaaaataaattcctctgtaaaacaaaggctggaagaagaaaagaaaaggcgtcaaaaggaagctgaatttaagttactggaagaggagcttgctagaagggtcgaagaagctataagaaaaaatgtcgaggaacgtctgaaatctgaagaggtgaaacgtgacatagaacaccgaattgaggagggtattagaaagttatttgatgaggttgacgctcagctacaaaaagagaaagcagtggccctttatgaggccaggcagaaagcagagcaagaaagaagagagagggaggagttggatagaatgctcgaagagaacaggcgtaaagtggaggaagcacaaagaaaggaagctcttgagcagcagcagaaagagttggaacgatatttggagctggaaaggatacaaaggcaaagagaggaagcgttgcgcagaaagaaaatggaggaggaagaagagagagccaacaagctgagattgctggggaaaaaccggggttgagaactgtcatctttatatacacagcggtctatgtgccgtggttgcccccatttgacttgttagttgttgccttaccagtgcgagaacttttgtttgatgtacgaacatgaaaatggtcatgtatgacatctatgaatggaacctgtagcttattctttgagtacgttttaagacaggttatttggattcctcaatgttttgctctgccatgcttaagaattttttaaatgcctagtctggtgcacaagg

SEQ ID NO: 50194 - DNA, 1224 bp, Zea Mays
aaaacaataatttgtaaacatgacccttacactagatcttagaaactctctctctaaacaaaaggcaccctgtttcccgttcgtgagaaattcctcgcagacacgggcgcgcctactcaaccgaggccaacaagtcaaggcgagtgcggagtagaggcacaaggtcggatgcctagagagatttcccggtcgcctccgccattccgccggcgaggctcccctcctttgcggtacgctagccggagaaacagacgagatcggagccgctccccttacgcctctcggcgaaaaactcgttctccttctccactatgggataggagcaactcaccaagtccaagaaggcatagaagcccactatctccaaggagacacagaagacagagaagtcggagcactacaagttcattagagaataacccatccagtccaagtcacgcatcagagaaaataaattcctctgtaaaacaaaggctggaagaagaaaagaaaaggtacccatgtcctttattgtcttctaggcgtcaaaaggaagctgaatttaagttactggaagaggagcttgctagaagggtcgaagaagctataagaaaaaatgtcgaggaacgtctgaaatctgaagaggtgaaacgtgacatagaacaccgaattgaggagggtattagaaagttatttgatgaggttgacgctcagctacaaaaagagaaagcagtggccctttatgaggccaggcagaaagcagagcaagaaagaagagagagggaggagttggatagaatgctcgaagagaacaggcgtaaagtggaggaagcacaaagaaaggaagctcttgagcagcagcagaaagagttggaacgatatttggagctggaaaggatacaaaggcaaagagaggaagcgttgcgcagaaagaaaatggaggaggaagaagagagagccaacaagctgagattgctggggaaaaaccggggttgagaactgtcatctttatatacacagcggtctatgtgccgtggttgcccccatttgacttgttagttgttgccttaccagtgcgagaacttttgtttgatgtacgaacatgaaaatggtcatgtatgacatctatgaatggaacctgtagcttattctttgagtacgttttaagacaggttatttggattcctcaatgttttgctctgccatgcttaagaattttttaaatgcctagtctggtgcacaagg

SEQ ID NO: 50195 - DNA, 778 bp, Zea Mays
atcagttctaataattcctggagttcaaaacttgaaatcaatgtgctgcactgctgctttgctgtataatccaaggcgtcaaaaggaagctgaatttaagttactggaagaggagcttgctagaagggtcgaagaagctataagaaaaaatgtcgaggaacgtctgaaatctgaagaggtgaaacgtgacatagaacaccgaattgaggagggtattagaaagttatttgatgaggttgacgctcagctacaaaaagagaaagcagtggccctttatgaggccaggcagaaagcagagcaagaaagaagagagagggaggagttggatagaatgctcgaagagaacaggcgtaaagtggaggaagcacaaagaaaggaagctcttgagcagcagcagaaagagttggaacgatatttggagctggaaaggatacaaaggcaaagagaggaagcgttgcgcagaaagaaaatggaggaggaagaagagagagccaacaagctgagattgctggggaaaaaccggggttgagaactgtcatctttatatacacagcggtctatgtgccgtggttgcccccatttgacttgttagttgttgccttaccagtgcgagaacttttgtttgatgtacgaacatgaaaatggtcatgtatgacatctatgaatggaacctgtagcttattctttgagtacgttttaagacaggttatttggattcctcaatgttttgctctgccatgcttaagaattttttaaatgcctagtctggtgcacaagg

SEQ ID NO: 50196 - DNA, 3050 bp, Zea Mays
gtgaaggtgtatatgtttaaacccccgtcctcagtcacgccgcacctaacccttcgtcagtttcagtttggcacctccgaagcttccgtccgaatctctgctgcctccttcctcggccaggcttgcgggcgatggcggcggagcagaccgccgagcagttccggggccaggcgcggctgccccacttcgcgtccccgcggcgctacgacctgcgcctcacgcccgacctccccgcctgcgtcttcactggctcggtggcggtttccatcggcgtggccgcgcccacccgcttcctcgtactcaacgcagccgagctcgacgtcgcgaccgggggcgtcagcttcgcgcctcagggctccgaccaggtgctacaacctttggaggttaccaacgtgccagaagatgagatcctgattattcgcttcaatgaggtgctttctatcggggagggaactttgacgattgcattcaaggggactttgaatgataagatgcatggattctacagaagtgtgtatgagcttaatggagagaagaaaaacatggctgtaacacagtttgaaccagctgatgcaaggcgctgcttcccttgttgggatgagcctgctttcaaggctgttttcaaaattactctagaagttccttctgagacgattgctctgtcaaatatgccagtaattgaagagaaggtcaatggccctaccaaaatagtctacttccaagaatctcggataatgtctacatacttagtggctgttattgttggcaatttttgactatgtggaagatttcaccacagatggtactagggtccgtgtttacacacaagtcggtaagagtgcgcaggggaggtttgctctagaggttgccttgaagacattggtcctgtttaaggagtattttgctgtgccataccccctccccaaaatggacatggttgctattccagattttgcagctggagccatggagaactatggcttggttacataccgtgaaacagcattgctatttgatgagatgcactctgcagctgccaataagcaacgggttgcagttgttgtagctcatgaattagctcatcaatggtttggaaatcttgtcacaatggaatggtggacacatctgtggcttaatgagggctttgcgacttgggtgtcttacttagctgcagatcagttctttcctgaatggaatgtttggactcagtttctagaggaatctacagtaggtttcaagttggatgctcttgcaggttcacatccaattgaggtggacataaatcatgttgatgaaatagatgagatatttgatgctataagctataggaaaggagcttctgtcattcgtatgctgcaaaactatcttggggctgaggtctttcagaattctttggctgcatacatcaaaagatttgcgtattcaaatgcaaagactgaggacttatgggctgcccttgaagaggggtctggtgaaccagttagaacattaatgcattcatggaccaaacagcaaggttatcctgtcattaatgtgaaactcaaggatggaaagttccaactggagcagacacaatttctttcaagtggatctacaggagttgggcaatgggttgttcccatcacactatgttgttgttcctactcgcgccaagcgaagttcctttttcatgggaaacaagaagattttgatttgtcagcgtccgggtttacggactgccaaaagaaagatggcttctggattaaacttaatgtcaaccagactagcttctatagggtgagctatgatgaggaacttgcagcccgacttcgatatgcaattgaaaccaacaaactgggtgcagcagacagatatggcgtacttgatgatgcctatgccctctgtatggctggcaaacaaaagctagtctccttgctgcatttgatttctgtgtacaaggatgagactgagtatactgtgcttgcacacataatcacgacaagtctgcacattgccgagatgatggttattgctgctccagaggagttggttcatctgaagaagttcctaattgatttcctggagccatttgcgctgaaacttggctgggatgctaagagtgacgagggccatctgaacgctttgttaagaggtacactcttaaccgctcttgcagaacttggccatgaggctaccataaatgaagctgttcgtcgatttaatgtctttctggaagacagagagacaccactcctccctcccgatgttcgaaaggcagcatatgttgctttgatgcagacagtgagcaaatcaaacaaaactggctatgaatcactactgaggatatatagggaaaccgatctaagccaggagaaagttcgttctttggcatcatcccctgaccatgatgttgtccgtgaagtattgaatttcatattgtcacctgaggtgaggaatcaggacgcaatatttttgctaagaggggtgagttcaggggcacacgaggtagcatggcaatggctgaaggaaaactgggattacatattgggagcctactctggaactctgctcacctatttcgtcaacataactgtctcgccactggccaccgatgaacatggtgatgaggcggaggagtttttcaagagcagaaccaaggcgaacatcgcgaggactgtgaggcagagcatcgagagggtgaggatcaatgcccaatgggtcaagaacatcaaggccgaggctgacctcggcaatgttctcaagaagctggcttacaagcactgatcagagacggtccactttcatttctgtgttaatcctagtaccgagatgtaactttgttctctggaataagtggattaataaagggcactttcgtttgtgtgtcgtcctgagctgccttgtccgtagattcttacaaactgttctgtgcgaaagctaccatgatagatatgcgtcgaattgattgattctatatcctgataattgattgtgtatcgcccatgtcgcacaggagaacggtaaatttgttccaatgattgtctgactgcgagttggcttccaaacctgca

SEQ ID NO: 50197 - DNA, 3047 bp, Zea Mays
acccccgtcctcagtcacgccgcacctaacccttcgtcagtttcagtttggcacctccgaagcttccgtccgaatctctgctgcctccttcctcggccaggcttgcgggcgatggcggcggagcagaccgccgagcagttccggggccaggcgcggctgccccacttcgcgtccccgcggcgctacgacctgcgcctcacgcccgacctccccgcctgcgtcttcactggctcggtggcggtttccatcggcgtggccgcgcccacccgcttcctcgtactcaacgcagccgagctcgacgtcgcgaccgggggcgtcagcttcgcgcctcagggctccgaccaggtgctacaacctttggaggttaccaacgtgccagaagatgagatcctgattattcgcttcaatgaggtgctttctatcggggagggaactttgacgattgcattcaaggggactttgaatgataagatgcatggattctacagaagtgtgtatgagcttaatggagagaagaaaaacatggctgtaacacagtttgaaccagctgatgcaaggcgctgcttcccttgttgggatgagcctgctttcaaggctgttttcaaaattactctagaagttccttctgagacgattgctctgtcaaatatgccagtaattgaagagaaggtcaatggccctaccaaaatagtctacttccaagaatctcggataatgtctacatacttagtggctgttattgttggcaatttttgactatgtggaagatttcaccacagatggtactagggtccgtgtttacacacaagtcggtaagagtgcgcaggggaggtttgctctagaggttgccttgaagacattggtcctgtttaaggagtgtattttgctgtgccataccccctccccaaaatggacatggttgctattccagattttgcagctggagccatggagaactatggcttggttacataccgtgaaacagcattgctatttgatgagatgcactctgcagctgccaataagcaacgggttgcagttgttgtagctcatgaattagctcatcaatggtttggaaatcttgtcacaatggaatggtggacacatctgtggcttaatgagggctttgcgacttgggtgtcttacttagctgcagatcagttctttcctgaatggaatgtttggactcagtttctagaggaatctacagtaggtttcaagttggatgctcttgcaggttcacatccaattgaggtggacataaatcatgttgatgaaatagatgagatatttgatgctataagctataggaaaggagcttctgtcattcgtatgctgcaaaactatcttggggctgaggtctttcagaattctttggctgcatacatcaaaagatttgcgtattcaaatgcaaagactgaggacttatgggctgcccttgaagaggggtctggtgaaccagttagaacattaatgcattcatggaccaaacagcaaggttatcctgtcattaatgtgaaactcaaggatggaaagttccaactggagcagacacaatttctttcaagtggatctacaggagttgggcaatgggttgttcccatcacactatgttgttgttcctactcgcgccaagcgaagttcctttttcatgggaaacaagaagattttgatttgtcagcgtccgggtttacggactgccaaaagaaagatggcttctggattaaacttaatgtcaaccagactagcttctatagggtgagctatgatgaggaacttgcagcccgacttcgatatgcaattgaaaccaacaaactgggtgcagcagacagatatggcgtacttgatgatgcctatgccctctgtatggctggcaaacaaaagctagtctccttgctgcatttgatttctgtgtacaaggatgagactgagtatactgtgcttgcacacataatcacgacaagtctgcacattgccgagatgatggttattgctgctccagaggagttggttcatctgaagaagttcctaattgatttcctggagccatttgcgctgaaacttggctgggatgctaagagtgacgagggccatctgaacgctttgttaagaggtacactcttaaccgctcttgcagaacttggccatgaggctaccataaatgaagctgttcgtcgatttaatgtctttctggaagacagagagacaccactcctccctcccgatgttcgaaaggcagcatatgttgctttgatgcagacagtgagcaaatcaaacaaaactggctatgaatcactactgaggatatatagggaaaccgatctaagccaggagaaagttcgtgtgttaggttctttggcatcatcccctgaccatgatgttgtccgtgaagtattgaatttcatattgtcacctgaggtgaggaatcaggacgcaatatttttgctaagaggggtgagttcaggggcacacgaggtagcatggcaatggctgaagtttcaggaaaactgggattacatattgggagcctactctggaactctgctcacctatttcgtcaacataactgtctcgccactggccaccgatgaacatggtgatgaggcggaggagtttttcaagagcagaaccaaggcgaacatcgcgaggactgtgaggcagagcatcgagagggtgaggatcaatgcccaatgggtcaagaacatcaaggccgaggctgacctcggcaatgttctcaagaagctggcttacaagcactgatcagagacggtccactttcatttctgtgttaatcctagtaccgagatgtaactttgttctctggaataagtggattaataaagggcactttcgtttgtgtgtcgtcctgagctgccttgtccgtagattcttacaaactgttctgtgcgaaagctaccatgatagatatgcgtcgaattgattgattctatatcctgataattgattgtgtatcgcccatgtcgcacaggagaacggtaaatttgttccaatgattgtctgactgcgagttggcttccaaacctgca

SEQ ID NO: 50198 - DNA, 3032 bp, Zea Mays
acccccgtcctcagtcacgccgcacctaacccttcgtcagtttcagtttggcacctccgaagcttccgtccgaatctctgctgcctccttcctcggccaggcttgcgggcgatggcggcggagcagaccgccgagcagttccggggccaggcgcggctgccccacttcgcgtccccgcggcgctacgacctgcgcctcacgcccgacctccccgcctgcgtcttcactggctcggtggcggtttccatcggcgtggccgcgcccacccgcttcctcgtactcaacgcagccgagctcgacgtcgcgaccgggggcgtcagcttcgcgcctcagggctccgaccaggtgctacaacctttggaggttaccaacgtgccagaagatgagatcctgattattcgcttcaatgaggtgctttctatcggggagggaactttgacgattgcattcaaggggactttgaatgataagatgcatggattctacagaagtgtgtatgagcttaatggagagaagaaaaacatggctgtaacacagtttgaaccagctgatgcaaggcgctgcttcccttgttgggatgagcctgctttcaaggctgttttcaaaattactctagaagttccttctgagacgattgctctgtcaaatatgccagtaattgaagagaaggtcaatggccctaccaaaatagtctacttccaagaatctcggataatgtctacatacttagtggctgttattgttggcaatttttgactatgtggaagatttcaccacagatggtactagggtccgtgtttacacacaagtcggtaagagtgcgcaggggaggtttgctctagaggttgccttgaagacattggtcctgtttaaggagtattttgctgtgccataccccctccccaaaatggacatggttgctattccagattttgcagctggagccatggagaactatggcttggttacataccgtgaaacagcattgctatttgatgagatgcactctgcagctgccaataagcaacgggttgcagttgttgtagctcatgaattagctcatcaatggtttggaaatcttgtcacaatggaatggtggacacatctgtggcttaatgagggctttgcgacttgggtgtcttacttagctgcagatcagttctttcctgaatggaatgtttggactcagtttctagaggaatctacagtaggtttcaagttggatgctcttgcaggttcacatccaattgaggtggacataaatcatgttgatgaaatagatgagatatttgatgctataagctataggaaaggagcttctgtcattcgtatgctgcaaaactatcttggggctgaggtctttcagaattctttggctgcatacatcaaaagatttgcgtattcaaatgcaaagactgaggacttatgggctgcccttgaagaggggtctggtgaaccagttagaacattaatgcattcatggaccaaacagcaaggttatcctgtcattaatgtgaaactcaaggatggaaagttccaactggagcagacacaatttctttcaagtggatctacaggagttgggcaatgggttgttcccatcacactatgttgttgttcctactcgcgccaagcgaagttcctttttcatgggaaacaagaagattttgatttgtcagcgtccgggtttacggactgccaaaagaaagatggcttctggattaaacttaatgtcaaccagactagcttctatagggtgagctatgatgaggaacttgcagcccgacttcgatatgcaattgaaaccaacaaactgggtgcagcagacagatatggcgtacttgatgatgcctatgccctctgtatggctggcaaacaaaagctagtctccttgctgcatttgatttctgtgtacaaggatgagactgagtatactgtgcttgcacacataatcacgacaagtctgcacattgccgagatgatggttattgctgctccagaggagttggttcatctgaagaagttcctaattgatttcctggagccatttgcgctgaaacttggctgggatgctaagagtgacgagggccatctgaacgctttgttaagaggtacactcttaaccgctcttgcagaacttggccatgaggctaccataaatgaagctgttcgtcgatttaatgtctttctggaagacagagagacaccactcctccctcccgatgttcgaaagcatatgttgctttgatgcagacagtgagcaaatcaaacaaaactggctatgaatcactactgaggatatatagggaaaccgatctaagccaggagaaagttcgttctttggcatcatcccctgaccatgatgttgtccgtgaagtattgaatttcatattgtcacctgaggtgaggaatcaggacgcaatatttttgctaagaggggtgagttcaggggcacacgaggtagcatggcaatggctgaagtttcaggaaaactgggattacatattgggagcctactctggaactctgctcacctatttcgtcaacataactgtctcgccactggccaccgatgaacatggtgatgaggcggaggagtttttcaagagcagaaccaaggcgaacatcgcgaggactgtgaggcagagcatcgagagggtgaggatcaatgcccaatgggtcaagaacatcaaggccgaggctgacctcggcaatgttctcaagaagctggcttacaagcactgatcagagacggtccactttcatttctgtgttaatcctagtaccgagatgtaactttgttctctggaataagtggattaataaagggcactttcgtttgtgtgtcgtcctgagctgccttgtccgtagattcttacaaactgttctgtgcgaaagctaccatgatagatatgcgtcgaattgattgattctatatcctgataattgattgtgtatcgcccatgtcgcacaggagaacggtaaatttgttccaatgattgtctgactgcgagttggcttccaaacctgca

SEQ ID NO: 50199 - DNA, 3115 bp, Zea Mays
acccccgtcctcagtcacgccgcacctaacccttcgtcagtttcagtttggcacctccgaagcttccgtccgaatctctgctgcctccttcctcggccaggcttgcgggcgatggcggcggagcagaccgccgagcagttccggggccaggcgcggctgccccacttcgcgtccccgcggcgctacgacctgcgcctcacgcccgacctccccgcctgcgtcttcactggctcggtggcggtttccatcggcgtggccgcgcccacccgcttcctcgtactcaacgcagccgagctcgacgtcgcgaccgggggcgtcagcttcgcgcctcagggctccgaccaggtgctacaacctttggaggttaccaacgtgccagaagatgagatcctgattattcgcttcaatgaggtgctttctatcggggagggaactttgacgattgcattcaaggggactttgaatgataagatgcatggattctacagaagtgtgtatgagcttaatggagagaagaaaaacatggctgtaacacagtttgaaccagctgatgcaaggcgctgcttcccttgttgggatgagcctgctttcaaggctgttttcaaaattactctagaagttccttctgagacgattgctctgtcaaatatgccagtaattgaagagaaggtcaatggccctaccaaaatagtctacttccaagaatctcggataatgtctacatacttagtggctgttattgttggcaatttttgactatgtggaagatttcaccacagatggtactagggtattttgctgtgccataccccctccccaaaatggacatggttgctattccagattttgcagctggagccatggagaactatggcttggttacataccgtgaaacagcattgctatttgatgagatgcactctgcagctgccaataagcaacgggttgcagttgttgtagctcatgaattagctcatcaatggtttggaaatcttgtcacaatggaatggtggacacatctgtggcttaatgagggctttgcgacttgggtgtcttacttagctgcagatcagttctttcctgaatggaatgtttggactcagtttctagaggaatctacagtaggtttcaagttggatgctcttgcaggttcacatccaattgaggtggacataaatcatgttgatgaaatagatgagatatttgatgctataagctataggaaaggagcttctgtcattcgtatgctgcaaaactatcttggggctgaggtctttcagaattctttggctgcatacatcaaaagatttgcgtattcaaatgcaaagactgaggacttatgggctgcccttgaagaggggtctggtgaaccagttagaacattaatgcattcatggaccaaacagcaaggttatcctgtcattaatgtgaaactcaaggatggaaagttccaactggagcagacacaatttctttcaagtggatctacaggagttgggcaatgggttgttcccatcacactatgttgttgttcctactcgcgccaagcgaagttcctttttcatgggaaacaagaagattttgatttgtcagcgtccgggtttacggactgccaaaagaaagatggcttctggattaaacttaatgtcaaccagactagcttctatagggtgagctatgatgaggaacttgcagcccgacttcgatatgcaattgaaaccaacaaactgggtgcagcagacagatatggcgtacttgatgatgcctatgccctctgtatggctggcaaacaaaagctagtctccttgctgcatttgatttctgtgtacaaggatgagactgagtatactgtgcttgcacacataatcacgacaagtctgcacattgccgagatgatggttattgctgctccagaggagttggttcatctgaagaagttcctaattgatttcctggagccatttgcgctgaaacttggctgggatgctaagagtgacgagggccatctgaacgctttgttaagaggtacactcttaaccgctcttgcagaacttggccatgaggctaccataaatgaagctgttcgtcgatttaatgtctttctggaagacagagagacaccactcctccctcccgatgttcgaaaggcagcatatgttgctttgatgcagacagtgagcaaatcaaacaaaactggctatgaatcactactgaggatatatagggaaaccgatctaagccaggagaaagttcgtgtgttaggcaagtcgatgttttttttccttttaccgttcaatgatgagcttgttttttttctgggacctcattaaatcctgaccttcttgtaggttctttggcatcatcccctgaccatgatgttgtccgtgaagtattgaatttcatattgtcacctgaggtgaggaatcaggacgcaatatttttgctaagaggggtgagttcaggggcacacgaggtagcatggcaatggctgaaggtattcactgtcgtccttatttttctttagctttattacttcattttgggtatatatgctaactctgtagtttcaggaaaactgggattacatattgggagcctactctggaactctgctcacctatttcgtcaacataactgtctcgccactggccaccgatgaacatggtgatgaggcggaggagtttttcaagagcagaaccaaggcgaacatcgcgaggactgtgaggcagagcatcgagagggtgaggatcaatgcccaatgggtcaagaacatcaaggccgaggctgacctcggcaatgttctcaagaagctggcttacaagcactgatcagagacggtccactttcatttctgtgttaatcctagtaccgagatgtaactttgttctctggaataagtggattaataaagggcactttcgtttgtgtgtcgtcctgagctgccttgtccgtagattcttacaaactgttctgtgcgaaagctaccatgatagatatgcgtcgaattgattgattctatatcctgataattgattgtgtatcgcccatgtcgcacaggagaacggtaaatttgttccaatgattgtctgactgcgagttggcttccaaacctgca

SEQ ID NO: 50200 - DNA, 2916 bp, Zea Mays
acccccgtcctcagtcacgccgcacctaacccttcgtcagtttcagtttggcacctccgaagcttccgtccgaatctctgctgcctccttcctcggccaggcttgcgggcgatggcggcggagcagaccgccgagcagttccggggccaggcgcggctgccccacttcgcgtccccgcggcgctacgacctgcgcctcacgcccgacctccccgcctgcgtcttcactggctcggtggcggtttccatcggcgtggccgcgcccacccgcttcctcgtactcaacgcagccgagctcgacgtcgcgaccgggggcgtcagcttcgcgcctcagggctccgaccaggtgctacaacctttggaggttaccaacgtgccagaagatgagatcctgattattcgcttcaatgaggtgctttctatcggggagggaactttgacgattgcattcaaggggactttgaatgataagatgcatggattctacagaagtgtgtatgagcttaatggagagaagaaaaacatggctgtaacacagtttgaaccagctgatgcaaggcgctgcttcccttgttgggatgagcctgctttcaaggctgttttcaaaattactctagaagttccttctgagacgattgctctgtcaaatatgccagtaattgaagagaaggtactagggtattttgctgtgccataccccctccccaaaatggacatggttgctattccagattttgcagctggagccatggagaactatggcttggttacataccgtgaaacagcattgctatttgatgagatgcactctgcagctgccaataagcaacgggttgcagttgttgtagctcatgaattagctcatcaatggtttggaaatcttgtcacaatggaatggtggacacatctgtggcttaatgagggctttgcgacttgggtgtcttacttagctgcagatcagttctttcctgaatggaatgtttggactcagtttctagaggaatctacagtaggtttcaagttggatgctcttgcaggttcacatccaattgaggtggacataaatcatgttgatgaaatagatgagatatttgatgctataagctataggaaaggagcttctgtcattcgtatgctgcaaaactatcttggggctgaggtctttcagaattctttggctgcatacatcaaaagatttgcgtattcaaatgcaaagactgaggacttatgggctgcccttgaagaggggtctggtgaaccagttagaacattaatgcattcatggaccaaacagcaaggttatcctgtcattaatgtgaaactcaaggatggaaagttccaactggagcagacacaatttctttcaagtggatctacaggagttgggcaatgggttgttcccatcacactatgttgttgttcctactcgcgccaagcgaagttcctttttcatgggaaacaagaagattttgatttgtcagcgtccgggtttacggactgccaaaagaaagatggcttctggattaaacttaatgtcaaccagactagcttctatagggtgagctatgatgaggaacttgcagcccgacttcgatatgcaattgaaaccaacaaactgggtgcagcagacagatatggcgtacttgatgatgcctatgccctctgtatggctggcaaacaaaagctagtctccttgctgcatttgatttctgtgtacaaggatgagactgagtatactgtgcttgcacacataatcacgacaagtctgcacattgccgagatgatggttattgctgctccagaggagttggttcatctgaagaagttcctaattgatttcctggagccatttgcgctgaaacttggctgggatgctaagagtgacgagggccatctgaacgctttgttaagaggtacactcttaaccgctcttgcagaacttggccatgaggctaccataaatgaagctgttcgtcgatttaatgtctttctggaagacagagagacaccactcctccctcccgatgttcgaaaggcagcatatgttgctttgatgcagacagtgagcaaatcaaacaaaactggctatgaatcactactgaggatatatagggaaaccgatctaagccaggagaaagttcgtgtgttaggttctttggcatcatcccctgaccatgatgttgtccgtgaagtattgaatttcatattgtcacctgaggtgaggaatcaggacgcaatatttttgctaagaggggtgagttcaggggcacacgaggtagcatggcaatggctgaaggtattcactgtcgtccttatttttctttagctttattacttcattttgggtatatatgctaactctgtagtttcaggaaaactgggattacatattgggagcctactctggaactctgctcacctatttcgtcaacataactgtctcgccactggccaccgatgaacatggtgatgaggcggaggagtttttcaagagcagaaccaaggcgaacatcgcgaggactgtgaggcagagcatcgagagggtgaggatcaatgcccaatgggtcaagaacatcaaggccgaggctgacctcggcaatgttctcaagaagctggcttacaagcactgatcagagacggtccactttcatttctgtgttaatcctagtaccgagatgtaactttgttctctggaataagtggattaataaagggcactttcgtttgtgtgtcgtcctgagctgccttgtccgtagattcttacaaactgttctgtgcgaaagctaccatgatagatatgcgtcgaattgattgattctatatcctgataattgattgtgtatcgcccatgtcgcacaggagaacggtaaatttgttccaatgattgtctgactgcgagttggcttccaaacctgca

SEQ ID NO: 50201 - DNA, 2831 bp, Zea Mays
acccccgtcctcagtcacgccgcacctaacccttcgtcagtttcagtttggcacctccgaagcttccgtccgaatctctgctgcctccttcctcggccaggcttgcgggcgatggcggcggagcagaccgccgagcagttccggggccaggcgcggctgccccacttcgcgtccccgcggcgctacgacctgcgcctcacgcccgacctccccgcctgcgtcttcactggctcggtggcggtttccatcggcgtggccgcgcccacccgcttcctcgtactcaacgcagccgagctcgacgtcgcgaccgggggcgtcagcttcgcgcctcagggctccgaccaggtgctacaacctttggaggttaccaacgtgccagaagatgagatcctgattattcgcttcaatgaggtgctttctatcggggagggaactttgacgattgcattcaaggggactttgaatgataagatgcatggattctacagaagtgtgtatgagcttaatggagagaagaaaaacatggctgtaacacagtttgaaccagctgatgcaaggcgctgcttcccttgttgggatgagcctgctttcaaggctgttttcaaaattactctagaagttccttctgagacgattgctctgtcaaatatgccagtaattgaagagaaggtactagggtattttgctgtgccataccccctccccaaaatggacatggttgctattccagattttgcagctggagccatggagaactatggcttggttacataccgtgaaacagcattgctatttgatgagatgcactctgcagctgccaataagcaacgggttgcagttgttgtagctcatgaattagctcatcaatggtttggaaatcttgtcacaatggaatggtggacacatctgtggcttaatgagggctttgcgacttgggtgtcttacttagctgcagatcagttctttcctgaatggaatgtttggactcagtttctagaggaatctacagtaggtttcaagttggatgctcttgcaggttcacatccaattgaggtggacataaatcatgttgatgaaatagatgagatatttgatgctataagctataggaaaggagcttctgtcattcgtatgctgcaaaactatcttggggctgaggtctttcagaattctttggctgcatacatcaaaagatttgcgtattcaaatgcaaagactgaggacttatgggctgcccttgaagaggggtctggtgaaccagttagaacattaatgcattcatggaccaaacagcaaggttatcctgtcattaatgtgaaactcaaggatggaaagttccaactggagcagacacaatttctttcaagtggatctacaggagttgggcaatgggttgttcccatcacactatgttgttgttcctactcgcgccaagcgaagttcctttttcatgggaaacaagaagattttgatttgtcagcgtccgggtttacggactgccaaaagaaagatggcttctggattaaacttaatgtcaaccagactagcttctatagggtgagctatgatgaggaacttgcagcccgacttcgatatgcaattgaaaccaacaaactgggtgcagcagacagatatggcgtacttgatgatgcctatgccctctgtatggctggcaaacaaaagctagtctccttgctgcatttgatttctgtgtacaaggatgagactgagtatactgtgcttgcacacataatcacgacaagtctgcacattgccgagatgatggttattgctgctccagaggagttggttcatctgaagaagttcctaattgatttcctggagccatttgcgctgaaacttggctgggatgctaagagtgacgagggccatctgaacgctttgttaagaggtacactcttaaccgctcttgcagaacttggccatgaggctaccataaatgaagctgttcgtcgatttaatgtctttctggaagacagagagacaccactcctccctcccgatgttcgaaaggcagcatatgttgctttgatgcagacagtgagcaaatcaaacaaaactggctatgaatcactactgaggatatatagggaaaccgatctaagccaggagaaagttcgttctttggcatcatcccctgaccatgatgttgtccgtgaagtattgaatttcatattgtcacctgaggtgaggaatcaggacgcaatatttttgctaagaggggtgagttcaggggcacacgaggtagcatggcaatggctgaaggaaaactgggattacatattgggagcctactctggaactctgctcacctatttcgtcaacataactgtctcgccactggccaccgatgaacatggtgatgaggcggaggagtttttcaagagcagaaccaaggcgaacatcgcgaggactgtgaggcagagcatcgagagggtgaggatcaatgcccaatgggtcaagaacatcaaggccgaggctgacctcggcaatgttctcaagaagctggcttacaagcactgatcagagacggtccactttcatttctgtgttaatcctagtaccgagatgtaactttgttctctggaataagtggattaataaagggcactttcgtttgtgtgtcgtcctgagctgccttgtccgtagattcttacaaactgttctgtgcgaaagctaccatgatagatatgcgtcgaattgattgattctatatcctgataattgattgtgtatcgcccatgtcgcacaggagaacggtaaatttgttccaatgattgtctgactgcgagttggcttccaaacctgca

SEQ ID NO: 50202 - DNA, 3150 bp, Zea Mays
acccccgtcctcagtcacgccgcacctaacccttcgtcagtttcagtttggcacctccgaagcttccgtccgaatctctgctgcctccttcctcggccaggcttgcgggcgatggcggcggagcagaccgccgagcagttccggggccaggcgcggctgccccacttcgcgtccccgcggcgctacgacctgcgcctcacgcccgacctccccgcctgcgtcttcactggctcggtggcggtttccatcggcgtggccgcgcccacccgcttcctcgtactcaacgcagccgagctcgacgtcgcgaccgggggcgtcagcttcgcgcctcagggctccgaccaggtgcttgcccttgcctcgcttccgcccgtcggtgtgcgcgggtgtcggggtgtgtttgatctgatcgtatgcacacggtttgatacttacagatgcatatggtacttacaggtgctacaacctttggaggttaccaacgtgccagaagatgagatcctgattattcgcttcaatgaggtgctttctatcggggagggaactttgacgattgcattcaaggggactttgaatgataagatgcatggattctacagaagtgtgtatgagcttaatggagagaagaaaaacatggctgtaacacagtttgaaccagctgatgcaaggcgctgcttcccttgttgggatgagcctgctttcaaggctgttttcaaaattactctagaagttccttctgagacgattgctctgtcaaatatgccagtaattgaagagaaggtcaatggccctaccaaaatagtctacttccaagaatctcggataatgtctacatacttagtggctgttattgttggcaatttttgactatgtggaagatttcaccacagatggtactagggtccgtgtttacacacaagtcggtaagagtgcgcaggggaggtttgctctagaggttgccttgaagacattggtcctgtttaaggagtattttgctgtgccataccccctccccaaaatggacatggttgctattccagattttgcagctggagccatggagaactatggcttggttacataccgtgaaacagcattgctatttgatgagatgcactctgcagctgccaataagcaacgggttgcagttgttgtagctcatgaattagctcatcaatggtttggaaatcttgtcacaatggaatggtggacacatctgtggcttaatgagggctttgcgacttgggtgtcttacttagctgcagatcagttctttcctgaatggaatgtttggactcagtttctagaggaatctacagtaggtttcaagttggatgctcttgcaggttcacatccaattgaggtggacataaatcatgttgatgaaatagatgagatatttgatgctataagctataggaaaggagcttctgtcattcgtatgctgcaaaactatcttggggctgaggtctttcagaattctttggctgcatacatcaaaagatttgcgtattcaaatgcaaagactgaggacttatgggctgcccttgaagaggggtctggtgaaccagttagaacattaatgcattcatggaccaaacagcaaggttatcctgtcattaatgtgaaactcaaggatggaaagttccaactggagcagacacaatttctttcaagtggatctacaggagttgggcaatgggttgttcccatcacactatgttgttgttcctactcgcgccaagcgaagttcctttttcatgggaaacaagaagattttgatttgtcagcgtccgggtttacggactgccaaaagaaagatggcttctggattaaacttaatgtcaaccagactagcttctatagggtgagctatgatgaggaacttgcagcccgacttcgatatgcaattgaaaccaacaaactgggtgcagcagacagatatggcgtacttgatgatgcctatgccctctgtatggctggcaaacaaaagctagtctccttgctgcatttgatttctgtgtacaaggatgagactgagtatactgtgcttgcacacataatcacgacaagtctgcacattgccgagatgatggttattgctgctccagaggagttggttcatctgaagaagttcctaattgatttcctggagccatttgcgctgaaacttggctgggatgctaagagtgacgagggccatctgaacgctttgttaagaggtacactcttaaccgctcttgcagaacttggccatgaggctaccataaatgaagctgttcgtcgatttaatgtctttctggaagacagagagacaccactcctccctcccgatgttcgaaaggcagcatatgttgctttgatgcagacagtgagcaaatcaaacaaaactggctatgaatcactactgaggatatatagggaaaccgatctaagccaggagaaagttcgtgtgttaggttctttggcatcatcccctgaccatgatgttgtccgtgaagtattgaatttcatattgtcacctgaggtgaggaatcaggacgcaatatttttgctaagaggggtgagttcaggggcacacgaggtagcatggcaatggctgaaggaaaactgggattacatattgggagcctactctggaactctgctcacctatttcgtcaacataactgtctcgccactggccaccgatgaacatggtgatgaggcggaggagtttttcaagagcagaaccaaggcgaacatcgcgaggactgtgaggcagagcatcgagagggtgaggatcaatgcccaatgggtcaagaacatcaaggccgaggctgacctcggcaatgttctcaagaagctggcttacaagcactgatcagagacggtccactttcatttctgtgttaatcctagtaccgagatgtaactttgttctctggaataagtggattaataaagggcactttcgtttgtgtgtcgtcctgagctgccttgtccgtagattcttacaaactgttctgtgcgaaagctaccatgatagatatgcgtcgaattgattgattctatatcctgataattgattgtgtatcgcccatgtcgcacaggagaacggtaaatttgttccaatgattgtctgactgcgagttggcttccaaacctgca

SEQ ID NO: 50203 - DNA, 3036 bp, Zea Mays
acccccgtcctcagtcacgccgcacctaacccttcgtcagtttcagtttggcacctccgaagcttccgtccgaatctctgctgcctccttcctcggccaggcttgcgggcgatggcggcggagcagaccgccgagcagttccggggccaggcgcggctgccccacttcgcgtccccgcggcgctacgacctgcgcctcacgcccgacctccccgcctgcgtcttcactggctcggtggcggtttccatcggcgtggccgcgcccacccgcttcctcgtactcaacgcagccgagctcgacgtcgcgaccgggggcgtcagcttcgcgcctcagggctccgaccaggtgctacaacctttggaggttaccaacgtgccagaagatgagatcctgattattcgcttcaatgaggtgctttctatcggggagggaactttgacgattgcattcaaggggactttgaatgataagatgcatggattctacagaagtgtgtatgagcttaatggagagaagaaaaacatggctgtaacacagtttgaaccagctgatgcaaggcgctgcttcccttgttgggatgagcctgctttcaaggctgttttcaaaattactctagaagttccttctgagacgattgctctgtcaaatatgccagtaattgaagagaaggtcaatggccctaccaaaatagtctacttccaagaatctcggataatgtctacatacttagtggctgttattgttggcaatttttgactatgtggaagatttcaccacagatggtactagggtccgtgtttacacacaagtcggtaagagtgcgcaggggaggtttgctctagaggttgccttgaagacattggtcctgtttaaggagtattttgctgtgccataccccctccccaaaatggacatggttgctattccagattttgcagctggagccatggagaactatggcttggttacataccgtgaaacagcattgctatttgatgagatgcactctgcagctgccaataagcaacgggttgcagttgttgtagctcatgaattagctcatcaatggtttggaaatcttgtcacaatggaatggtggacacatctgtggcttaatgagggctttgcgacttgggtgtcttacttagctgcagatcagttctttcctgaatggaatgtttggactcagtttctagaggaatctacagtaggtttcaagttggatgctcttgcaggttcacatccaattgaggtggacataaatcatgttgatgaaatagatgagatatttgatgctataagctataggaaaggagcttctgtcattcgtatgctgcaaaactatcttggggctgaggtctttcagaattctttggctgcatacatcaaaagatttgcgtattcaaatgcaaagactgaggacttatgggctgcccttgaagaggggtctggtgaaccagttagaacattaatgcattcatggaccaaacagcaaggttatcctgtcattaatgtgaaactcaaggatggaaagttccaactggagcagacacaatttctttcaagtggatctacaggagttgggcaatgggttgttcccatcacactatgttgttgttcctactcgcgccaagcgaagttcctttttcatgggaaacaagaagattttgatttgtcagcgtccgggtttacggactgccaaaagaaagatggcttctggattaaacttaatgtcaaccagactagcttctatagggtgagctatgatgaggaacttgcagcccgacttcgatatgcaattgaaaccaacaaactgggtgcagcagacagatatggcgtacttgatgatgcctatgccctctgtatggctggcaaacaaaagctagtctccttgctgcatttgatttctgtgtacaaggatgagactgagtatactgtgcttgcacacataatcacgacaagtctgcacattgccgagatgatggttattgctgctccagaggagttggttcatctgaagaagttcctaattgatttcctggagccatttgcgctgaaacttggctgggatgctaagagtgacgagggccatctgaacgctttgttaagaggtacactcttaaccgctcttgcagaacttggccatgaggctaccataaatgaagctgttcgtcgatttaatgtctttctggaagacagagagacaccactcctccctcccgatgttcgaaaggcagcatatgttgctttgatgcagacagtgagcaaatcaaacaaaactggctatgaatcactactgaggatatatagggaaaccgatctaagccaggagaaagttcgttctttggcatcatcccctgaccatgatgttgtccgtgaagtattgaatttcatattgtcacctgaggtgaggaatcaggacgcaatatttttgctaagaggggtgagttcaggggcacacgaggtagcatggcaatggctgaagtttcaggaaaactgggattacatattgggagcctactctggaactctgctcacctatttcgtcaacataactgtctcgccactggccaccgatgaacatggtgatgaggcggaggagtttttcaagagcagaaccaaggcgaacatcgcgaggactgtgaggcagagcatcgagagggtgaggatcaatgcccaatgggtcaagaacatcaaggccgaggctgacctcggcaatgttctcaagaagctggcttacaagcactgatcagagacggtccactttcatttctgtgttaatcctagtaccgagatgtaactttgttctctggaataagtggattaataaagggcactttcgtttgtgtgtcgtcctgagctgccttgtccgtagattcttacaaactgttctgtgcgaaagctaccatgatagatatgcgtcgaattgattgattctatatcctgataattgattgtgtatcgcccatgtcgcacaggagaacggtaaatttgttccaatgattgtctgactgcgagttggcttccaaacctgca

SEQ ID NO: 50204 - DNA, 2926 bp, Zea Mays
acccccgtcctcagtcacgccgcacctaacccttcgtcagtttcagtttggcacctccgaagcttccgtccgaatctctgctgcctccttcctcggccaggcttgcgggcgatggcggcggagcagaccgccgagcagttccggggccaggcgcggctgccccacttcgcgtccccgcggcgctacgacctgcgcctcacgcccgacctccccgcctgcgtcttcactggctcggtggcggtttccatcggcgtggccgcgcccacccgcttcctcgtactcaacgcagccgagctcgacgtcgcgaccgggggcgtcagcttcgcgcctcagggctccgaccaggtgctacaacctttggaggttaccaacgtgccagaagatgagatcctgattattcgcttcaatgaggtgctttctatcggggagggaactttgacgattgcattcaaggggactttgaatgataagatgcatggattctacagaagtgtgtatgagcttaatggagagaagaaaaacatggctgtaacacagtttgaaccagctgatgcaaggcgctgcttcccttgttgggatgagcctgctttcaaggctgttttcaaaattactctagaagttccttctgagacgattgctctgtcaaatatgccagtaattgaagagaaggtactagggtccgtgtttacacacaagtcggtaagagtgcgcaggggaggtttgctctagaggttgccttgaagacattggtcctgtttaaggagtattttgctgtgccataccccctccccaaaatggacatggttgctattccagattttgcagctggagccatggagaactatggcttggttacataccgtgaaacagcattgctatttgatgagatgcactctgcagctgccaataagcaacgggttgcagttgttgtagctcatgaattagctcatcaatggtttggaaatcttgtcacaatggaatggtggacacatctgtggcttaatgagggctttgcgacttgggtgtcttacttagctgcagatcagttctttcctgaatggaatgtttggactcagtttctagaggaatctacagtaggtttcaagttggatgctcttgcaggttcacatccaattgaggtggacataaatcatgttgatgaaatagatgagatatttgatgctataagctataggaaaggagcttctgtcattcgtatgctgcaaaactatcttggggctgaggtctttcagaattctttggctgcatacatcaaaagatttgcgtattcaaatgcaaagactgaggacttatgggctgcccttgaagaggggtctggtgaaccagttagaacattaatgcattcatggaccaaacagcaaggttatcctgtcattaatgtgaaactcaaggatggaaagttccaactggagcagacacaatttctttcaagtggatctacaggagttgggcaatgggttgttcccatcacactatgttgttgttcctactcgcgccaagcgaagttcctttttcatgggaaacaagaagattttgatttgtcagcgtccgggtttacggactgccaaaagaaagatggcttctggattaaacttaatgtcaaccagactagcttctatagggtgagctatgatgaggaacttgcagcccgacttcgatatgcaattgaaaccaacaaactgggtgcagcagacagatatggcgtacttgatgatgcctatgccctctgtatggctggcaaacaaaagctagtctccttgctgcatttgatttctgtgtacaaggatgagactgagtatactgtgcttgcacacataatcacgacaagtctgcacattgccgagatgatggttattgctgctccagaggagttggttcatctgaagaagttcctaattgatttcctggagccatttgcgctgaaacttggctgggatgctaagagtgacgagggccatctgaacgctttgttaagaggtacactcttaaccgctcttgcagaacttggccatgaggctaccataaatgaagctgttcgtcgatttaatgtctttctggaagacagagagacaccactcctccctcccgatgttcgaaaggcagcatatgttgctttgatgcagacagtgagcaaatcaaacaaaactggctatgaatcactactgaggatatatagggaaaccgatctaagccaggagaaagttcgtgtgttaggttctttggcatcatcccctgaccatgatgttgtccgtgaagtattgaatttcatattgtcacctgaggtgaggaatcaggacgcaatatttttgctaagaggggtgagttcaggggcacacgaggtagcatggcaatggctgaaggaaaactgggattacatattgggagcctactctggaactctgctcacctatttcgtcaacataactgtctcgccactggccaccgatgaacatggtgatgaggcggaggagtttttcaagagcagaaccaaggcgaacatcgcgaggactgtgaggcagagcatcgagagggtgaggatcaatgcccaatgggtcaagaacatcaaggccgaggctgacctcggcaatgttctcaagaagctggcttacaagcactgatcagagacggtccactttcatttctgtgttaatcctagtaccgagatgtaactttgttctctggaataagtggattaataaagggcactttcgtttgtgtgtcgtcctgagctgccttgtccgtagattcttacaaactgttctgtgcgaaagctaccatgatagatatgcgtcgaattgattgattctatatcctgataattgattgtgtatcgcccatgtcgcacaggagaacggtaaatttgttccaatgattgtctgactgcgagttggcttccaaacctgca

SEQ ID NO: 50205 - DNA, 3064 bp, Zea Mays
acccccgtcctcagtcacgccgcacctaacccttcgtcagtttcagtttggcacctccgaagcttccgtccgaatctctgctgcctccttcctcggccaggcttgcgggcgatggcggcggagcagaccgccgagcagttccggggccaggcgcggctgccccacttcgcgtccccgcggcgctacgacctgcgcctcacgcccgacctccccgcctgcgtcttcactggctcggtggcggtttccatcggcgtggccgcgcccacccgcttcctcgtactcaacgcagccgagctcgacgtcgcgaccgggggcgtcagcttcgcgcctcagggctccgaccaggtgcttgcccttgcctcgcttccgcccgtcggtgtgcgcgggtgtcggggtgtgtttgatctgatcgtatgcacacggtttgatacttacagatgcatatggtacttacaggtgctacaacctttggaggttaccaacgtgccagaagatgagatcctgattattcgcttcaatgaggtgctttctatcggggagggaactttgacgattgcattcaaggggactttgaatgataagatgcatggattctacagaagtgtgtatgagcttaatggagagaagaaaaacatggctgtaacacagtttgaaccagctgatgcaaggcgctgcttcccttgttgggatgagcctgctttcaaggctgttttcaaaattactctagaagttccttctgagacgattgctctgtcaaatatgccagtaattgaagagaaggtcaatggccctaccaaaatagtctacttccaagaatctcggataatgtctacatacttagtggctgttattgttggcaatttttgactatgtggaagatttcaccacagatggtactagggtattttgctgtgccataccccctccccaaaatggacatggttgctattccagattttgcagctggagccatggagaactatggcttggttacataccgtgaaacagcattgctatttgatgagatgcactctgcagctgccaataagcaacgggttgcagttgttgtagctcatgaattagctcatcaatggtttggaaatcttgtcacaatggaatggtggacacatctgtggcttaatgagggctttgcgacttgggtgtcttacttagctgcagatcagttctttcctgaatggaatgtttggactcagtttctagaggaatctacagtaggtttcaagttggatgctcttgcaggttcacatccaattgaggtggacataaatcatgttgatgaaatagatgagatatttgatgctataagctataggaaaggagcttctgtcattcgtatgctgcaaaactatcttggggctgaggtctttcagaattctttggctgcatacatcaaaagatttgcgtattcaaatgcaaagactgaggacttatgggctgcccttgaagaggggtctggtgaaccagttagaacattaatgcattcatggaccaaacagcaaggttatcctgtcattaatgtgaaactcaaggatggaaagttccaactggagcagacacaatttctttcaagtggatctacaggagttgggcaatgggttgttcccatcacactatgttgttgttcctactcgcgccaagcgaagttcctttttcatgggaaacaagaagattttgatttgtcagcgtccgggtttacggactgccaaaagaaagatggcttctggattaaacttaatgtcaaccagactagcttctatagggtgagctatgatgaggaacttgcagcccgacttcgatatgcaattgaaaccaacaaactgggtgcagcagacagatatggcgtacttgatgatgcctatgccctctgtatggctggcaaacaaaagctagtctccttgctgcatttgatttctgtgtacaaggatgagactgagtatactgtgcttgcacacataatcacgacaagtctgcacattgccgagatgatggttattgctgctccagaggagttggttcatctgaagaagttcctaattgatttcctggagccatttgcgctgaaacttggctgggatgctaagagtgacgagggccatctgaacgctttgttaagaggtacactcttaaccgctcttgcagaacttggccatgaggctaccataaatgaagctgttcgtcgatttaatgtctttctggaagacagagagacaccactcctccctcccgatgttcgaaaggcagcatatgttgctttgatgcagacagtgagcaaatcaaacaaaactggctatgaatcactactgaggatatatagggaaaccgatctaagccaggagaaagttcgtgtgttaggttctttggcatcatcccctgaccatgatgttgtccgtgaagtattgaatttcatattgtcacctgaggtgaggaatcaggacgcaatatttttgctaagaggggtgagttcaggggcacacgaggtagcatggcaatggctgaaggaaaactgggattacatattgggagcctactctggaactctgctcacctatttcgtcaacataactgtctcgccactggccaccgatgaacatggtgatgaggcggaggagtttttcaagagcagaaccaaggcgaacatcgcgaggactgtgaggcagagcatcgagagggtgaggatcaatgcccaatgggtcaagaacatcaaggccgaggctgacctcggcaatgttctcaagaagctggcttacaagcactgatcagagacggtccactttcatttctgtgttaatcctagtaccgagatgtaactttgttctctggaataagtggattaataaagggcactttcgtttgtgtgtcgtcctgagctgccttgtccgtagattcttacaaactgttctgtgcgaaagctaccatgatagatatgcgtcgaattgattgattctatatcctgataattgattgtgtatcgcccatgtcgcacaggagaacggtaaatttgttccaatgattgtctgactgcgagttggcttccaaacctgca

SEQ ID NO: 50206 - DNA, 1490 bp, Zea Mays
ctcatgtaaaaacctactggtaggtgagaagcgaggggaagaacagatctatgtgctttgtgcgacacacaaaacttatattttaaaggaatagagaaaagaatataacaaccaatttatggcactctccacgtataagcctcaatgtgcaggttcgttcttacagacctatacaaattaaaagataataaccaattaatgatattctccacgcataagcctcatggtgctgcttcattcttacacatgttgtacaaaaggatgtgacatgtatatacattctaaatctgcaaataaatcttctcttttgtgttgtaaccaaattctcttttgtgttgcaaacaaaacatgtcaagacttttggctttttctagattataagtacgcgtggtagtatgaacagatgcgctgaagtgaaacataggtggtgtccaccattgcaggttgattttagctggcttctgcaataacagcaaacactaccatgctagcttcaggtttaatcagttgtccatgtcaggatgtcaagttgctgaaagattcagctctccaagtctaagtgttttgttccctgactaaagtttagttcgggtcatatcaaatatttaaatatcaattaggagtattaaatatagacttaattaggtttaataaatttatctcgtattttagtctccatctgtaatttgttttataattagacaatatttaatacctataataatcattggtgttctttttggatcatcacaaagggttaaatcactgtcaaattctctcattgtcttgataaatgtctttgctccttgcatcacgagcctcttactgtcaataactgatagttttccttaataattggctccaacatgctactcaagttgcacgagtacgctaacttgtacctgaattgttgcctaatgaatgagcaaacacattcagtaagcacacagtggttcttgatatattagcacacatagaggtagaaacctgaatagcatttaatcagcatacagattgaagaactgacatgactagccacaacaaaacatcttattgctaagaaatgtttaaccatgccaaaatggaaagtaaacagaaatataaacttaattcttttaaataatcctcaataataacaagaatgaggacatctttctaagtgcccttaccaagaagtgctctgcaatgcattaggatgcaagaagaaaattgatgctatttaaacaacgccaaaaattctagttggacagagaaataagaaaaacagagtagacagtacctgtctgacagagtggaaaagaagcatggagttctttcatttaatgcaatgaatgaagtttgacccggtggaatccattgtgcaattctttttctgttatactcaggtgtggtgtctctgtctagatgaggatgaaggctctgttcaacaccaagtatttttcaatagatcaccactctcacatgaatagcatcataatcaccaagtattt

SEQ ID NO: 50207 - DNA, 1896 bp, Zea Mays
ataccccttaggccttggagatcttgaatttggcctcaacttcatccttgacgttgccagggttcttgttgggtgccacttcatgtccagccggtgttacgacttcttgaggtcctcctccatcgcgccgtggcgtttcggctcaccttgagcgcattgtagtagtctgtccccatctccaacgctcatgccaagaacagtaggagcagcaacaccaccttccaaaccccaacacaaaaatcccttcctcgatccacacgaattccccaagaactacgctagaggaacaatgcatttgggacaggaggataaaccatttcttttgaccctgcgtgtcgaccactccacacaaggaagagccttcggcgcactctcaaacatgtccaacgatcagactgagtggagcacccttctcgcccgtgccagactgctaggcgtcgacgacctgcttcacggtgagtggcatggtgccggacgcgccgcgcatcttggaagggtgtggtggagtcggcgacgacattctaggaggaggtgaactgcgacggcgagaagtcaagtgtcgtcgtcctccggcacgcgcaacacgtggagccaacacaccacctcatgccgcgggaggtcaaacatggaaagggaggtgtgtgcgcgcggtggtggcatgactggacatcgcggggacaggcgcaggggttggccgacgtcgaagcggccctggtctgcggcttaggggatgatgaagtcgctagccttggacatcctcactctctccggcctctgcagcggcgaggaggaggcctccctgtccgggcccaggctcgggccgctgctcccctcgtcctccatcgcgcgccacttgaacgattccgtgcggcgatgcttccttatccacgctcggagagggggtgggggcggctatcttgtgggtcgagaggcaggcgaggggcatgacgtcagacgcttggggcggcggctatctcagggttcgggcacgatgggagcgccggagcggggtggggctcacggaggcgagggcgtgcgagcgaggatggcgttgccagatggagccgaaggggcaggggcacacaggagacgtgggagagggcgagaggcgggggcgtggaggtgtcggcgaggagctcagcaacctcggcctcgtcggcggaggaaggcacgcgcttggacctgcgcgagggggagcacggacgcggggcgtggatcctgtgattgcgtctatggaaggttgccgaaggaaggtgtgctaggggcgatgatggcggtgcggcttgagcacgacgttcctgagattgcgcgagggggaggacgggcagaaccacaatgcacttgtggacgcctacaatagagtcttatagagtagtaatagatttgcaaaaagactttcaaaagattttccaaaacaattttgcaaaaataaaacaagtggtgcaagcttagtccaaaatgttaaataaaagaaagcaatccatgcatatcaagtataaataaaaattggtttaattccaagcaacctttgcacttaccttatatatttgctttggtttgtgttggcatcaatcaccaaaaagggggagattgaaagggaaataggatcaaaccttttcctaaatgattttggtggttgaaatgcccaacacaaataattggactaactagtttgctctagattatatgttctacaggtgccaaaggttcaacacaaactaataaaaagatctaagttagggttcaaaagaaaggagcaaaagaaaccaaagagaaccctggtctagcgcaccggaccatccggtgtgccaccagacagtgtccggtgcctcagggaccgtacaggctgaactcttcaccttcgggtttctaaggccgcgctccgctataattcac

SEQ ID NO: 50208 - DNA, 1978 bp, Zea Mays
ctgcagtctgcacacctggaaagtggtgttccctcgtctgaagccgaggaaaaaatctcgcattcgcaaagcagacaaaacagcgtccccctccctctactaaaaaaaaaatggaggcatgagctccgcctcctcctcgtctctcgccgatctccccaaaccctagccccgacctgaccgccggcgggcccgccggccggagaaggagtcgctcccacccacccaacttctgcggcggaaggggagcgggcggcggacgagatgccgtcgcacggggatctggaccggcagatcgcgcagctgcgcgactgcaagtacctgcccgaggcggaggtcaaggcgctctgcgagcaggccaaggccatccttatggaggagtggaacgtgcagcccgtgcgctgtcctgtcaccgtctgtggcgacatccacggccagttctatgacctcatcgagctcttccgcatcggcggcgacgctcccgacaccaactacctcttcatgggcgactacgtcgatcgtggctactattcagtcgaaacagtttctctgttagtggctttgaaagtccgttacagagatagaattacaatacttagaggaaatcatgagagcagacaaatcactcaagtatatggcttctatgatgaatgcttaagaaaatatggaaatgcaaatgtctggaagtattttacagacttgtttgattttttgcctctcacagctcttatagaaaatcaggtcttctgtcttcatggtggcctctctccgtcattggacacgttggataatattcgttctcttgatcgcgtacaggagattgcgaaactagctcaacgagactcaacaaaagcaagatttctcaaatgaatgcctccaaaacatcggaagaaaggaaataaaggcagagcgcaaggtgcaactgctctttgacccagtgcttttcattcttgttccggttccttcacgtctaattcccatggaacactggttggggaggactttgctgcaagtgaaggatggtctgacgtcgacagaaacgtaggtcatggattggtgacaggaataaatgcaagaacgaaatgaccccagaacgcgacggaggcggtgagagaggtgcacagcgcagtgtgcgaggacggcatccgccgggggctgaagagcctctgcaggttccaccgctgcttgatgacggaggttggctgccagcaccagtaggttcctcatgaaggacccatgtgtgatcttttgtggtctgacccagatgaccgatgtggatggggaatttcaccaagaggagcaggttacacatttgggcaagacattgcgcagcagttcaaccatacaaatggtctttctctcatttcaagggcccatcaacttgtaatggaaggatttaattggtgccaggataagaatgtagtcacagtcttcagtgcgcctaactattgttaccgctgtggtaacatggctgctattcttgaaatcggggaaaacatggaccagaacttccttcaattcgacccggcacctcggcaaattgagccagacacaactcggaaaaccccagactactttttgtaattgtggtggtgacattaacttactggtgttgatgctcctcttttccgcagcatcagggtctgtagatcatctgtccttagatatgggttccatgagcccgacctgtacgtctcccaattcttttgtttggagattttgttgccgcttaacgatctttatacaatatgttaaaaagttaaatgccattggatttttcttctttctgttgtacgtcgactttgtattatttgtagacggtgaatggaagtcgcagcaggaaagccagcccctgctatggttttgttttgatgtgcatcatatcatccgcgtggctgagtaaattatgtccagacgggtaggttttggtttgggtttgcagcatcccgatctgatgtgccctagtgctgtttaatgttgg

SEQ ID NO: 50209 - DNA, 1839 bp, Zea Mays
acacctggaaagtggtgttccctcgtctgaagccgaggaaaaaatctcgcattcgcaaagcagacaaaacagcgtccccctccctctactaaaaaaaaaatggaggcatgagctccgcctcctcctcgtctctcgccgatctccccaaaccctagccccgacctgaccgccggcgggcccgccggccggagaaggagtcgctcccacccacccaacttctgcggcggaaggggagcgggcggcggacgagatgccgtcgcacggggatctggaccggcagatcgcgcagctgcgcgactgcaagtacctgcccgaggcggaggtcaaggcgctctgcgagcaggccaaggccatccttatggaggagtggaacgtgcagcccgtgcgctgtcctgtcaccgtctgtggcgacatccacggccagttctatgacctcatcgagctcttccgcatcggcggcgacgctcccgacaccaactacctcttcatgggcgactacgtcgatcgtggctactattcagtcgaaacagtttctctgttagtggctttgaaagtccgttacagagatagaattacaatacttagaggaaatcatgagagcagacaaatcactcaagtatatggcttctatgatgaatgcttaagaaaatatggaaatgcaaatgtctggaagtattttacagacttgtttgattttttgcctctcacagctcttatagaaaatcaggtcttctgtcttcatggtggcctctctccgtcattggacacgttggataatattcgttctcttgatcgcgtacaggaggtcttcatcagagcaatgagtgggaattgcagaatcctgccaaattagttctcagatccaagacatgttcaatcctattcagaagcttgataacattgagataattgcaagacagccatacaaaaatgacagcgttgtcagcgtagaaagatacccagtgcttctagtgtttttctctcattcctcttttcttttggggtgggggatggggagcttgaggctgacatttcaccattagtgaagtgaccaaccagtagtcatttgcaatgaggttcctcatgaaggacccatgtgtgatcttttgtggtctgacccagatgaccgatgtggatggggaatttcaccaagaggagcaggttacacatttgggcaagacattgcgcagcagttcaaccatacaaatggtctttctctcatttcaagggcccatcaacttgtaatggaaggatttaattggtgccaggataagaatgtagtcacagtcttcagtgcgcctaactattgttaccgctgtggtaacatggctgctattcttgaaatcggggaaaacatggaccagaacttccttcaattcgacccggcacctcggcaaattgagccagacacaactcggaaaaccccagactactttttgtaattgtggtggtgacattaacttactggtgttgatgctcctcttttccgcagcatcagggtctgtagatcatctgtccttagatatgggttccatgagcccgacctgtacgtctcccaattcttttgtttggagattttgttgccgcttaacgatctttatacaatatgttaaaaagttaaatgccattggatttttcttctttctgttgtacgtcgactttgtattatttgtagacggtgaatggaagtcgcagcaggaaagccagcccctgctatggttttgttttgatgtgcatcatatcatccgcgtggctgagtaaattatgtccagacgggtaggttttggtttgggtttgcagcatcccgatctgatgtgccctagtgctgtttaatgttgg

SEQ ID NO: 50210 - DNA, 815 bp, Zea Mays
aaatgaatgcctccaaaacatcggaagaaaggaaataaaggcagagcgcaaggttcctcatgaaggacccatgtgtgatcttttgtggtctgacccagatgaccgatgtggatggggaatttcaccaagaggagcaggttacacatttgggcaagacattgcgcagcagttcaaccatacaaatggtctttctctcatttcaagggcccatcaacttgtaatggaaggatttaattggtgccaggataagaatgtagtcacagtcttcagtgcgcctaactattgttaccgctgtggtaacatggctgctattcttgaaatcggggaaaacatggaccagaacttccttcaattcgacccggcacctcggcaaattgagccagacacaactcggaaaaccccagactactttttgtaattgtggtggtgacattaacttactggtgttgatgctcctcttttccgcagcatcagggtctgtagatcatctgtccttagatatgggttccatgagcccgacctgtacgtctcccaattcttttgtttggagattttgttgccgcttaacgatctttatacaatatgttaaaaagttaaatgccattggatttttcttctttctgttgtacgtcgactttgtattatttgtagacggtgaatggaagtcgcagcaggaaagccagcccctgctatggttttgttttgatgtgcatcatatcatccgcgtggctgagtaaattatgtccagacgggtaggttttggtttgggtttgcagcatcccgatctgatgtgccctagtgctgtttaatgttgg

SEQ ID NO: 50211 - DNA, 3484 bp, Zea Mays
atgaaaaaactaccctcccaaggctggcggctggcctgccctgccgaagcgcgccgtgccgtgtctccgtgtgccccttcctcccagaaccagaagaagttctcgaagcttctcgaaacatcgctccgtctcctccttcagccaaaacccagatcccgaaaccccagacgagcactgctccgcatggaccatcattggcgcttccctgcggtcgccggcgccgatttctgcccggggccaggtttcatttatcgaccacaatcagagcagaacttgatagatggaaggatgaccagtgcacattattctctggaaaattccaatgtcacggtcatcaatgcttgtgatttgttcaagcagccgcttcgtggttcacgccctgaccatattgttgtcatcctcagagggcttccaggtagtggaaagagttatctggcaaaggcattgcgcgatcttgaagttgataatggtgcaaatgcgcctaggatacactccatggatgattatttcatgattgaagttgagaagaaagtggaagacactgaaggccctaaatcttctagtgcatcaaaagggaggaggcagttgactaagaaagtaattgagtattgttatgagccagaaatggaggagacttacaggtcaagcatgttgaaggcattttcaaagacccttgatgaaggaaattttacatttgtgattggtatggagttatttagagcagcttatatcaatcattactgtccaattcccatatgtaatattttcttctcatggttgtttcttcaatattgtggaggtgccttcaaaatttatgggttaacgaaacactttaccatgctttattttttctttctttcacatcatcagtgctacatatgagaagtcaacaccttcatgtaccagtgaaagattttccttttcttttcagcaatcagaaaaaatattctcttttggttgggtcttcagttatgtactgttttgtttccaaaatgacaggatggataacttgaaatttggacagtgcccacttttgttgcacttcatgacattgtgtattgtttaaaacttcaattttagtcacactttagctgacctagcaaaattcagcggttgtgcaccaagagacgccttcaattctagcggctgatgctgtgtttctggtaactgactttgtttactgctggtattcctggccgtttagtggatgaccgcaatctgcgggtagctgattttgctcaattttgggcaactgcgaaggtaaatcctcagtctctgatgtgttgactacaagattactttgcttatggattccttcttttttggggtttggcccattaaagaggtgccgcttgcttgaaaataaaaattcacctccaaggagaggatatattttcttttcctaaaaggtattgtattattattcatgcactgtggaatacttttgtctcattacaaggaaatcaacccttcaattgttccttttgttaagtgtccttatgcttgtgtaatttttatcctgttccctccatgtactcgttggttggttgatacccttactttatcattctgcatggtagctggcttgttttccattagctttttttctttcatcccgagtagcactgttttcaagtctcgattattcaagattagtcgcgattaatcgtccaagtcagtttggaccaatcgtgattaatcgcccaagtcgttcgactaatcgtgataatcaccgattaatcgcccaagtcggttagccagaacgaccaacaagtcgtcctacttgaaaacagtgccgagtagtacctgtttttgctattgagctgctgttggcttctgttcgtgttctctttgattggtgcgaccatagttctacttggcctgaatcaactattgcactgctgaagaaagcaatgattgctggtttcgtggtctgaaatgtatttgttttgcatttttagtataacttgttgagtgttatttttgtgaaagctcttcagattataatatttcagtagattaatcttgtttttgtcagacaatattgatttttcaggagctactcttgcatgctatttagaatttgatttcattttaattaatgtctcatctcatttcatagtgaaatcatcctgatagtgttctgattgctagtttctctttttcagaaatcaggctatgaggtgtacttgctggaggcaccatacaaggatccaacgggctgtgctgcaaggaatgtgcatggatttacattggatgagataaaaaagatggcagcggactgggaggaggctccaccattatatctgcagctagatatacatgtagatatggacactgaggatgttgatgatgctaatgacgcaactagcatcattgctgagagctcgcagaaggctgtacaggatccaccaaacgaaggcttctcaaagccaggggaggagtggaactcagaagtagaagatggcctggatagtttaaaagaactaggacagagtaaatggtcaaaagattttgaggatgaaaccacaaagtccgagaatacagaggaaaacacacatgctctttctggcctggcccggacatatagcacaggacgcaaaaatgtcagttggggtgatcggcttgaaaagggtgggttttccatttatgcaactaaaagaaaacttacttcgtcactaatcatagggcctggatcagggtacaatttggtatccaaccccttggctgaagatagttccacaggtacaaaagggaagacgaataacgagaccaaaaaacggttcagtgaacaacttcgtgacgaaggtgaatccttcagggcagtttttgacaagacaaagcagcacattggagtttttgagaatggagatgaggaataatccttgactagaggttcttttagttgtttgcccttaagcgttttggatgctcaggatgatacttcacacttacggaggggactagtgcagacagcttggagtcactttttcccccttccgcttgtcatcctgcagcaagtcacaatattgagccattcagtgaatcgtgggatcaatattctttagtccaatcgccttcatcaagcgcaatgagcaatagttccaatgtgccgttcaatgaaagcaatgcggatttttttggttcatgggcttgttgtccttgtaaaggcaactcacacatgccacaaagatgtactgtacctatgtatcaggcacgcacactgaatagtggccatcagtttttacatgtttctgttatatatgtgttgttgttaccacgagaaactattcggctctcgtctcttactactgtgacgagtaaactgtctgaatctgaacaattgttttcttaaagagttgtacttaagtaggattggaaacaaaagtctagctgccacagcagcgatgtcgttcggcctgcagaacccactcaacgaaggaagctcaacacacaagaagctcgaaaactgggcatgtttggg

SEQ ID NO: 50212 - DNA, 2907 bp, Zea Mays
atgaaaaaactaccctcccaaggctggcggctggcctgccctgccgaagcgcgccgtgccgtgtctccgtgtgccccttcctcccagaaccagaagaagttctcgaagcttctcgaaacatcgctccgtctcctccttcagccaaaacccagatcccgaaaccccagacgagcactgctccgcatggaccatcattggcgcttccctgcggtcgccggcgccgatttctgcccggtctgttccgtgcgtcacttccccttctgcccaccgccgcctctcccgccgcatcccttcccctacgacctccagccgccgccaccccctcccccgccgaaccccttcccatacgacttccacccgccgcccccaccgccgctgatgtgggcccctccacctcctgggccgcacgacccgcgttcctacgatctccccggctgggaggggcctcacaagcggatgcgcctgggcgaggcgccaccgttcgatccgtacgactttgtgcctccaccgccgccaggaagggcttctgtggagggcgatcggctgctcggcctgatccgggaccatggccgcaatccacttcccggttgtctacctgacggcggctttggttacggaggaggtagattatatccccggcaaggatgtgattttgcggatttcgaccaaaagttgccacctcccatgctgaatgataatggcttcggacaaggttttgtgccagacgaaggccctcaccgaaagtattttgacggtgccaatcaccatttccatcagttccacccagagccattgcctggtgcgccgctgcaccctccactgcctcgctaccctgatccccatggttcacatgcttggcatgttgaggcaggtgctgtgccacggccagcagagcctccattcccctctaaccatgattaccgtgctgcaccgccacggttgactgcaaattcatcattgtttcctgtcctttctggttcgccaacaacggaaaattttccatcaaccgctggtaccttgcctccagcccatcccatgccaaacaaaaaccgtcatgacggacacatcaacgatgaggggccaggtttcatttatcgaccacaatcagagcagaacttgatagatggaaggatgaccagtgcacattattctctggaaaattccaatgtcacggtcatcaatgcttgtgatttgttcaagcagccgcttcgtggttcacgccctgaccatattgttgtcatcctcagagggcttccaggtagtggaaagagttatctggcaaaggcattgcgcgatcttgaagttgataatggtgcaaatgcgcctaggatacactccatggatgattatttcatgattgaagttgagaagaaagtggaagacactgaaggccctaaatcttctagtgcatcaaaagggaggaggcagttgactaagaaagtaattgagtattgttatgagccagaaatggaggagacttacaggtcaagcatgttgaaggcattttcaaagacccttgatgaaggaaattttacatttgtgattgaaatcaggctatgaggtgtacttgctggaggcaccatacaaggatccaacgggctgtgctgcaaggaatgtgcatggatttacattggatgagataaaaaagatggcagcggactgggaggaggctccaccattatatctgcagctagatatacattcattattccatgatgataaccttcgtggccattctatacaagaggtagatatggacactgaggatgttgatgatgctaatgacgcaactagcatcattgctgagagctcgcagaaggctgtacaggatccaccaaacgaaggcttctcaaagccaggggaggagtggaactcagaagtagaagatggcctggatagtttaaaagaactaggacagagtaaatggtcaaaagattttgaggatgaaaccacaaagtccgagaatacagaggaaaacacacatgctctttctggcctggcccggacatatagcacaggacgcaaaaatgtcagttggggtgatcggcttgaaaagggtgggttttccatttatgcaactaaaagaaaacttacttcgtcactaatcatagggcctggatcagggtacaatttggtatccaaccccttggctgaagatagttccacaggtacaaaagggaagacgaataacgagaccaaaaaacggttcagtgaacaacttcgtgacgaaggtgaatccttcagggcagtttttgacaagacaaagcagcacattggagtttttgagaatggagatgaggaataatccttgactagaggttcttttagttgtttgcccttaagcgttttggatgctcaggatgatacttcacacttacggaggggactagtgcagacagcttggagtcactttttcccccttccgcttgtcatcctgcagcaagtcacaatattgagccattcagtgaatcgtgggatcaatattctttagtccaatcgccttcatcaagcgcaatgagcaatagttccaatgtgccgttcaatgaaagcaatgcggatttttttggttcatgggcttgttgtccttgtaaaggcaactcacacatgccacaaagatgtactgtacctatgtatcaggcacgcacactgaatagtggccatcagtttttacatgtttctgttatatatgtgttgttgttaccacgagaaactattcggctctcgtctcttactactgtgacgagtaaactgtctgaatctgaacaattgttttcttaaagagttgtacttaagtaggattggaaacaaaagtctagctgccacagcagcgatgtcgttcggcctgcagaacccactcaacgaaggaagctcaacacacaagaagctcgaaaactgggcatgtttggg

SEQ ID NO: 50213 - DNA, 3624 bp, Zea Mays
atgaaaaaactaccctcccaaggctggcggctggcctgccctgccgaagcgcgccgtgccgtgtctccgtgtgccccttcctcccagaaccagaagaagttctcgaagcttctcgaaacatcgctccgtctcctccttcagccaaaacccagatcccgaaaccccagacgagcactgctccgcatggaccatcattggcgcttccctgcggtcgccggcgccgatttctgcccggtctgttccgtgcgtcacttccccttctgcccaccgccgcctctcccgccgcatcccttcccctacgacctccagccgccgccaccccctcccccgccgaaccccttcccatacgacttccacccgccgcccccaccgccgctgatgtgggcccctccacctcctgggccgcacgacccgcgttcctacgatctccccggctgggaggggcctcacaagcggatgcgcctgggcgaggcgccaccgttcgatccgtacgactttgtgcctccaccgccgccaggaagggcttctgtggagggcgatcggctgctcggcctgatccgggaccatggccgcaatccacttcccggttgtctacctgacggcggctttggttacggaggaggtagattatatccccggcaaggatgtgattttgcggatttcgaccaaaagttgccacctcccatgctgaatgataatggcttcggacaaggttttgtgccagacgaaggccctcaccgaaagtattttgacggtgccaatcaccatttccatcagttccacccagagccattgcctggtgcgccgctgcaccctccactgcctcgctaccctgatccccatggttcacatgcttggcatgttgaggcaggtgctgtgccacggccagcagagcctccattcccctctaaccatgattaccgtgctgcaccgccacggttgactgcaaattcatcattgtttcctgtcctttctggttcgccaacaacggaaaattttccatcaaccgctggtaccttgcctccagcccatcccatgccaaacaaaaaccgtcatgacggacacatcaacgatgaggggccaggtttcatttatcgaccacaatcagagcagaacttgatagatggaaggatgaccagtgcacattattctctggaaaattccaatgtcacggtcatcaatgcttgtgatttgttcaagcagccgcttcgtggttcacgccctgaccatattgttgtcatcctcagagggcttccaggtagtggaaagagttatctggcaaaggcattgcgcgatcttgaagttgataatggtgcaaatgcgcctaggatacactccatggatgattatttcatgattgaagttgagaagaaagtggaagacactgaaggccctaaatcttctagtgcatcaaaagggaggaggcagttgactaagaaagtaattgagtattgttatgagccagaaatggaggagacttacaggtcaagcatgttgaaggcattttcaaagacccttgatgaaggaaattttacatttgtgattggtatggagttatttagagcagcttatatcaatcattactgtccaattcccatatgtaatattttcttctcatggttgtttcttcaatattgtggaggtgccttcaaaatttatgggttaacgaaacactttaccatgctttattttttctttctttcacatcatcagtgctacatatgagaagtcaacaccttcatgtaccagtgaaagattttccttttcttttcagcaatcagaaaaaatattctcttttggttgggtcttcagttatgtactgttttgtttccaaaatgacaggatggataacttgaaatttggacagtgcccacttttgttgcacttcatgacattgtgtattgtttaaaacttcaattttagtcacactttagctgacctagcaaaattcagcggttgtgcaccaagagacgccttcaattctagcggctgatgctgtgtttctggtaactgactttgtttactgctggtattcctggccgtttagtggatgaccgcaatctgcgggtagctgattttgctcaattttgggcaactgcgaagaaatcaggctatgaggtgtacttgctggaggcaccatacaaggatccaacgggctgtgctgcaaggaatgtgcatggatttacattggatgagataaaaaagatggcagcggactgggaggaggctccaccattatatctgcagctagatatacatgtatatttcttgccatcatttactgttgcagtttagaacaactatcagtgtatgcttatcatgtctcatgattgaccatctttatttccttcagtcattattccatgatgataaccttcgtggccattctatacaagaggtaatgatattctttagttacttttaggtagattgacatgttaacgttttttgttctatcaaataggtagatatggacactgaggatgttgatgatgctaatgacgcaactagcatcattgctgagagctcgcagaaggctgtacaggatccaccaaacgaaggcttctcaaagccaggggaggagtggaactcagaagtagaagatggcctggatagtttaaaagaactaggacagagtaaatggtcaaaagattttgaggatgaaaccacaaagtccgagaatacagaggaaaacacacatgctctttctggcctggcccggacatatagcacaggacgcaaaaatgtcagttggggtgatcggcttgaaaagggtgggttttccatttatgcaactaaaagaaaacttacttcgtcactaatcatagggcctggatcagggtacaatttggtatccaaccccttggctgaagatagttccacaggtacaaaagggaagacgaataacgagaccaaaaaacggttcagtgaacaacttcgtgacgaaggtgaatccttcagggcagtttttgacaagacaaagcagcacattggagtttttgagaatggagatgaggaataatccttgactagaggttcttttagttgtttgcccttaagcgttttggatgctcaggatgatacttcacacttacggaggggactagtgcagacagcttggagtcactttttcccccttccgcttgtcatcctgcagcaagtcacaatattgagccattcagtgaatcgtgggatcaatattctttagtccaatcgccttcatcaagcgcaatgagcaatagttccaatgtgccgttcaatgaaagcaatgcggatttttttggttcatgggcttgttgtccttgtaaaggcaactcacacatgccacaaagatgtactgtacctatgtatcaggcacgcacactgaatagtggccatcagtttttacatgtttctgttatatatgtgttgttgttaccacgagaaactattcggctctcgtctcttactactgtgacgagtaaactgtctgaatctgaacaattgttttcttaaagagttgtacttaagtaggattggaaacaaaagtctagctgccacagcagcgatgtcgttcggcctgcagaacccactcaacgaaggaagctcaacacacaagaagctcgaaaactgggcatgtttggg

SEQ ID NO: 50214 - DNA, 545 bp, Zea Mays
gactttcatggtttgcctgtataagacatttttgggtcatatttttattcagcaacagagactaagttagttgtggacacatcaagaagagaaaggctacgagtaaatgttagtactttttaaacgaaataaactgtctgtaggctattggctgatcttggtgtttcttggggaaaagagtacgagcactctcaataatgtaactcagcaaatgtcatttgtacatatatattagacacctccagctaccttgccaacgcaagaacgagaagacgagttagactttgtcaaaaccctcttcactagtggaggtatcgaccatcactcgtcactgtaacccgatggtgatcggcaaccatgagcttccatgttattgtgttctgatacttgagacgtttattatgattatgtatgagatattgtctcttattagtactggatgatgagatgtgtcttattatgactacggatgagacttttgtgatgtaattgatgagactatggatttaaaaattgttatgtgattgtgtgtgagatattttatg

SEQ ID NO: 50215 - DNA, 1716 bp, Zea Mays
caccccaggtgtttatcgtctgctcgaccactagtgcggacgttaacacgtgatagttgtgaatgtaaaggtcactaatttttaatcaacctcgtttatcacgattttgatatcgtgtctatctccatctgtctaaattgacctaatttattttgtaaaattcagactttggtaattttcggaacatcgaatccagtatcgtttgggttgagccatcgacgtcttgcccaaactctaatctttgaaatcgaatccggtttcttaaacttcgtttaaaattatggattaatggaacattaatttggaatctcgactcactcttgcgattttggtccaagcaaatattattagaactcgacgacaacaatattgatgcaaaaattaaatcagaccgagattagagccgatattgagtacttgtaattaatttgtttccctgttcagactgcgaatgaattaccagatttcagacttaaaatatctgcattttttttccttttgttaagtgtttggagaaacaaaaatctgaatcctcctcatcctttccaccgcttatgtcttctagccttatctcctctctattcctacgtgaagaagccaaactcgctcacatcgctctctctccctgcctgcttgcactcgccctcagctcccaggcatggagctcgcccaagctccgtctcccagcgctctccctcacagccgcgctctcctccacctgcaactcgcccctatctcctcctctccccatggcggctccccctggatccctccctgcgcagaccctctcccgtggctggtgtcgtcccttcctgcaaccggccgtcgtttcccctcactgctcttggagtcagtcgtccccgccgtgatgccctaccccaacagcaaacaggtcgtcacatctgctccccatgctcagctcgcccctgctccctaacggcatcacctgcagcagccgcgtcttctcgctccctttcccaatctcgcaccagcgcctgtcctccagccgcccccatggctcccctggccctcacctctcacgtcagcactagcccagttgtggtacagcagtagcatgctggatctctgtagtcctgatgaggagaagaaagctttagtgtggcgcttgtcaagtgtttgataaaaaggctgaacctggaatcgttgttgtgtcctccctgtcagagtcatctgggtccatggtacgttaattaatcacgtgatgtggagcacaagagctggattaatcataagacgatgctgatggacgaagctaaagtggatgaatcaatcaagtgccaggatggaagatgctcaccaagtggtcgtcatttaacaacactaacgtagtgttatcccaggcaagccccggtgcatttgccacctccttgttgttttaaaacttttatcacttatatgctgcattaggtgataggagttgagtgatgaaacacttgatacattgccattccttggaatttgattatcctccttgatacctgttttataaaaagaactaatgaggcttagccctgcctagagaattaaaatttgtttctttttaaaagaatgatgtgtgacactgggtatgggtttgttttatgaaaaaggacttgtaatgttgagcgcatcatctgcagtgatgaattcatcattcaagtatggtacctctgtcaggtacatggtttgggtgttaaataataagatgagaccaga

SEQ ID NO: 50216 - DNA, 3460 bp, Zea Mays
gatagttgtgaatgtaaaggtcactaatttttaatcaacctcgtttatcacgattttgatatcgtgtctatctccatctgtctaaattgacctaatttattttgtaaaattcagactttggtaattttcggaacatcgaatccagtatcgtttgggttgagccatcgacgtcttgcccaaactctaatctttgaaatcgaatccggtttcttaaacttcgtttaaaattatggattaatggaacattaatttggaatctcgactcactcttgcgattttggtccaagcaaatattattagaactcgacgacaacaatattgatgcaaaaattaaatcagaccgagattagagccgatattgagtacttgtaattaatttgtttccctgttcagactgcgaatgaattaccagatttcagacttaaaatatctgcattttttttccttttgttaagtgtttggagaaacaaaaatctgaatcctcctcatcctttccaccgcttatgtcttctagccttatctcctctctattcctacgtgaagaagccaaactcgctcacatcgctctctctccctgcctgcttgcactcgccctcagctcccaggcatggagctcgcccaagctccgtctcccagcgctctccctcacagccgcgctctcctccacctgcaactcgcccctatctcctcctctccccatggcggctccccctggatccctccctgcgcagaccctctcccgtggctggtgtcgtcccttcctgcaaccggccgtcgtttcccctcactgctcttggagtcagtcgtccccgccgtgatgccctaccccaacagcaaacaggtcgtcacatctgctccccatgctcagctcgcccctgctccctaacggcatcacctgcagcagccgcgtcttctcgctccctttcccaatctcgcaccagcgcctgtcctccagccgcccccatggctcccctggccctcacctctcacgtcagcactagcccagttgtggtacagcagtagcatgctggatctctgtagtcctgatgaggagaagaaagctttagtgtggcgcttgtcaagtgtttgataaaaaggctgaacctggaatcgttgttgtgtcctccctgtcagagtcatctgggtccatggtgtgcggtggtgatagcttctaggtctttgttgttgtttgtgtcaattccatggcatcgtaagggaaggcactccctcttcccttttatgttcatgtcgttgttagtgtattagataattgatgaaatatcgtagttgggtgcaaaaacatgattgtggtagtttgacttttgtgatttgtattcttgcaaagggacttgactttgaaatattgcaaatatgtataaggtattcttggcatgattttagccatctcttagttgttactgtattgcatggaggagctgtagctatagtttagaattaaattaatcaacgtcatttgatagagaacctggtaggttgtggggttgtaattttaatacttgctcagttggtcccatcctggtagcgatagaaacactagtgagatgtttatgatctcaatacgtctcatttgactatgttttcctttctttgttgtataattcttttttctctgagaatctcatatgttcatgatctgcagctgagcaagtttgtttgttcctctatgttttaacgatgcaagatatattaataatttgctagcaggaatcctgctgttgatagtgtctagattcaaattggctccttcgggttcatattcatgcagtgtagttcatatacgtgttgatatgtggtccatggtagtgttgggcaatctggatgcaagctggaataatgtgattgtttctgtttttgtaattctctcatatctccaaattgctatgttcactcatcttgttgtgacggtggtttggttagattaatttcacaataggatagatgttgcctgccttacatagtggtttaggcattgagggtgacaatagtatattaacatctaatatgtatgattttcatattgcactatctacacagactatacgttggctgttttgtagctttgttcttcctaaaacttcttatagcgttgtccttctcatggcatatttagtgcttgctatttggactgcatgactagttttagttatgccactagttcaatgaagtaaaccatgttttctgtagaaatgttatataggaaagttgtagataacttctttatcttaattgtgtaaaagtttcatgaccataggcttagcagtttagaagttatgatttttccaagtccagtttctaaatctgtctaaattctgtactgatttcgaaaattgccttgtttgactaaattaaactgagaatcagcccttagtaattatagaataattgtagtaattttcttaagctttccaataaattttggatcacccattttggtggtctagaagtcaagttatagctgtttgaaatatgaagtctgaatctgtccaaatctggacagaagagactgtttgtattaactgacttagatacacattaaattaacctgggatgattataaatgaattatagacaattctattagctttctaaaaagtctaggatcgcctgatttggatttctgaaactccagttatggatttttgaagtaagtagtcgaattctgtccaaatctggacataattaaagtttagcactgtttgaccttttaaactgtcgaatctcattatgatgataataccaaagttgtagaggactttataagctttccaaaaagtcttagtttactatttttggatgcatattttgtgagttatgaataaaacaattgactactgtgctgctgtccagaaaatctgcacacgttaaactgattacttagaatcattcttgcttggctagataggattaattagttcttggttcttgattggtgaagtcttgaagtagctaacctcaagtgaacatgtgtctcatgtttaatgtgtttagttattgttacataatgtttggattaggtccgattacctcaaagttcatgattgtataaagtcagaagtatctagtgtttatgcatataagtgttttaaacctttaaattaagataaatactatactataaaattctatgcttgttaataatgagttgttccttagtactaagagtggtgttaatcattcggtaggatattctagttcatgaggttggagttatatgtagcctttttgatgcttgagttcgatccgtttaaatgaaaaaaatgtaattgtgatacatagtgatatgtcaacatatagtaattgtttttaaatattgtggtacatcagtgttatatttattctaaatatattaggatttgtatattgctaatgttacttgatgatgtgtttaggtccaattgactagaacgtcatgtctgatgtagagttaaatatatctagt

SEQ ID NO: 50217 - DNA, 3491 bp, Zea Mays
cacgttcaaaaaggaaccaaagcacacacggccagacggcctccagtccagatcaaatccacgctacctcggagacccgttagcccgtttgctgtatcactcccctctccaccgcgtctctcctgcatgctcgtattcgcaaatctcctcccctctccccgcgcggcgcgcctgcacctcccggtccggcgagaggccaccgcccgcgcggccgcgctcctcgcactccccccactccggaagccctaggagcgccgtctccaccgctgcacctccgccagtcgcgctcctcgcctcgcctcgccgctgcctccgtagccgtcgcgggcgccgccatgccgctccggttggatatcaagaggaagctcgcacagaggtcggagagggtgaagtccgtggatctgcatccgacggagccatggattttgtcgagtctgtactcgggaagcgtatgtgtatggaactaccagactcagacaatggtgaaatcatttgaagtcacggatttaccagttcgttcggctaaatttattgcacgtaagcaatgggttgttgctggtgccgatgatatgttcatccgtgtgtacaactataacacaatggacaaggtcaaggtttttgaagctcacactgactacattaggtgtgtggctgttcatccaacccagccctttgtgttatcatcgtccgatgacatgctgattaagctgtgggattgggataaaggctgggtgtgtactcaaatatttgaagggcattctcactatgtgatgcaagttacatttaacccaaaagatacaaacacctttgctagtgcttccctggatcgcacaataaagatatggagtcttggttctcctgacccaaatttcacactagatggccattccaaaggtgtgaactgtgttgattacttcactggtggtgatcgaccatacctaattactggctctgatgatcagactgcaaaggtttgggactaccagacaaagagctgtgttcaaacacttgaaggacatgcacataatgtgtccgctgtatgtttccatccagagctacctataattattactggttcagaggatgggacagttcgaatgtggcattctactacctacaggcttgagaacactcttaactatggccttgagcgagtttgggctttaggatatatgaaagggtcaagaagggttgtgattggatatgatgaagggacaataatgataaaaattggtcgtgaagttcctgttgctagcatggatagcagtggaaaaattatatgggcaaagcataatgaaatccaaactgttaacatcaagagtgttggtgcagacaatgagatcgcagatggtgatcggttaccattggccgtgaaggagttgggaagctgtgatctttatccacaaagcttaagacacaatccgaatgggagatttgttgttgtatgtggagatggagaatacataatatacacagcattagcatggagaaatagatcatttgggtctgcacttgaatttgtttggtcaactgatggagaatatgccatcagagaaagcacctcaaggataaagatttacagtaaaaatttccaggagaggaaaagtataagaccatcattttcggttgaacggatatttggtggtgtgttacttgctatgtgtacaaatgacttcatttgcttttatgattgggtggaatgcagattgatacgtcgaattgatgtcaatgtgaagaatctttactgggctgacagtggtgatttagtaacaattgcaagtgatacgtcattctacattttgaaatataatagggatgtagtttcatctcatttagacggagggggttcagctgctgaggaaggtgtggaagatgcctttgaactgcttcatgagatcaatgaacgtgtccggactgggctatgggttggcgattgttttatctacaacaattcttcgtggcggcttaattactgcgtaggaggagaggttacaaccttatttcacttggatcggccaatgtatttactaggatatcttgcaaaccaaagccgtgtctatcttattgataagcaatttaatgttgtggggtatactttactccttagtttgatcgagtataaaacacttgtaatgcgtggggattttgatcgtgcaaatgatgttttatcatctataccaaaggaacaatatgacagtgtggcacgtttcttggaatcacgtggaatgttggaggaagccctcgagatagcaactgacactaattacagatttgacctggctgtgcagcttggtcgacttgaaatagcgaaggtgattgctactgaggtgcaaagtgaatccaagtggaagcaattaggggagttagctatgtcaaatggaaagcttgaaatggcagaggagtgtcttctacatgcaatggacctcagtggtttgttgcttttgtattcttcccttggggatgccgaaggcattaacaaattggcatctgtagccaaagaacaaggaaagaacaatgtttctttcctttgtttcttcatgctaggaaagctggaagagtgtcttcaattgctaatagaaagcaatcgtattccggaagcagcattgatggccagatcttatcttcctagcaaagtccctgagattgtagcgttgtggaaaaaggatctccagaaggtaaacccaaaagcagcggagtccctggctgatcctaatgagtacccaaacttatttgaagactggcagattgctctgaatgtagaagctgctgttgctccgaaaagggttatctatccaccggctgaggagtacatgattcatgctgaaaggtcaaatgagaatttagtggaagcttttaaaaacatgcatgtacaggaagagatggtgccagatgataatgaagagtatgttcacgaggttattgaagatggtggagtagaagagagtcaagaagatgctgttgaggttgatgcagaggatgatggagtagaagaaagtcaggatgaagctgttgagtgctgactcctgagcaatagtggatcaacgggacagcaactttgcaagtggttaagtttgtaaaggttgctgactgctttctagagtacgaagtccattttctccagcagtattaagcatgagacgtgctctaggattggcttatccacatacgaagttggaccacaattaatcaaaacttcatcattgtgctcgataggaaattttgtgcttccttttttacatatagatcaggtctttaggtctcagaaaacttcatcaaaagtactcttgtttcaccgagatggaaatatgggatgtgattggtgatcggagtggtatttttacaaggtacatagagtagtagcttgtggaattgaggatgttttacatgtgatgtacatcggacttgggagctttgtatcaacagcatacgttttcaacagtctgtgtttagtttagtgaataatttgtgttgagctatgtttttgatgttgt

SEQ ID NO: 50218 - DNA, 915 bp, Zea Mays
cttctgtgctatgagactcctttgattccattgtaaacccaaaagcagcggagtccctggctgatcctaatgagtacccaaacttatttgaagactggcagattgctctgaatgtagaagctgctgttgctccgaaaagggttatctatccaccggctgaggagtacatgattcatgctgaaaggtcaaatgagaatttagtggaagcttttaaaaacatgcatgtacaggaagagatggtgccagatgataatgaagagtatgttcacgaggttattgaagatggtggagtagaagagagtcaagaagatgctgttgaggttgatgcagaggatgatggagtagaagaaagtcaggatgaagctgttgaggttgaggctgaggattcaactgatggtgctgtccttgtgaatggaaacaatagtgaggaacagtgggtgctgactcctgagcaatagtggatcaacgggacagcaactttgcaagtggttaagtttgtaaaggttgctgactgctttctagagtacgaagtccattttctccagcagtattaagcatgagacgtgctctaggattggcttatccacatacgaagttggaccacaattaatcaaaacttcatcattgtgctcgataggaaattttgtgcttccttttttacatatagatcaggtctttaggtctcagaaaacttcatcaaaagtactcttgtttcaccgagatggaaatatgggatgtgattggtgatcggagtggtatttttacaaggtacatagagtagtagcttgtggaattgaggatgttttacatgtgatgtacatcggacttgggagctttgtatcaacagcatacgttttcaacagtctgtgtttagtttagtgaataatttgtgttgagctatgtttttgatgttgt

SEQ ID NO: 50219 - DNA, 664 bp, Zea Mays
atgaaactaatttgatattgtgttattgaagatggtggagtagaagagagtcaagaagatgctgttgaggttgatgcagaggatgatggagtagaagaaagtcaggatgaagctgttgaggttgaggctgaggattcaactgatggtgctgtccttgtgaatggaaacaatagtgaggaacagtgggtgctgactcctgagcaatagtggatcaacgggacagcaactttgcaagtggttaagtttgtaaaggttgctgactgctttctagagtacgaagtccattttctccagcagtattaagcatgagacgtgctctaggattggcttatccacatacgaagttggaccacaattaatcaaaacttcatcattgtgctcgataggaaattttgtgcttccttttttacatatagatcaggtctttaggtctcagaaaacttcatcaaaagtactcttgtttcaccgagatggaaatatgggatgtgattggtgatcggagtggtatttttacaaggtacatagagtagtagcttgtggaattgaggatgttttacatgtgatgtacatcggacttgggagctttgtatcaacagcatacgttttcaacagtctgtgtttagtttagtgaataatttgtgttgagctatgtttttgatgttgt

SEQ ID NO: 50220 - DNA, 776 bp, Zea Mays
gcaaaactagatacaagaggcacaaaggtctgtttcttgtgtacatactgagcttactcaatactttgcaagttcaaactgcttgatgaaatctgttactggatattgcaaacatctgtttaaattttctaatggaaaataaattatgcacatcatcactatgtggtctttaaaatctccatgttcaaatttaggaagcactcaagtttggggagatgaggaggatggagttgatttggacaatgaattaaactatacagtatacacaaggcaatgtccaagggcctgtgttgcagctgtggggataaggggagatgttgacatctcttcgtattctcgacatgaaccccatcactaaattccacgtctaacaactggacaacaggttgttcttccactttagccatatagtgtgaagctttaatggaaccaactggttcactgcctcactggtggagttgtagtccaatgttcttggttgcttgtagatgatgaagtccatatacaagaaaagttgggtgctcccatctattaccagatacatcactggttgcactgtacctttaccctttcttgaacactgtctacaaaacaagagagtatgagttcttgaagcttaccagcctgggtgtgatcgatgctcttgtgaaggtaagaaatttaagacaactaagaagggctatagatttctattggagtgtcgggaggtgtgtaggttatcaatttggaattttggatacatattccagtcttgctgattaaataatctaactgag

SEQ ID NO: 50221 - DNA, 213 bp, Zea Mays
gtacctcgagggaagccgtggggctgggcggtggcccgcggcgagcacagcgctcagcggcaccagccggtaagccccgtggtggtggcggcggcggcgaagatggcgatcggaaggtgggcgatttgggggtttagggttagcgatgtgagagcaggtctcgttgattttatttttccatttgcttgtgggtgggtgcgtgcgtgcggatga

SEQ ID NO: 50222 - DNA, 3029 bp, Zea Mays
gagcgaggaaggctgagcgcgcggacacacacagggaactaagtggttttggatttctcaaatttcgctaccttgaggatgctatagttgccaagcacgagatgaatcatcaagtcattggtggtcgagaaatttcaataatttatgcgaggagaatcgaaaaacgccataagaaatgtgcatgagaacaagaatggtaggtacatgaacggaagaacacaagacgatcattatcaagatctcaaaggtctcgatcccactcctgatagttggaagaatgggtgtcagcagagtgagggctatgggatacaggattccatttgcgatgatggtcacactgaaactgctaaaaccaagaagaagatggatgaatccttggagccaagtggggagaataataactgtgagcaagttgagatttcgagtaaggatggcaaaaaggtgcccatgaagttggaggtctcatctggagttcaaactacatcatccattatggaacaagaagtgcactcagggtttgttggggtagagtggcacatgcgggtggccttcgcctgcagcgtgtgcgggcagcgtacgaccagggccatcaatcctcatgcctacaccaatgagactgtgtttgttcaggtaagattgtaagaactttgtgattagtgtatccattgcattaacaagggtcaagttaagctgatccttctactacctttagttatatgtattgagatgccaccgttatgcttgtgtgttcgtttttctaagttgcaacatccttaatttgttattactcctttatagcctactattacaatcttacgtgaacaaacacagtttcatcggtgtaggcatgaggatttatggccctagtcaagttaagctgatccttgtactgcctttaaaccgctatgcttctgtcttcgtttttctatgttgcagcatcgttaatttgttattactcctttatagcatacaatttagcaggcttctggatgttaggaagaaatgacaaattcaatcaatgattagtatagtatcactatgggctacatgttctccctcaaaatcagagagcagtacaattcaaatatgaagggcttggcttgatagttggtacttaatatcatgacaaaagagaagtcatgttgctatattctgttgcatttcttctgaatattgaaatacattactaacaccatcgataattagtacaatttcaccatgggctatatgttcttccacaaaattgggtatatgcacggttcgaattttaagaacatggttattctagagatgagaatctcttgatactttatatttgatatcatgagaagggagacatcatgctgtaataactaacacaattcttctgaatatttgaaaaaaatgactagcacacattgttggtcatcttatttcttcttcatgcttcatactctgtgctgagatatgtagaaaatactgagtgatttgccttgtattcatgtattgtcttgtagggtgttcagaagcacgaagaggtcagtatattctttaagttgggattagctgctttggagctatgcttcgtctatatatgctaatttgaattagtgtgttagctgatgatgaatgttgctccaaggctgtaatatcaacagtggcatatcaaacaatatttttggcacagatatatccagtgcaacttcctaatttctagatggtcgatattgtttgccatagttgctattaggaattctggactgcttgctcaccatatgttttgtgcgtatataacttgttattaggaatcagtcacatcacgacatccacagcttcactatgaatcaaaactatacatgcttttgcagggtggaattgggattccacatcttaagtggttcggggtggaggggcagtacaatgtcatggtgattgatctgcttggtccaactatggagacttatttaactgctgcagcagaaagttctcacttaaaacagtactaatgcttgctgatcatatggtaactctacacaatggacagaatcatagctctattagcactattttatcaaggcaaccttcgactgcccgatgaagacctatggcttcctcacgcctgaattttggagccataccaagttttccatgactccgttccatcaatacacggacctgctggcgaaggctaccaagggtcttgtgctttaggcctgaactgagacagtagagccttatgatggtttgatgtgtctaaatgcactttcttatatttaagaactatgggagtcaactttggaccctgtttgctggccgctttgatgattttgccttttggtctatgacatgtctgatagtcaaatgaagcttttatttcaagccctgttgttgagagtgttgtagaggagcaacggtgccaggacgcgtcaaggttgctccagaataaatggatcatagtgcggtggtcatgggattggaatctgctctgtatttacagggaagcgataattgatcctgcagcaatttttgaacagttagaaaagagaaaattgatcccccaagcattagcagcaaaaagggtgcatttcttcaccttaataaaaaagcgacactgcaaggaggccaaagcctacgccgtgaccccctctagtaccctgctatggtgctgtcagcgcagccgcctcgcagaaaaaaatcgacactgcaaggaggtcaaagcctgcgccagtgaccccctcgagcaccctgctacggtgctacaagcgcagccgcctcgcaagttgatgttacggctgggcaaagtattgaaccctgaagagagccgtggcagcacccccaaaatggctccagttcaggccttccatagccatggcagacgcgacatctaggagcagatgcgacaggatcataagtaggagcggcaacgatgctgtagcgagagacgcgggtgacgaggtcgccgtgctgcggtggtggtaggacgggaaggagacgaaaaagtaggagtcagagctgttcaacaatgtgatcgagtcgctgagacgaggaag

SEQ ID NO: 50223 - DNA, 2097 bp, Zea Mays
tgctatcagcattctcagccatacaccttgacaagctcccaatgcagcagccacatattcagcttcacatgatgacagggctacaaccctttgcttctgagaggaccaagtcaccaagttatctcccaagaagaatagaatacctgaggtactttttctgtgcactaagtcacctgagcaatcactgtctgtgtagccaagcaatgtataatctgctgctgcccccttcttgaaattcactcccaggttaagtgtacctgccacatatctgagaattttcttcactgcagtccagtgttctttacctggggcctccatgaatctgcttaccagaccaactgcaaaagctagatcaggtctagtattcaccagggaactaagtggttttggatttctcaaatttcgctaccttgaggatgctatagttgccaagcacgagatgaatcatcaagtcattggtggtcgagaaatttcaataatttatgcgaggagaatcgaaaaacgccataagaaatgtgcatgagaacaagaatggtaggtacatgaacggaagaacacaagacgatcattatcaagatctcaaaggtctcgatcccactcctgatagttggaagaatgggtgtcagcagagtgagggctatgggatacaggattccatttgcgatgatggtcacactgaaactgctaaaaccaagaagaagatggatgaatccttggagccaagtggggagaataataactgtgagcaagttgagatttcgagtaaggatggcaaaaaggtgcccatgaagttggaggtctcatctggagttcaaactacatcatccattatggaacaagaagtgcactcagggtttgttggggtagaggaatcagtcacatcacgacatccacagcttcactatgaatcaaaactatacatgcttttgcagggtggaattgggattccacatcttaagtggttcggggtggaggggcagtacaatgtcatggtgattgatctgcttggtccaactatggagacttatttaactgctgcagcagaaagttctcacttaaaacagtactaatgcttgctgatcatatggtaactctacacaatggacagaatcatagctctattagcactattttatcaaggcaaccttcgactgcccgatgaagacctatggcttcctcacgcctgaattttggagccataccaagttttccatgactccgttccatcaatacacggacctgctggcgaaggctaccaagggtcttgtgctttaggcctgaactgagacagtagagccttatgatggtttgatgtgtctaaatgcactttcttatatttaagaactatgggagtcaactttggaccctgtttgctggccgctttgatgattttgccttttggtctatgacatgtctgatagtcaaatgaagcttttatttcaagccctgttgttgagaggatggtcaagatgaatttgaaaagcgaacaaagaaaactaaaaagaaaaggaagagagtgttgtagaggagcaacggtgccaggacgcgtcaaggttgctccagaataaatggatcatagtgcggtggtcatgggattggaatctgctctgtatttacagggtgaagccttcgtgtctcctcacgggaaagtcactgacctttcttgggacgtggaccactgatggcccctgtcattccccatgacggcgatcccatggtgaagcctttgtgtttcctcgagggaaatctaccagtgcaagattggtttagtcagcaccattggacacatgtttcactgaatctaaacaattacacctagagcgtctctgcaattgtgacccttatttatcttatgtcctacaaagggcaaacgataaccatcttcaatgaacatacctaggattattgccatgtatctccaccttgctatccaactctgaatcaaccgtaggcgtccacagtgattattttataggatcaatggcagatacatgctcatttttttgtatgtttaagtactgatacatgccattgtgttgttgaaactttaatgctctattagaatatgtttttcttgatagttggtttctatacctg

SEQ ID NO: 50224 - DNA, 5772 bp, Zea Mays
catacaccttgacaagctcccaatgcagcagccacatattcagcttcacatgatgacagggctacaaccctttgcttctgagaggaccaagtcaccaagttatctcccaagaagaatagaatacctgaggttaagtgtacctgccacatatctgagaattttcttcactgcagtccagtgttctttacctggggcctccatgaatctgcttaccagaccaactgcaaaagctagatcaggtctagtattcaccaggtacctcagactcccaacgacacttctatatctggtctcatcatattcagtccctttctgagcagtactgagctttactcgctgctccataggagtgtcagtgtgattacaggaagtcatgttgcactgctctagaatcttggttgcataggatttttgacagattgtgatactattttctccttgcttcacctccattcccaagtagtagctgagcagtcccaaatcactcatactgaatgtcttcatcatttgttgcttgaactctgcaatgctacttacagaaggcccacagatgattagatcatccacatatactcccacaaccagcatggttttgccagttcctctcctgtaaactgcatgttctacttcacattttctgaatcccagggacaccagttctgaatcaagcctgatgttccaagccctaggtgcctgtttcagcccatatagtgctttgttcagtctgagtaccttgcctagcttctttgtatcttggaaaccgggaggttgagtgacatatacttcttcttgaaggtctccatttaggaatgctgattttacatccatgtggtgaatttcccaattccactgtgctgcaagagctatcaaaactcttattgtttcaaaccttgccacaggagcaaatacttcatcaaaatcaacaccctccttttgagcataccccttagcaacaagtcttgctttgtgtttcactatatttccagcagcatctcttttgactttgaaaacccacttcaaaccaattgctttttgttcttttggcagatctgcccacacccaagtgtgattttgttcaatagagtcaagttctgaattcatggcctgtctccagcactgatctgtcaaggcactttcaacattttttggctcatctgcagctagtaaacaaaaagcactgtactcaaaatcatgaacttcttgtgttgagtctaataagtcagatattgttctgtatctcaaaggaatcatgtctgaacttcctgcattcactgactgagagctattatttgaacctgaggcaacagatgcagcttgggattgattctgggacactgaaggtgtcataggagtttgtggtgagggtggtgacgcagcagcaccccctgaagactcactcgtatcacctgaaccagctggtacttgtattgtctgatctggcacagtaaactgaaactgtgtagtgaaaggaattgtagtttcagtctgctgattcttttctgcactctcccagtcccatctttcactttcttcaaacactacatctctgctgatacacagcttctcagtgataggatcaaacaatctatacccttttgtacctgactcataacccaacaggaccatcttagtggacctatctgacaatttgtttacccctggaccaattttcttcacatgagcaatacagccaaatgttttaaggtgctgaacactgggtttcttgccaaaccaagcttcatatggtgttcttccctgtacactcttggtaggggatctattcaacaagtagactgctgttgtcacagcctcaccccagaatcttgatggcacccctttactcttcatcatgcaccttgccatctccactacagtctggtttctacgctccactacccccattttgttggggagagtaaggagtggtcgtgaagtgcttgatgccttgttcagtgcaaaaggcagtaaacatatttgaattgaactcaccacctctatcagttcttatgcccttcaatctgccctcctgatcaacttcagccctttgcttgatcttcttcaagaaatgtagagcttcatcttttgtcttcaacaactcaatccacataaacctgctgaagtcatcaaccactagcaaaaagtaactttttccacctactgtctgtggactgatctgtccacacagatcagcatggaataactccaacccctttgtggctctatatgaggacagccttggaaaaggtgttcgatgttgcttcccaagagtacaaccatcacacacctgttcagctcggtctacaataggcattccttcaaccatactcttctttccaagatctctaagagctctgaaatttagatggccaaatcttgcatgccacaaccatgctacatcatctgcctttgacagcagacacactggaggtacaactcccaacttcactgtgtaaagtctgtttccagtgcgaggtgcactgaccaacaggttatactctggatcaaaaactttcagtctgccaacaaaaagtctaatgtcacagcctgcctcctctagctgtccaagactaattatgttgcttttcaattgtggaatatagtacacacttgtaagcaccttgtgatctccctgtctagtattcatcaccactgagcctaatccacagattctgacagtagaaccatctccaaatctcactgacccactgacagtgtcatcaagttgagaaagtgcagacttggtgcctgtcatgtggttactggcaccagtgtccagtacccacactccatctgggcagattactggcactactttatcttcagacagatgaattacttgagatgcttcactcactgccccttgcacctcagctaatagaagtgttgcattctccacatctccaactacaacatttgcttcctgttgtttttgatccttgtcatccttctttggacgtttacagttctgtgcccagtggccataaatgccacaatttcgacatctcccctttcttcttggtgtcccctttgatgtcagctttggcttgtttgaattgcttgaactgccaccatcagaacgatgaggtcccttacctttccactgactaccactgccaccatccttttgagagtaagactgaaaccgatgcttatgtttttcaagccagtcctcctcagctaacaacagtcgaccagttttgtcagttacttgctcaagcttgtcttcaaaccgatcctcagctgcacgcaggcgtccaaccaagtcttcaactgtgagtgtcttcaggtcacagaacatttcaattgagactgcaacctgattaaaacgaggtggtacaactcgcagaaacttctttactacccgagtgtcatcaacagattccccaagtgacttgatgttggcaacaagatttgttattctcatcccaaaatcctcaacactctctccatctttgaactcaatattttcaaattcttttaaaagtttctgcacgtttacctctttaactcgatcggctccaatcctcatgttcatcacagcctcccatgcctctttcactgtccttttggcgccaagggttccccacatctcctttggcacggatctcatcagagcacccattgcctgtcgatcttgcgagcgcttgacagtggttcccggatcaatgacatcccagatttccattgcctcatagttaatctgcattaacatggcccactctgcataattcgatcgagtcaacataggccataccagggaactctccttgatgccggacgacgccgcgcttgaactggtcctggtgtcacccatctcctgatccttcacaggcgatctccgaggaacgacgaacttcttccttggggttctcgcggtggacagacagatccaccgtagaacataaaccgccctctgataccagatgttggatccccggccggatcaacgagcgacgagtacagccgcgacggcgaacgcagacaggcgcggtgactgcggcgagagcgaggaaggctgagcgcgcggacacacacagggaactaagtggttttggatttctcaaatttcgctaccttgaggatgctatagttgccaagcacgagatgaatcatcaagtcattggtggtcgagaaatttcaataatttatgcgaggagaatcgaaaaacgccataagaaatgtgcatgagaacaagaatggtaggtacatgaacggaagaacacaagacgatcattatcaagatctcaaaggtctcgatcccactcctgatagttggaagaatgggtgtcagcagagtgagggctatgggatacaggattccatttgcgatgatggtcacactgaaactgctaaaaccaagaagaagatggatgaatccttggagccaagtggggagaataataactgtgagcaagttgagatttcgagtaaggatggcaaaaaggtgcccatgaagttggaggtctcatctggagttcaaactacatcatccattatggaacaagaagtgcactcagggtttgttggggtagagtggcacatgcgggtggccttcgcctgcagcgtgtgcgggcagcgtacgaccagggccatcaatcctcatgcctacaccaatgagactgtgtttgttcagggtgttcagaagcacgaagagggtggaattgggattccacatcttaagtggttcggggtggaggggcagtacaatgtcatgttgtgcatgaatcgtgtttgtaagttccattttccatctaagaatttagtgtcatttttagttgttgagttgattttgcaaactgataagtgttttctttcatcaggtaactctacacaatggacagaatcatagctctattagcactattttatcaaggcaaccttcgactgcccgatgaagacctatggcttcctcacgcctgaattttggagccataccaagttttccatgactccgttccatcaatacacggacctgctggcgaaggctaccaagggtcttgtgctttaggcctgaactgagacagtagagccttatgatggtttgatgtgtctaaatgcactttcttatatttaagaactatgggagtcaactttggaccctgtttgctggccgctttgatgattttgccttttggtctatgacatgtctgatagtcaaatgaagcttttatttcaagccctgttgttgagagtgttgtagaggagcaacggtgccaggacgcgtcaaggttgctccagaataaatggatcatagtgcggtggtcatgggattggaatctgctctgtatttacagggtgaagccttcgtgtctcctcacgggaaagtcactgacctttcttgggacgtggaccactgatggcccctgtcattccccatgacggcgatcccatggtgaagcctttgtgtttcctcgagggaaatctaccagtgcaagattggtttagtcagcaccattggacacatgtttcactgaatctaaacaattacacctagagcgtctctgcaattgtgacccttatttatcttatgtcctacaaagggcaaacgataaccatcttcaatgaacatacctaggattattgccatgtatctccaccttgctatccaactctgaatcaaccgtaggcgtccacagtgattattttataggatcaatggcagatacatgctcatttttttgtatgtttaagtactgatacatgccattgtgttgttgaaactttaatgctctattagaatatgtttttcttgatagttggtttctatacctg

SEQ ID NO: 50225 - DNA, 1700 bp, Zea Mays
ttgagactgcaacctgattaaaacgaggtggtacaactcgcagaaacttctttactacccgagtgtcatcaacagattccccaagtgacttgatgttggcaacaagatttgttattctcatcccaaaatcctcaacactctctccatctttgaactcaatattttcaaattcttttaaaagtttctgcacgtttacctctttaactcgatcggctccaatcctcatgttcatcacagcctcccatgcctctttcactgtccttttggcgccaagggttccccacatctcctttggcacggatctcatcagagcacccattgcctgtcgatcttgcgagcgcttgacagtggttcccggatcaatgacatcccagatttccattgcctcatagttaatctgcattaacatggcccactctgcataattcgatcgagtcaacataggccataccagggaactctccttgatgccggacgacgccgcgcttgaactggtcctggtgtcacccatctcctgatccttcacaggcgatctccgaggaacgacgaacttcttccttggggttctcgcggtggacagacagatccaccgtagaacataaaccgccctctgataccagatgttggatccccggccggatcaacgagcgacgagtacagccgcgacggcgaacgcagacaggcgcggtgactgcggcgagagcgaggaaggctgagcgcgcggacacacacagggaactaagtggttttggatttctcaaatttcgctaccttgaggatgctatagttgccaagcacgagatgaatcatcaagtcattggtggtcgagaaatttcaataatttatgcgaggagaatcgaaaaacgccataagaaatgtgcatgagaacaagaatggtaggtacatgaacggaagaacacaagacgatcattatcaagatctcaaaggtctcgatcccactcctgatagttggaagaatgggtgtcagcagagtgagggctatgggatacaggattccatttgcgatgatggtcacactgaaactgctaaaaccaagaagaagatggatgaatccttggagccaagtggggagaataataactgtgagcaagttgagatttcgagtaaggatggcaaaaaggtgcccatgaagttggaggtctcatctggagttcaaactacatcatccattatggaacaagaagtgcactcagggtttgttggggtagagtggcacatgcgggtggccttcgcctgcagcgtgtgcgggcagcgtacgaccagggccatcaatcctcatgcctacaccaatgagactgtgtttgttcaggaatcagtcacatcacgacatccacagcttcactatgaatcaaaactatacatgcttttgcagggtggaattgggattccacatcttaagtggttcggggtggaggggcagtacaatgtcatggtgattgatctgcttggtccaactatggagacttatttaactgctgcagcagaaagttctcacttaaaacagtactaatgcttgctgatcatatggtaactctacacaatggacagaatcatagctctattagcactattttatcaaggcaaccttcgactgcccgatgaagacctatggcttcctcacgcctgaattttggagccataccaagttttccatgactccgttccatcaatacacggac

SEQ ID NO: 50226 - DNA, 2544 bp, Zea Mays
ttgagactgcaacctgattaaaacgaggtggtacaactcgcagaaacttctttactacccgagtgtcatcaacagattccccaagtgacttgatgttggcaacaagatttgttattctcatcccaaaatcctcaacactctctccatctttgaactcaatattttcaaattcttttaaaagtttctgcacgtttacctctttaactcgatcggctccaatcctcatgttcatcacagcctcccatgcctctttcactgtccttttggcgccaagggttccccacatctcctttggcacggatctcatcagagcacccattgcctgtcgatcttgcgagcgcttgacagtggttcccggatcaatgacatcccagatttccattgcctcatagttaatctgcattaacatggcccactctgcataattcgatcgagtcaacataggccataccagggaactctccttgatgccggacgacgccgcgcttgaactggtcctggtgtcacccatctcctgatccttcacaggcgatctccgaggaacgacgaacttcttccttggggttctcgcggtggacagacagatccaccgtagaacataaaccgccctctgataccagatgttggatccccggccggatcaacgagcgacgagtacagccgcgacggcgaacgcagacaggcgcggtgactgcggcgagagcgaggaaggctgagcgcgcggacacacacagggaactaagtggttttggatttctcaaatttcgctaccttgaggatgctatagttgccaagcacgagatgaatcatcaagtcattggtggtcgagaaatttcaataatttatgcgaggagaatcgaaaaacgccataagaaatgtgcatgagaacaagaatggtaggtacatgaacggaagaacacaagacgatcattatcaagatctcaaaggtctcgatcccactcctgatagttggaagaatgggtgtcagcagagtgagggctatgggatacaggattccatttgcgatgatggtcacactgaaactgctaaaaccaagaagaagatggatgaatccttggagccaagtggggagaataataactgtgagcaagttgagatttcgagtaaggatggcaaaaaggtgcccatgaagttggaggtctcatctggagttcaaactacatcatccattatggaacaagaagtgcactcagggtttgttggggtagagtggcacatgcgggtggccttcgcctgcagcgtgtgcgggcagcgtacgaccagggccatcaatcctcatgcctacaccaatgagactgtgtttgttcagggtgttcagaagcacgaagagggtggaattgggattccacatcttaagtggttcggggtggaggggcagtacaatgtcatgttgtgcatgaatcgtgtttgtaagttccattttccatctaagaatttagtgtcatttttagttgttgagttgattttgcaaactgataagtgttttctttcatcaggtaactctacacaatggacagaatcatagctctattagcactattttatcaaggcaaccttcgactgcccgatgaagacctatggcttcctcacgcctgaattttggagccataccaagttttccatgactccgttccatcaatacacggacctgctggcgaaggctaccaagggtcttgtgctttaggcctgaactgagacagtagagccttatgatggtttgatgtgtctaaatgcactttcttatatttaagaactatgggagtcaactttggaccctgtttgctggccgctttgatgattttgccttttggtctatgacatgtctgatagtcaaatgaagcttttatttcaagccctgttgttgagagtgttgtagaggagcaacggtgccaggacgcgtcaaggttgctccagaataaatggatcatagtgcggtggtcatgggattggaatctgctctgtatttacagggaagcgataattgatcctgcagcaatttttgaacagttagaaaagagaaaattgatcccccaagcattagcagcaaaaagggtgcatttcttcaccttaataaaaaagcgacactgcaaggaggccaaagcctacgccgtgaccccctctagtaccctgctatggtgctgtcagcgcagccgcctcgcagaaaaaaatcgacactgcaaggaggtcaaagcctgcgccagtgaccccctcgagcaccctgctacggtgctacaagcgcagccgcctcgcaagttgatgttacggctgggcaaagtattgaaccctgaagagagccgtggcagcacccccaaaatggctccagttcaggccttccatagccatggcagacgcgacatctaggagcagatgcgacaggatcataagtaggagcggcaacgatgctgtagcgagagacgcgggtgacgaggtcgccgtgctgcggtggtggtaggacgggaaggagacgaaaaagtaggagtcagagctgttcaacaatgtgatcgagtcgctgagacgaggaag

SEQ ID NO: 50227 - DNA, 1106 bp, Zea Mays
gatcaacgagcgacgagtacagccgcgacggcgaacgcagacaggcgcggtgactgcggcgagagcgaggaaggctgagcgcgcggacacacacagaggtgaccaaggccacggcgccgggcttcttcaactcgccggggtgggaggcggtccggggcgagtgcgtggaggccatgcgcgcggccgacggcgcagtggtgaacacgttcgtgggcctcgagggccagttcgtgtcgtgctacgaggcggcgctcggcaaacccgtgtggacgctggggccgctctgcctccgcgagcgggacgccgacgccatgtcgtcgcggggggcggacggcggccagcagcacagcgcggtagccgcctggctcgactccaaggagaccggctccgtcgtgttcgtcagcttcggcagcctcgcgcggaagctcccgaagcagctgttcgaggtggggcatggcctggaggactccggcaggccgttcctgtgggtggtgaagctggccgaggcgtccccgccggaggtgcgggagtggctgggagccctggaggcgcgcgcggcggggcggggtctcgtggtgcgtgggtgggcgccgcagctcgccatcctgtcccaccgcgccgtggggggcttcgtcacccactgcggatggaactcgctgctggagtccgtcgcgcacggcgtcccggtggtcacgtggccccacttcgccgaccagttcctgaacgagcggctggcggtggacgtgctcggcgtgggcgtgcccatcggcgtgacggcgcccgtgatggtgttcgacgacgagagcgtggtggtggcgcgtggggacgtcgcgcgggcggtgtcggcgctgatgggcgaagggaaagaggccggcgagaggaggcggagggccagggagtacggagagaaagctcacggcgccatggagaaaggaggctcctcgtatgagaacctgacgcagctcatcgagagcttcgggcaagtggaggcaagaaaaggttaggcttaggctagaacagtgcatgcatggagctaaccgtggactaccatcgcaatggcagtacagtactggtgcagaatcttttatcttcacagtgaggccttg

SEQ ID NO: 50228 - DNA, 1403 bp, Zea Mays
ccggcccctgccccggaggttggaggcgcgagggcgatggcgctcctgcagcaccagcagcttcaacagcaacggcggcagctcgaggaggaggatgacgttcggcggggtggcggcgttcccggcagcgctgggccacgtggtaggtacatgaacggaagaacacaagacgatcattatcaagatctcaaaggtctcgatcccactcctgatagttggaagaatgggtgtcagcagagtgagggctatgggatacaggattccatttgcgatgatggtcacactgaaactgctaaaaccaagaagaagatggatgaatccttggagccaagtggggagaataataactgtgagcaagttgagatttcgagtaaggatggcaaaaaggtgcccatgaagttggaggtctcatctggagttcaaactacatcatccattatggaacaagaagtgcactcagggtttgttggggtagagtggcacatgcgggtggccttcgcctgcagcgtgtgcgggcagcgtacgaccagggccatcaatcctcatgcctacaccaatgagactgtgtttgttcagggtgttcagaagcacgaagagggtggaattgggattccacatcttaagtggttcggggtggaggggcagtacaatgtcatgttgtgcatgaatcgtgtttgtaagttccattttccatctaagaatttagtgtcatttttagttgttgagttgattttgcaaactgataagtgttttctttcatcagaggatggtcaagatgaatttgaaaagcgaacaaagaaaactaaaaagaaaaggaagagagtgttgtagaggagcaacggtgccaggacgcgtcaaggttgctccagaataaatggatcatagtgcggtggtcatgggattggaatctgctctgtatttacagggtgaagccttcgtgtctcctcacgggaaagtcactgacctttcttgggacgtggaccactgatggcccctgtcattccccatgacggcgatcccatggtgaagcctttgtgtttcctcgagggaaatctaccagtgcaagattggtttagtcagcaccattggacacatgtttcactgaatctaaacaattacacctagagcgtctctgcaattgtgacccttatttatcttatgtcctacaaagggcaaacgataaccatcttcaatgaacatacctaggattattgccatgtatctccaccttgctatccaactctgaatcaaccgtaggcgtccacagtgattattttataggatcaatggcagatacatgctcatttttttgtatgtttaagtactgatacatgccattgtgttgttgaaactttaatgctctattagaatatgtttttcttgatagttggtttctatacctg

SEQ ID NO: 50229 - DNA, 1861 bp, Zea Mays
atggcgctcctgcagcaccagcagcttcaacagcaacggcggcagctcgaggaggaggatgacgttcggcggggtggcggcgttcccggcagcgctgggccacgtggtaggtacatgaacggaagaacacaagacgatcattatcaagatctcaaaggtctcgatcccactcctgatagttggaagaatgggtgtcagcagagtgagggctatgggatacaggattccatttgcgatgatggtcacactgaaactgctaaaaccaagaagaagatggatgaatccttggagccaagtggggagaataataactgtgagcaagttgagatttcgagtaaggatggcaaaaaggtgcccatgaagttggaggtctcatctggagttcaaactacatcatccattatggaacaagaagtgcactcagggtttgttggggtagagtggcacatgcgggtggccttcgcctgcagcgtgtgcgggcagcgtacgaccagggccatcaatcctcatgcctacaccaatgagactgtgtttgttcagggtgttcagaagcacgaagagggtggaattgggattccacatcttaagtggttcggggtggaggggcagtacaatgtcatggtgattgatctgcttggtccaactatggagacttatttaactgctgcagcagaaagttctcacttaaaacagtactaatgcttgctgatcatatggtgagtctatcctatggttctacatttttcttgtatttgttttggacctgttgaaaccacatactgatgtagtgtcaataaattcttcactttgcatttccttggtctttgcaacaaaaataacatgccttggtgtgggatacagatcagtagagtagaatacatgcacacaagggggtttctacatcgtgacatcaagcctgataattttctcatgggtttaggacgtaaagcaaactaggtaactctacacaatggacagaatcatagctctattagcactattttatcaaggcaaccttcgactgcccgatgaagacctatggcttcctcacgcctgaattttggagccataccaagttttccatgactccgttccatcaatacacggacctgctggcgaaggctaccaagggtcttgtgctttaggcctgaactgagacagtagagccttatgatggtttgatgtgtctaaatgcactttcttatatttaagaactatgggagtcaactttggaccctgtttgctggccgctttgatgattttgccttttggtctatgacatgtctgatagtcaaatgaagcttttatttcaagccctgttgttgagagtgttgtagaggagcaacggtgccaggacgcgtcaaggttgctccagaataaatgggtgaagccttcgtgtctcctcacgggaaagtcactgacctttcttgggacgtggaccactgatggcccctgtcattccccatgacggcgatcccatggtgaagcctttgtgtttcctcgagggaaatctaccagtgcaagattggtttagtcagcaccattggacacatgtttcactgaatctaaacaattacacctagagcgtctctgcaattgtgacccttatttatcttatgtcctacaaagggcaaacgataaccatcttcaatgaacatacctaggattattgccatgtatctccaccttgctatccaactctgaatcaaccgtaggcgtccacagtgattattttataggatcaatggcagatacatgctcatttttttgtatgtttaagtactgatacatgccattgtgttgttgaaactttaatgctctattagaatatgtttttcttgatagttggtttctatacctg

SEQ ID NO: 50230 - DNA, 1404 bp, Zea Mays
atggcgctcctgcagcaccagcagcttcaacagcaacggcggcagctcgaggaggaggatgacgttcggcggggtggcggcgttcccggcagcgctgggccacgtggtaggtacatgaacggaagaacacaagacgatcattatcaagatctcaaaggtctcgatcccactcctgatagttggaagaatgggtgtcagcagagtgagggctatgggatacaggattccatttgcgatgatggtcacactgaaactgctaaaaccaagaagaagatggatgaatccttggagccaagtggggagaataataactgtgagcaagttgagatttcgagtaaggatggcaaaaaggtgcccatgaagttggaggtctcatctggagttcaaactacatcatccattatggaacaagaagtgcactcagggtttgttggggtagagtggcacatgcgggtggccttcgcctgcagcgtgtgcgggcagcgtacgaccagggccatcaatcctcatgcctacaccaatgagactgtgtttgttcagggtgttcagaagcacgaagagggtggaattgggattccacatcttaagtggttcggggtggaggggcagtacaatgtcatgttgtgcatgaatcgtgtttgtaagttccattttccatctaagaatttagtgtcatttttagttgttgagttgattttgcaaactgataagtgttttctttcatcagaggatggtcaagatgaatttgaaaagcgaacaaagaaaactaaaaagaaaaggaagaggtacctccatttgttcctactaggaataaatgtcaatagtgttgtagaggagcaacggtgccaggacgcgtcaaggttgctccagaataaatggatcatagtgcggtggtcatgggattggaatctgctctgtatttacagggtgaagccttcgtgtctcctcacgggaaagtcactgacctttcttgggacgtggaccactgatggcccctgtcattccccatgacggcgatcccatggtgaagcctttgtgtttcctcgagggaaatctaccagtgcaagattggtttagtcagcaccattggacacatgtttcactgaatctaaacaattacacctagagcgtctctgcaattgtgacccttatttatcttatgtcctacaaagggcaaacgataaccatcttcaatgaacatacctaggattattgccatgtatctccaccttgctatccaactctgaatcaaccgtaggcgtccacagtgattattttataggatcaatggcagatacatgctcatttttttgtatgtttaagtactgatacatgccattgtgttgttgaaactttaatgctctattagaatatgtttttcttgatagttggtttctatacctg

SEQ ID NO: 50231 - DNA, 1388 bp, Zea Mays
atggcgctcctgcagcaccagcagcttcaacagcaacggcggcagctcgaggaggaggatgacgttcggcggggtggcggcgttcccggcagcgctgggccacgtggtaggtacatgaacggaagaacacaagacgatcattatcaagatctcaaaggtctcgatcccactcctgatagttggaagaatgggtgtcagcagagtgagggctatgggatacaggattccatttgcgatgatggtcacactgaaactgctaaaaccaagaagaagatggatgaatccttggagccaagtggggagaataataactgtgagcaagttgagatttcgagtaaggatggcaaaaaggtgcccatgaagttggaggtctcatctggagttcaaactacatcatccattatggaacaagaagtgcactcagggtttgttggggtagagtaccttggtcgctcttgacgaaatcaccacagtggcacatgcgggtggccttcgcctgcagcgtgtgcgggcagcgtacgaccagggccatcaatcctcatgcctacaccaatgagactgtgtttgttcagggtgttcagaagcacgaagagggtggaattgggattccacatcttaagtggttcggggtggaggggcagtacaatgtcatgttgtgcatgaatcgtgtttgtaagttccattttccatctaagaatttagtgtcatttttagttgttgagttgattttgcaaactgataagtgttttctttcatcagaggatggtcaagatgaatttgaaaagcgaacaaagaaaactaaaaagaaaaggaagaggtacctccatttgttcctactaggaataaatgtcaatagtgttgtagaggagcaacggtgccaggacgcgtcaaggttgctccagaataaatgggtgaagccttcgtgtctcctcacgggaaagtcactgacctttcttgggacgtggaccactgatggcccctgtcattccccatgacggcgatcccatggtgaagcctttgtgtttcctcgagggaaatctaccagtgcaagattggtttagtcagcaccattggacacatgtttcactgaatctaaacaattacacctagagcgtctctgcaattgtgacccttatttatcttatgtcctacaaagggcaaacgataaccatcttcaatgaacatacctaggattattgccatgtatctccaccttgctatccaactctgaatcaaccgtaggcgtccacagtgattattttataggatcaatggcagatacatgctcatttttttgtatgtttaagtactgatacatgccattgtgttgttgaaactttaatgctctattagaatatgtttttcttgatagttggtttctatacctg

SEQ ID NO: 50232 - DNA, 1442 bp, Zea Mays
atggcgctcctgcagcaccagcagcttcaacagcaacggcggcagctcgaggaggaggatgacgttcggcggggtggcggcgttcccggcagcgctgggccacgtggtaggtacatgaacggaagaacacaagacgatcattatcaagatctcaaaggtctcgatcccactcctgatagttggaagaatgggtgtcagcagagtgagggctatgggatacaggattccatttgcgatgatggtcacactgaaactgctaaaaccaagaagaagatggatgaatccttggagccaagtggggagaataataactgtgagcaagttgagatttcgagtaaggatggcaaaaaggtgcccatgaagttggaggtctcatctggagttcaaactacatcatccattatggaacaagaagtgcactcagggtttgttggggtagagtggcacatgcgggtggccttcgcctgcagcgtgtgcgggcagcgtacgaccagggccatcaatcctcatgcctacaccaatgagactgtgtttgttcagggtgttcagaagcacgaagagggtggaattgggattccacatcttaagtggttcggggtggaggggcagtacaatgtcatgttgtgcatgaatcgtgtttgtaagttccattttccatctaagaatttagtgtcatttttagttgttgagttgattttgcaaactgataagtgttttctttcatcagaggatggtcaagatgaatttgaaaagcgaacaaagaaaactaaaaagaaaaggaagagagtgttgtagaggagcaacggtgccaggacgcgtcaaggttgctccagaataaatggatcatagtgcggtggtcatgggattggaatctgctctgtatttacagggaagcgataattgatcctgcagcaatttttgaacagttagaaaagagaaaattgatcccccaagcattagcagcaaaaagggtgcatttcttcaccttaataaaaaagcgacactgcaaggaggccaaagcctacgccgtgaccccctctagtaccctgctatggtgctgtcagcgcagccgcctcgcagaaaaaaatcgacactgcaaggaggtcaaagcctgcgccagtgaccccctcgagcaccctgctacggtgctacaagcgcagccgcctcgcaagttgatgttacggctgggcaaagtattgaaccctgaagagagccgtggcagcacccccaaaatggctccagttcaggccttccatagccatggcagacgcgacatctaggagcagatgcgacaggatcataagtaggagcggcaacgatgctgtagcgagagacgcgggtgacgaggtcgccgtgctgcggtggtggtaggacgggaaggagacgaaaaagtaggagtcagagctgttcaacaatgtgatcgagtcgctgagacgaggaag

SEQ ID NO: 50233 - DNA, 1546 bp, Zea Mays
gagcagtgagtgaggacgagacacgagaggatgccgtctccgtccgctgccaaagcggccacactccacacaggcaaaggcagagcccggccggggggcgtgaatcgtgccagtgccagtgccacccgccccgcagccctaacttgctggcggccgcctataaaatgctggaacactcgcctcgccgtcgccggggaccaaaccaactcgagtcatcgagttccacagctctcgcgtcgcgcgcagccaatccctctccctccggcctacacagcccacaactcccttctccatctctctctctctctctcgcccgtgtcgccccctgtttgtgtacaaccccatggcgacccacgccggcgagaacggcagcgggcacgagaacggcggcgggcacgcggagtggcggttcgcgcgggcggcgaaggagggcgcgctggccgttgcgggggacaagatgagcatccgggcggtgcggttcaagatcagcgcgagcctggacgcgcgcgacccgcggcccgtgctgccgctggcgcacggggacccctcggtgttcccggccttccgcaccgccgccgaggccgaggacgccgtggccgccgcgctccggaccggcaagttcaactgctaccccgccggcgtcggcctccccgaagcccgccgtgctctggcggagcacctgtcgagcgaccttccatacaagctgtcgagcgacgacatcttcgtcaccgccggaggcacgcaagccatcgaggtggtggtctcagtcctcgcgcagccgggcaccaacatactgctcccgaggccgggctatccgaactacgaggcgcgcgcagggctgcacaacctggaagttcgccggttcaatctgatccccgagagagggtgggagattgacatcgacggtctggagtcgatcgccgacaagaacaccaccgccatggtcatcataaaccccaacaacccttgcgggagtgtctacacccgagagcatttggccaaggtcgcggaggtggcaaggaagcttggaatactggtcatcgctgatgaggtgtacggaaatctggtgtttggggacacccctttcgtccccatgggtgtctttggccacattgcccctgtgttgaccataggatcactgtccaagagatggatagtgcctgggtggcgacttggttgggtggccgtatgtgatcccaacaaggttctgcaagaaaccaagatcattgcatcgatcacaaacttccttaacgtttcaacagatccggcaacttttgttcagggagcgcttccccatattcttaagaacacaaaggaagattttttcaagaggatcattggtctgctagcggaaacatcagagatatgtttcagcggaataaaggacatcaagtgcatcacatgccctcacaagccagaaggttccatgtttgtcatggtgaaactaaatttgtatcttttggagagcatccatgatgatattgatttttgttgcaagctggcaaaagaagagtccgtgattttgtgtccagcaattgtctgtttc

SEQ ID NO: 50234 - DNA, 1547 bp, Zea Mays
gagcagtgagtgaggacgagacacgagaggatgccgtctccgtccgctgccaaagcggccacactccacacaggcaaaggcagagcccggccggggggcgtgaatcgtgccagtgccagtgccacccgccccgcagccctaacttgctggcggccgcctataaaatgctggaacactcgcctcgccgtcgccggggaccaaaccaactcgagtcatcgagttccacagctctcgcgtcgcgcgcagccaatccctctccctccggcctacacagcccacaactcccttctccatctctctctctctctctcgcccgtgtcgccccctgtttgtgtacaaccccatggcgacccacgccggcgagaacggcagcgggcacgagaacggcggcgggcacgcggagtggcggttcgcgcgggcggcgaaggagggcgcgctggccgttgcgggggacaagatgagcatccgggcggtgcggttcaagatcagcgcgagcctggacgcgcgcgacccgcggcccgtgctgccgctggcgcacggggacccctcggtgttcccggccttccgcaccgccgccgaggccgaggacgccgtggccgccgcgctccggaccggcaagttcaactgctaccccgccggcgtcggcctccccgaagcccgccgtgctctggcggagcacctgtcgagcgaccttccatacaagctgtcgagcgacgacatcttcgtcaccgccggaggcacgcaagccatcgaggtggtggtctcagtcctcgcgcagccgggcaccaacatactgctcccgaggccgggctatccgaactacgaggcgcgcgcagggctgcacaacctggaagttcgccggttcaatctgatccccgagagagggtgggagattgacatcgacggtctggagtcgatcgccgacaagaacaccaccgccatggtcatcataaaccccaacaacccttgcgggagtgtctacacccgagagcatttggccaaggtcgcggaggtggcaaggaagcttggaatactggtcatcgctgatgaggtgtacggaaatctggtgtttggggacacccctttcgtccccatgggtgtctttggccacattgcccctgtgttgaccataggatcactgtccaagagatggatagtgcctgggtggcgacttggttgggtggccgtatgtgatcccaacaaggttctgcaagaaaccaagatcattgcatcgatcacaaacttccttaacgtttcaacagatccggcaacttttgttcagggagcgcttccccatattcttaagaacacaaaggaagattttttcaagaggatcattggtctgctagcggaaacatcagagatatgtttcagcggaataaaggacatcaagtgcatcacatgccctcacaagccagaaggtgaaactaaatttgtatcttttggagagcatccatgatgatattgatttttgttgcaagctggcaaaagaagagtccgtgattttgtgtccaggttacaagtattccatgcttaactgtacgttt

SEQ ID NO: 50235 - DNA, 2024 bp, Zea Mays
aatcgtgccagtgccagtgccacccgccccgcagccctaacttgctggcggccgcctataaaatgctggaacactcgcctcgccgtcgccggggaccaaaccaactcgagtcatcgagttccacagctctcgcgtcgcgcgcagccaatccctctccctccggcctacacagcccacaactcccttctccatctctctctctctctctcgcccgtgtcgccccctgtttgtgtacaaccccatggcgacccacgccggcgagaacggcagcgggcacgagaacggcggcgggcacgcggagtggcggttcgcgcgggcggcgaaggagggcgcgctggccgttgcgggggacaagatgagcatccgggcggtgcggttcaagatcagcgcgagcctggacgcgcgcgacccgcggcccgtgctgccgctggcgcacggggacccctcggtgttcccggccttccgcaccgccgccgaggccgaggacgccgtggccgccgcgctccggaccggcaagttcaactgctaccccgccggcgtcggcctccccgaagcccgccgtgctctggcggagcacctgtcgagcgaccttccatacaagctgtcgagcgacgacatcttcgtcaccgccggaggcacgcaagccatcgaggtggtggtctcagtcctcgcgcagccgggctatccgaactacgaggcgcgcgcagggctgcacaacctggaagttcgccggttcaatctgatccccgagagagggtgggagattgacatcgacggtctggagtcgatcgccgacaagaacaccaccgccatggtcatcataaaccccaacaacccttgcgggagtgtctacacccgagagcatttggccaaggtcgcggaggtggcaaggaagcttggaatactggtcatcgctgatgaggtgtacggaaatctggtgtttggggacacccctttcgtccccatgggtgtctttggccacattgcccctgtgttgaccataggatcactgtccaagagatggatagtgcctgggtggcgacttggttgggtggccgtatgtgatcccaacaaggttctgcaagaaaccaagatcattgcatcgatcacaaacttccttaacgtttcaacagatccggcaacttttgttcagggagcgcttccccatattcttaagaacacaaaggaagattttttcaagaggatcattggtctgctagcggaaacatcagagatatgtttcagcggaataaaggacatcaagtgcatcacatgccctcacaagccagaaggttccatgtttgtcatggtgaaactaaatttgtatcttttggagagcatccatgatgatattgatttttgttgcaagctggcaaaagaagagtccgtgattttgtgtccagggagtgttttgggaatggaaaactggatccgtatcactttcgccattgattcatcttctcttcttgatggtcttgagaggctgaaatctttctgccaaaggcataagaagaagaatttgcttaatggccattaactatattcgacttcaaagttgttacccacttccatcgttttccactgtatcatcaacaaaagtgtaacattgaaatccctcagaagtaataaagttaatgtttacatatgaggatatgcatgtcagtgtacatttttagtcaccttaatcctctgttttgaaatctttcgattttgcatttgtttcagttttccattacaatgttcttttcttttaatttgacatcacttataagtgtggtgatggtgacacctgttccaatgtactaaaggttacaattggggacaaattattatgtagtatgtcggttgtgaagtttgaagacagccgaaagttctatttttgtgttgagagaaaatttacatctccaatatttgatgacataattaaggatgaattcttatttggcaaatttaaattgcttagagagatcaaatgtattgataaatggactggactcataagtcgttataagaaaataccaaaa

SEQ ID NO: 50236 - DNA, 1499 bp, Zea Mays
cgctgcggctgctctggcggagcacctgtcgagcgaccttccatacaagctgtcgagcgacgacatcttcgtcaccgccggaggcacgcaagccatcgaggtggtggtctcagtcctcgcgcagccgggcaccaacatactgctcccgaggccgggctatccgaactacgaggcgcgcgcagggctgcacaacctggaagttcgccggttcaatctgatccccgagagagggtgggagattgacatcgacggtctggagtcgatcgccgacaagaacaccaccgccatggtcatcataaaccccaacaacccttgcgggagtgtctacacccgagagcatttggccaaggtcgcggaggtggcaaggaagcttggaatactggtcatcgctgatgaggtgtacggaaatctggtgtttggggacacccctttcgtccccatgggtgtctttggccacattgcccctgtgttgaccataggatcactgtccaagagatggatagtgcctgggtggcgacttggttgggtggccgtatgtgatcccaacaaggttctgcaagaaaccaagatcattgcatcgatcacaaacttccttaacgtttcaacagatccggcaacttttgttcagggagcgcttccccatattcttaagaacacaaaggaagattttttcaagaggatcattggtctgctagcggaaacatcagagatatgtttcagcggaataaaggacatcaagtgcatcacatgccctcacaagccagaaggttccatgtttgtcatggtgaaactaaatttgtatcttttggagagcatccatgatgatattgatttttgttgcaagctggcaaaagaagagtccgtgattttgtgtccagggagtgttttgggaatggaaaactggatccgtatcactttcgccattgattcatcttctcttcttgatggtcttgagaggctgaaatctttctgccaaaggcataagaagaagaatttgcttaatggccattaactatattcgacttcaaagttgttacccacttccatcgttttccactgtatcatcaacaaaagtgtaacattgaaatccctcagaagtaataaagttaatgtttacatatgaggatatgcatgtcagtgtacatttttagtcaccttaatcctctgttttgaaatctttcgattttgcatttgtttcagttttccattacaatgttcttttcttttaatttgacatcacttataagtgtggtgatggtgacacctgttccaatgtactaaaggttacaattggggacaaattattatgtagtatgtcggttgtgaagtttgaagacagccgaaagttctatttttgtgttgagagaaaatttacatctccaatatttgatgacataattaaggatgaattcttatttggcaaatttaaattgcttagagagatcaaatgtattgataaatggactggactcataagtcgttataagaaaataccaaaa

SEQ ID NO: 50237 - DNA, 1950 bp, Zea Mays
caagcacgcgtccgacgtgtcatgcacgcgtccgacgtggcacgccacctgctctgtggctccgtagccgggggggccgggctgctgtagcctgacgtttccggcaaaaccacctctgaactctgaactgaaccaagttttcggcaaccaagggggaaaaaaaggcttttcgtcatgatggagacgtgtcttaataatcccttaattcttcctactactagtaatctactaacacggcacaaacgagtacgtatttcgaaacgcgaaaggaaaccacctggcacctgctgccttgctggagtggacttgcttgttctgatgaagcactcgatcggacttgctgtcagcaactctcagcatacaggactctcaagacaggccaaacactgccaaatacacacaaacattccggtagttagtaactacgcgataaataattggcagaatattgtctaaaaagtgctctggcggagcacctgtcgagcgaccttccatacaagctgtcgagcgacgacatcttcgtcaccgccggaggcacgcaagccatcgaggtggtggtctcagtcctcgcgcagccgggcaccaacatactgctcccgaggccgggctatccgaactacgaggcgcgcgcagggctgcacaacctggaagttcgccggttcaatctgatccccgagagagggtgggagattgacatcgacggtctggagtcgatcgccgacaagaacaccaccgccatggtcatcataaaccccaacaacccttgcgggagtgtctacacccgagagcatttggccaaggtcgcggaggtggcaaggaagcttggaatactggtcatcgctgatgaggtgtacggaaatctggtgtttggggacacccctttcgtccccatgggtgtctttggccacattgcccctgtgttgaccataggatcactgtccaagagatggatagtgcctgggtggcgacttggttgggtggccgtatgtgatcccaacaaggttctgcaagaaaccaagatcattgcatcgatcacaaacttccttaacgtttcaacagatccggcaacttttgttcagggagcgcttccccatattcttaagaacacaaaggaagattttttcaagaggatcattggtctgctagcggaaacatcagagatatgtttcagcggaataaaggacatcaagtgcatcacatgccctcacaagccagaaggttccatgtttgtcatggtgaaactaaatttgtatcttttggagagcatccatgatgatattgatttttgttgcaagctggcaaaagaagagtccgtgattttgtgtccagggagtgttttgggaatggaaaactggatccgtatcactttcgccattgattcatcttctcttcttgatggtcttgagaggctgaaatctttctgccaaaggcataagaagaagaatttgcttaatggccattaactatattcgacttcaaagttgttacccacttccatcgttttccactgtatcatcaacaaaagtgtaacattgaaatccctcagaagtaataaagttaatgtttacatatgaggatatgcatgtcagtgtacatttttagtcaccttaatcctctgttttgaaatctttcgattttgcatttgtttcagttttccattacaatgttcttttcttttaatttgacatcacttataagtgtggtgatggtgacacctgttccaatgtactaaaggttacaattggggacaaattattatgtagtatgtcggttgtgaagtttgaagacagccgaaagttctatttttgtgttgagagaaaatttacatctccaatatttgatgacataattaaggatgaattcttatttggcaaatttaaattgcttagagagatcaaatgtattgataaatggactggactcataagtcgttataagaaaataccaaaa

SEQ ID NO: 50238 - DNA, 1192 bp, Zea Mays
cacctccctaaatagaaaacaacacaagtcaccatcgaatagaaacgaaatatttttaatccgcttttcggttggtggtgcctggcatctaccgtgcggagggggaagagggagaggccaggagaggaaagcctgcagccaccatggattccgacctctggatctcgcgtctcacggccgccaagcggcagtttgcgctgcagcgcgcgcagcgccagcacgccgccccggcatcccatcacgatcatgatgttgcttctctctgcgcccatttggaggacgagcaccctttcgagtctaaaattgtgaaacatcaaagagtacgcagagttactggtaatggcaaccacaatctctcctatgcagggagagatcttcaactgcaagagacctacttaaaggtgcttcttggaaatagcagtcgaagcagcagtaccaatgcatcaagtacagtcaccgattcactgctaccctcactagttttaaatttatcatcaccagaagtagaagacgcatcaaagttttcagctcctgctgtggtggaaaataattggtttaaacgatcactgccttcaaaaacttggaaattaagaactgttgattccacccttagtcatgaagagagggagcgtaggaggaggagagctgctgtgagatcagcttttgtccagcatctccttgtcaccaccatttttgaagactagcagatcaagcacagctcatgcaaaggaatcttgtgggcgggccttttgcccactcatttatctggatggataaggcactaattatcttggataccatcacgctgttcatccggtctgctgggtaaccatgacaggaaaaatgaagcagcgggcgtcttaccttatatatgttctctggaagcagctgacatttgttttctggatcatattcataattctatgtaggctgtgacaggaatctctatagtagagccatgatttttttttggttgggtttcagcctgcgttggagaatatgcccaatttttttttttggagaatatgccttatctggatggataaggcactaaacatttgaagattatatttcggagggtggagaatatgacaatttgatttatatcactaaacatttgaagattatgtttcggagtttggtacttgtttcttcttaatattcttaatataatgatgtgtgtttctttggt

SEQ ID NO: 50239 - DNA, 1395 bp, Zea Mays
ggtagggatcgagcctgccggccggctcagatgtagatatgataggggtggcttttgcatttgcacgcaaaaacactgaccagcggtagctagcttagctagctagtacgtagagttcttcatccacagtcgtccacaccccacccgcgggccagcacttcaatggcggcggcgcctcctgccgcagaggcagctcttcttctcctcctagcattactggcactcgccgcggtggctctgagacgcggcgatgcgctgagcctggatttgtacgacgtgacctgcccggaggtggaggcggcggtgacggcggccgtgcggcaggccatggccaacgaccgcacagtggcggccggactcctccgaatgcatttccacgactgcttcgtgaggcagggctgcgacggctccgttctcctggactccacggccaccgtgacggcggagaaggacggcccgcccaacgcgtcgctgcacgccttctacgtcatcgacaacgccaagcgtgccgtggaggccctctgccccggcgtcgtctcctgcgccgacatcctcgccctcgccgcaagggacgccgtcgcgctgtccggtggtccgtggtgggtggtgcccgtggggcggcgggacgggcgcgtgtccctggccaacgagaccacggcggcgctgccggggccgacggccagcttcgaccagctgaagcaggcgttccacggccgcgggctgtccaccaaggacctggtggcgctgtcgggcgcccacacgctgggcttcgcgcactgctcctccttccagaaccgcatcctccgagcccagcagggcgtcgccgccgccgacgacccttccctcagcccctccttcgccgccgcccttcgccgtgcgtgccccgccaacaacaccgtccgcgccgccggctccgccctggacgccacctccgcggccttcgacaacacctactaccggatgctgcaggccggccggggcctgctctcctccgacgaggcgctgctcacgcaccccaagacgcgcgcctttgtcgcgctctacgccgcgtcgcaggaggcattcttcagggcctttacaaaatccatgctgcggatggccggcctcaacggaggccaagaggtgcgagccaactgcaggcgagttaacccatcatgatccatcctatccatgatgccatcatcattccattccattctcgtcctccgatcctcctcgtctatacactactactagtatattaattgtactattgtactgtacgtactgcctcctctgcctgtaccattatattatacagtattcgtcgtccgcacgtatttgcatcgcatccagtgccagtactcgatccggcgtgtgggggctgggctggctatatacatgcatataacatgc

SEQ ID NO: 50240 - DNA, 1520 bp, Zea Mays
gaaaaatcgcaccatctagaggtttatgaagcctccaaaaaaatatctaaacaacaactacttcctagtataaagtgacagtagcgggggagaagggaaccgaaaccaagcaacccaatccaaaccagacaagcaaggaatcccccgatggctcatcgcgttctcctcctcctctctctcgcgtcggccgccgcggttgccgccgccgtcgacgcggaggacccgctgatccggcaggtggttcccggtggagatgacaacgatctggagctgaacgcggagtcccacttcctgagcttcgtgcagcggttcggcaagtcctacaaggacgccgacgagcacgcgtaccggctgtccgttttcaaggccaacctgcgccgcgcgcgccggcaccagctgctggacccgtcggcggagcacggcgtcactaagttctccgacctcacgccggcagagttccgccggacctacctcggcctccgcaagtcccggcgcgctctcctcagagaactcggggagtcggcgcacgaggcgcccgtgctccccaccgatggtctccccgacgatttcgactggagggaccacggcgccgtcggccccgtcaagaaccagggttcgtgcgggtcgtgctggtcgttcagcgcgtctggagcgctggagggtgcgcactacctcgcaactggcaagctggaggtgctttcggagcagcagttcgtcgactgtgaccacgagtgtgattcatcggagcctgattcatgtgattcgggttgcaatggtgggctaatgacgacggcattcagttatctccagaaggccggtggccttgagagtgagaaggattacccttacactgggagtgatggcaaatgcaagtttgacaagtccaagattgttgcttcagttcagaacttcagtgttgtgtctgtggacgaggctcaaatttctgctaacctcatcaaacatgggccattggcaatcggcatcaatgctgcctacatgcagacatacatcggaggcgtgtcatgcccatacatctgtggcaggcaccttgaccatggtgttctccttgttggatatggtgcttctggtttcgcccccattcgcctgaaggacaagccttactggatcatcaagaactcgtggggcgagaactggggggagaacggatactacaagatatgcaggggttccaacgttcgcaacaagtgcggcgtcgattccatggtctctaccgtgtccgcagtccacgcctcgaaggagtagactctggtcagcggtgataatcgtgattccatatattgtagaactataatccctgctagtaatccatttgtgctgtttatgtatcgaaggcagcaaagatgtgtgaagcggcaatgggatgcttgctgtaaggtaatatgtttggcttgctaggcatgctacacgctatttggatgtagcaacgttatcaccagctgtatacgctttttaatcgacaacatttgaataatatgtacataacattatgttaaaaaaac

SEQ ID NO: 50241 - DNA, 1519 bp, Zea Mays
gcaccatctagaggtttatgaagcctccaaaaaaatatctaaacaacaactacttcctagtataaagtgacagtagcgggggagaagggaaccgaaaccaagcaacccaatccaaaccagacaagcaaggaatcccccgatggctcatcgcgttctcctcctcctctctctcgcgtcggccgccgcggttgccgccgccgtcgacgcggaggacccgctgatccggcaggtggttcccggtggagatgacaacgatctggagctgaacgcggagtcccacttcctgagcttcgtgcagcggttcggcaagtcctacaaggacgccgacgagcacgcgtaccggctgtccgttttcaaggccaacctgcgccgcgcgcgccggcaccagctgctggacccgtcggcggagcacggcgtcactaagttctccgacctcacgccggcagagttccgccggacctacctcggcctccgcaagtcccggcgcgctctcctcagagaactcggggagtcggcgcacgaggcgcccgtgctccccaccgatggtctccccgacgatttcgactggagggaccacggcgccgtcggccccgtcaagaaccagggttcgtgcgggtcgtgctggtcgttcagcgcgtctggagcgctggagggtgcgcactacctcgcaactggcaagctggaggtgctttcggagcagcagttcgtcgactgtgaccacgagtgtgattcatcggagcctgattcatgtgattcgggttgcaatggtgggctaatgacgacggcattcagttatctccagaaggccggtggccttgagagtgagaaggattacccttacactgggagtgatggcaaatgcaagtttgacaagtccaagattgttgcttcagttcagaacttcagtgttgtgtctgtggacgaggctcaaatttctgctaacctcatcaaacatgggccattggcaatcggcatcaatgctgcctacatgcagacatacatcggaggcgtgtcatgcccatacatctgtggcaggcaccttgaccatggtgttctccttgttggatatggtgcttctggtttcgcccccattcgcctgaaggacaagccttactggatcatcaagaactcgtggggcgagaactggggggagaacggatactacaagatatgcaggggttccaacgttcgcaacaagtgcggcgtcgattccatggtctctaccgtgtccgcagtccacgcctcgaaggagtagactctggtcagcggtgataatcgtgattccatatattgtagaactataatccctgctagtaatccatttgtgctgtttatgtatcgaaggcagcaaagatgtgtgaagcggcaatgggatgcttgctgtaaggtaatatgtttggcttgctaggcatgctacacgctatttggatgtagcaacgttatcaccagctgtatacgctttttaatcgacaacatttgaataatatgtacataacattatgttgtgctctaaaaaaac

SEQ ID NO: 50242 - DNA, 944 bp, Zea Mays
gtgcatgagtattgcacatgtgtgaagctaatgccatgagacgggacccatatattttgtgattcatcggagcctgattcatgtgattcgggttgcaatggtgggctaatgacgacggcattcagttatctccagaaggccggtggccttgagagtgagaaggattacccttacactgggagtgatggcaaatgcaagtttgacaagtccaagattgttgcttcagttcagaacttcagtgttgtgtctgtggacgaggctcaaatttctgctaacctcatcaaacatgggccattggcaatcggcatcaatgctgcctacatgcagacatacatcggaggcgtgtcatgcccatacatctgtggcaggcaccttgaccatggtgttctccttgttggatatggtgcttctggtttcgcccccattcgcctgaaggacaagccttactggatcatcaagaactcgtggggcgagaactggggggagaacggatactacaagatatgcaggggttccaacgttcgcaacaagtgcggcgtcgattccatggtctctaccgtgtccgcagtccacgcctcgaaggagtagactctggtcagcggtgataatcgtgattccatatattgtagaactataatccctgctagtaatccatttgtgctgtttatgtatcgaaggcagcaaagatgtgtgaagcggcaatgggatgcttgctgtaaggtaatatgtttggcttgctaggcatgctacacgctatttggatgtagcaacgttatcaccagctgtatacgctttttaatcgacaacatttgaataatatgtacataacattatgttgtgctctgttctctgtctgtttgatgtgcttatgggttttgatctgtagcttacataacctgattgtgaaaactcaaacatactgccgagcccgatagatcctacgg

SEQ ID NO: 50243 - DNA, 878 bp, Zea Mays
cctccacgtagctctcctcttcacatcacacaacgccggaggcctgtcgtgcagccgccgctagagacctgtcgcgcagccaccaccgaaggcctgtcgcgcagccaccaccgaaggcctgtcgcgcagccgccgccgccggagacctgtcgcacagcagctgccgccgggcttgggcgctgctagggggacgaggactccataggtgatccgcgggggatgggtcgtgggcgctgccaggggacgaggactccgtaggcgatctgcgggggacgacaagaattgctctgctttgcacgtgctgccagtctgcctgtgctaccaaatttcaacctcgacatcgacgcgcatcaccaatttgttgcgcctgttgttgtattctgggtactccgtagatagaaaagacagattatttgatagtgatggacaaatcttggatcaatgcaacactatttagcaagccacacctagaaggagttagtgagttcatgaagcttgtaatagagcgatttaatgcgaatgaagagatactttgtccatgccgcaagtgtttgaatcggcttagtggacatagaggacaggtggaggaccacttatatcttcatgggatggctagtacatacactaggtggatgtatcatggagaagccatggatgacataattaatgaaaatggtgaccacgaggatgaacatgtgagtttcaatgatgatgttggtatgaatcaagatgaagaagaacctgatgataggattaatggtatggtagaggagttatacacagccgaagatcaagataaaaggaaatctatgtttggagatatactaaaggagatgaaacaagaactttatcctggtgcaacttatacaagattttct

SEQ ID NO: 50244 - DNA, 3672 bp, Zea Mays
cgaggacttgagttatcttgggactcgggacttcgtgagtcggggactcgggaaccggagcacacaccaaaacccccagtgccgccggcggacgccctccagtttccggtcttcactaactccccgttttccgtactgctgcggcgcctcggcagtcggcaccacagccggcaagatgccccccttccgaatgccttcccacttcctcgcgcttccgctcctactcttgctgctcctccaggcgccgtccccggaggcggccgagtctacgccggggacccggacgcgcaagatcggcagctcgggggcgtcctcggtgttctcgctctttaacctcaaggacaagagcaagttctggactgagtcgatcatccgtaaagagttcgatgacttggaaggttctgcgtcgcgggactctagcaaaaacggcctgctcaacttcacaagagctggtaatattgcaaactatttgagcctggcagaggttgattccatatatcttccgatccctgtgaacttcatctttattggatttgatggaaatggacggcatgagtttaagttggggcctgaagaactggagcgctggtttacaaaaatagatcacatatttgagcacacaagaatccctccagttggtgaagttcttaccccgttctataagactactgttaagaaacttcagcattatgatcttcctttagtcagccatgtgaaccacaatttctctgtgcatgccatacacatgggagaagatgtcttatctgtttttgagcatgctataaaagttctatcctgtaaagatgatctcgtggattccagagaaaatgaagagatttttttgcaagtggatagtgctcaaatggaacatatattttcaactcttgttgatcaccttcagatacaagaggcttacaatatctttgttctgaaccccaagcctattggcaagaggattaattatggttatcggaaaggcttctctgagtctgagatcaatttgctcagggagaacaagaccctgcaagctcggatactccagtctaaaagtgacaacaaactcttccttgatatcgagaagggagtcaatagaaggccgttatatgaaagtcatcctctatcatcattttcatggacccgaactgacagtatggatatgggggattggtcaaagaaatgcaaggaagcattaagcaagtttgagctgctgaaggaagggaagagtaaagaggacattgtttatgaaaaggctgttcagatattacacggtacaaaggatgaggtgcatgacattgttcaaagtgctcttaagtccagtgatttgaagggtctccatgcccaatgtcttacagatatatggataggcagagagaggtttgcttttgttgatctgagtgcagggccatttgcctgggggccttctgttggtggtgatggtgtccgtacagaacttagtctgccaaatgttgcaaagactgtcggggctgttgcagaagttacagaagaagaagctgaagaaaaattgcaagacacaataagggagaggttttcgtcctttggtgaggattaccatgctgttgatattctattagcagagattgatgtgtatgaactttttgctttcaagcattgtgtgggaagaaggatacagcttgccctttgtaaagaacttgatgagaggatgcatgacctgaaaaaggaactggagggttacaatactggagattttgatgaaactaacaagaagaaagctcttgatgcactgaagagaatggaaagctggaacttattcagagatacttcagtggaacatcatagttacacagtggctcatgattcatttcttgcacaacttggatctatgttatggggctctatgaggcatgtaattgctccttctgcctctcatagagtgtaccattactatgagaagttatcgtttcagttgtattttgtgacacgagagaaagtcaggagtataaagcagttacctgttaatgtaaaatccatcagggagagcctgaattctgtgctattacatcatcaaaactccatgtttagccaaaacatgctgtcattgtcagaggatccatcattgatgatggcattttcaatggcacgtcgtgcagctgcggtgccgcttctattagtcaatggcacctataagtcaactgttagcacataccttgattctgctattctccaacatcagctacagaagctaaatgagcacaattcactgaaaggaaggcattcaaatcacaggtcaacattagaggtcccaatattctggttcatacataatgaacccatattattggacaaacattatcaagccaaggctctctcaaatatggtcgtagtagttcagtcagatgatgattcctgggaaagccatttgcagtgcaatggaagacccatcttatgggatttgaggaaaccggttaaagctgctattgctgcaactgctgagtatgtatctggtctacttcctccacatctggtttatagccatgctcatgaaactgcaattgaggactggacctggtctgtgggttgtaatccctcagctgtgacttctgaaggttcacaactttcagagttccagcaagatgtgattgctcgtaactatattattacttcagtggaggaatccattcaagtaatcaattcagcaattcagcaattggtaatagagcggactactgaaaaaggcttcaaaattttcaaggctcacgaaagtaagatggttgagaagtacaatgccgttgttagcttgtggagaagagtatcggctatgtccaagggattgcgatatggtgatgcagtaaaacttatgtcaatgcttgaggatgcttcaaatgggttttctagtgctgtgaactccaccatttcaagtctgcaccctgtccaatgcacccgcgaaaggaaggtcgacgtgcagctagacttgacaacacttcctgcttttctagctgtatttttgttgctttggtttcttctacgtccaaggagaccgaagcctaagatcaactgaacaccgagccaatgagcagcataggccatagagtttttgtgaatacgcgcatggattacagatggcgctggagcatggcccgggaattccaaaggtccaaaacaccgggtggcagggaacaaggtttcagaagattgcaatcctgacacatccccaagttgtagcagagttggaatgtcatgaaaactttaattcattcagtcctgtcctcgttccgggtttagccaattcttcctcgttccgggtaaggccttgttcgtttgtgtcggattggtgggtcggaacaattcccggccggattgcttctctaatttatataaactttgattagccggaacgattccgggtgcaatccgacgcaaacgaacaagccctaactgagattaatttgtccttgctgtaatgtttagccagtcctgccccgatccggggaactgagagattgtctttatcgcaacattaacggctagcggttagtatcatcttccagtcacctggaatgttactagtacaatccaattgtctgtttcctgccgcttacatgtaaaagtccatactcaagttttacagaaagaaacatgttctgtcatttattacaaaataaagccaaatagtaaaatgttatgtgtacgtag

SEQ ID NO: 50245 - DNA, 2498 bp, Zea Mays
ggactcgggacttcgtgagtcggggactcgggaaccggagcacacaccaaaacccccagtgccgccggcggacgccctccagtttccggtcttcactaactccccgttttccgtactgctgcggcgcctcggcagtcggcaccacagccggcaagatgccccccttccgaatgccttcccacttcctcgcgcttccgctcctactcttgctgctcctccaggcgccgtccccggaggcggccgagtctacgccggggacccggacgcgcaagatcggcagctcgggggcgtcctcggtgttctcgctctttaacctcaaggacaagagcaagttctggactgagtcgatcatccgtaaagagttcgatgacttggaaggttctgcgtcgcgggactctagcaaaaacggcctgctcaacttcacaagagctggtaatattgcaaactatttgagcctggcagaggttgattccatatatcttccgatccctgtgaacttcatctttattggatttgatggaaatggacggcatgagtttaagttggggcctgaagaactggagcgctggtttacaaaaatagatcacatatttgagcacacaagaatccctccagttggtgaagttcttaccccgttctataagactactgttaagaaacttcagcattatgatcttcctttagtcagccatgtgaaccacaatttctctgtgcatgccatacacatgggagaagatgtcttatctgtttttgagcatgctataaaagttctatcctgtaaagatgatctcgtggattccagagaaaatgaagagatttttttgcaagtggatagtgctcaaatggaacatatattttcaactcttgttgatcaccttcagatacaagaggcttacaatatctttgttctgaaccccaagcctattggcaagaggattaattatggttatcggaaaggcttctctgagtctgagatcaatttgctcagggagaacaagaccctgcaagctcggatactccagtctaaaagtgacaacaaactcttccttgatatcgagaagggagtcaatagaaggccgttatatgaaagtcatcctctatcatcattttcatggacccgaactgacagtatggatatgggggattggtcaaagaaatgcaaggaagcattaagcaagtttgagctgctgaaggaagggaagagtaaagaggacattgtttatgaaaaggctgttcagatattacacggtacaaaggatgaggtgcatgacattgttcaaagtgctcttaagtccagtgatttgaagggtctccatgcccaatgtcttacagatatatggataggcagagagaggtttgcttttgttgatctgagtgcagggccatttgcctgggggccttctgttggtggtgatggtgtccgtacagaacttagtctgccaaatgttgcaaagactgtcggggctgttgcagaagttacagaagaagaagctgaagaaaaattgcaagacacaataagggagaggttttcgtcctttggtgaggattaccatgctgttgatattctattagcagagattgatgtgtatgaactttttgctttcaagcattgtgtgggaagaaggatacagcttgccctttgtaaagaacttgatgagaggatgcatgacctgaaaaaggaactggagggttacaatactggagattttgatgaaactaacaagaagaaagctcttgatgcactgaagagaatggaaagctggaacttattcagagatacttcagtggaacatcatagttacacagtggctcatgattcatttcttgcacaacttggatctatgttatggggctctatgaggcatgtaattgctccttctgcctctcatagagtgtaccattactatgagaagttatcgtttcagttgtattttgtgacacgagagaaagtcaggagtataaagcagttacctgttaatgtaaaatccatcagggagagcctgaattctgtgctattacatcatcaaaactccatgtttagccaaaacatgctgtcattgtcagaggatccatcattgatgatggcattttcaatggcacgtcgtgcagctgcggtgccgcttctattagtcaatggcacctataagtcaactgttagcacataccttgattctgctattctccaacatcagctacagaagctaaatgagcacaattcactgaaaggaaggcattcaaatcacaggtcaacattagaggtcccaatattctggttcatacataatgaacccatattattggacaaacattatcaagccaaggctctctcaaatatggtcgtagtagttcagtcagatgatgattcctgggaaagccatttgcagtgcaatggaagacccatcttatgggatttgaggtaaaaagaggatcagtcaccttaccgcctaaaaagactcgccttacgctttaccgtttaaaaggtaaaaagaggatcagtc

SEQ ID NO: 50246 - DNA, 1802 bp, Zea Mays
cgtgagtcggggactcgggaaccggagcacacaccaaaacccccagtgccgccggcggacgccctccagtttccggtcttcactaactccccgttttccgtactgctgcggcgcctcggcagtcggcaccacagccggcaagatgccccccttccgaatgccttcccacttcctcgcgcttccgctcctactcttgctgctcctccaggcgccgtccccggaggcggccgagtctacgccggggacccggacgcgcaagatcggcagctcgggggcgtcctcggtgttctcgctctttaacctcaaggacaagagcaagttctggactgagtcgatcatccgtaaagagttcgatgacttggaaggttctgcgtcgcgggactctagcaaaaacggcctgctcaacttcacaagagctggtaatattgcaaactatttgagcctggcagaggttgattccatatatcttccgatccctgtgaacttcatctttattggatttgatggaaatggacggcatgagtttaagttggggcctgaagaactggagcgctggtttacaaaaatagatcacatatttgagcacacaagaatccctccagttggtgaagttcttaccccgttctataagactactgttaagaaacttcagcattatgatcttcctttagtcagccatgtgaaccacaatttctctgtgcatgccatacacatgggagaagatgtcttatctgtttttgagcatgctataaaagttctatcctgtaaagatgatctcgtggattccagagaaaatgaagagatttttttgcaagtggatagtgctcaaatggaacatatattttcaactcttgttgatcaccttcagatacaagaggcttacaatatctttgttctgaaccccaagcctattggcaagaggattaattatggttatcggaaaggcttctctgagtctgagatcaatttgctcagggagaacaagaccctgcaagctcggatactccagtctaaaagtgacaacaaactcttccttgatatcgagaagggagtcaatagaaggccgttatatgaaagtcatcctctatcatcattttcatggacccgaactgacagtatggatatgggggattggtcaaagaaatgcaaggaagcattaagcaagtttgagctgctgaaggaagggaagagtaaagaggacattgtttatgaaaaggctgttcagatattacacggtacaaaggatgaggtgcatgacattgttcaaagtgctcttaagtccagtgatttgaagggtctccatgcccaatgtcttacagatatatggataggcagagagaggtttgcttttgttgatctgagtgcagggccatttgcctgggggccttctgttggtggtgatggtgtccgtacagaacttagtctgccaaatgttgcaaagactgtcggggctgttgcagaagttacagaagaagaagctgaagaaaaattgcaagacacaataagggagaggttttcgtcctttggtgaggattaccatgctgttgatattctattagcagagattgatgtgtatgaactttttgctttcaagcattgtgtgggaagaaggatacagcttgccctttgtaaagaacttgatgagaggatgcatgacctgaaaaaggaactggagggttacaatactggagattttgatgaaactaacaagaagaaagctcttgatgcactgaagagaatggaaagctggaacttattcagagatacttcagtgtattctgatgacagagttaatcttttaa

SEQ ID NO: 50247 - DNA, 3636 bp, Zea Mays
cgtgagtcggggactcgggaaccggagcacacaccaaaacccccagtgccgccggcggacgccctccagtttccggtcttcactaactccccgttttccgtactgctgcggcgcctcggcagtcggcaccacagccggcaagatgccccccttccgaatgccttcccacttcctcgcgcttccgctcctactcttgctgctcctccaggcgccgtccccggaggcggccgagtctacgccggggacccggacgcgcaagatcggcagctcgggggcgtcctcggtgttctcgctctttaacctcaaggacaagagcaagttctggactgagtcgatcatccgtaaagagttcgatgacttggaaggttctgcgtcgcgggactctagcaaaaacggcctgctcaacttcacaagagctggtaatattgcaaactatttgagcctggcagaggttgattccatatatcttccgatccctgtgaacttcatctttattggatttgatggaaatggacggcatgagtttaagttggggcctgaagaactggagcgctggtttacaaaaatagatcacatatttgagcacacaagaatccctccagttggtgaagttcttaccccgttctataagactactgttaagaaacttcagcattatgatcttcctttagtcagccatgtgaaccacaatttctctgtgcatgccatacacatgggagaagatgtcttatctgtttttgagcatgctataaaagttctatcctgtaaagatgatctcgtggattccagagaaaatgaagagatttttttgcaagtggatagtgctcaaatggaacatatattttcaactcttgttgatcaccttcagatacaagaggcttacaatatctttgttctgaaccccaagcctattggcaagaggattaattatggttatcggaaaggcttctctgagtctgagatcaatttgctcagggagaacaagaccctgcaagctcggatactccagtctaaaagtgacaacaaactcttccttgatatcgagaagggagtcaatagaaggccgttatatgaaagtcatcctctatcatcattttcatggacccgaactgacagtatggatatgggggattggtcaaagaaatgcaaggaagcattaagcaagtttgagctgctgaaggaagggaagagtaaagaggacattgtttatgaaaaggctgttcagatattacacggtacaaaggatgaggtgcatgacattgttcaaagtgctcttaagtccagtgatttgaagggtctccatgcccaatgtcttacagatatatggataggcagagagaggtttgcttttgttgatctgagtgcagggccatttgcctgggggccttctgttggtggtgatggtgtccgtacagaacttagtctgccaaatgttgcaaagactgtcggggctgttgcagttacagaagaagaagctgaagaaaaattgcaagacacaataagggagaggttttcgtcctttggtgaggattaccatgctgttgatattctattagcagagattgatgtgtatgaactttttgctttcaagcattgtgtgggaagaaggatacagcttgccctttgtaaagaacttgatgagaggatgcatgacctgaaaaaggaactggagggttacaatactggagattttgatgaaactaacaagaagaaagctcttgatgcactgaagagaatggaaagctggaacttattcagagatacttcagtggaacatcatagttacacagtggctcatgattcatttcttgcacaacttggatctatgttatggggctctatgaggcatgtaattgctccttctgcctctcatagagtgtaccattactatgagaagttatcgtttcagttgtattttgtgacacgagagaaagtcaggagtataaagcagttacctgttaatgtaaaatccatcagggagagcctgaattctgtgctattacatcatcaaaactccatgtttagccaaaacatgctgtcattgtcagaggatccatcattgatgatggcattttcaatggcacgtcgtgcagctgcggtgccgcttctattagtcaatggcacctataagtcaactgttagcacataccttgattctgctattctccaacatcagctacagaagctaaatgagcacaattcactgaaaggaaggcattcaaatcacaggtcaacattagaggtcccaatattctggttcatacataatgaacccatattattggacaaacattatcaagccaaggctctctcaaatatggtcgtagtagttcagtcagatgatgattcctgggaaagccatttgcagtgcaatggaagacccatcttatgggatttgaggaaaccggttaaagctgctattgctgcaactgctgagtatgtatctggtctacttcctccacatctggtttatagccatgctcatgaaactgcaattgaggactggacctggtctgtgggttgtaatccctcagctgtgacttctgaaggttcacaactttcagagttccagcaagatgtgattgctcgtaactatattattacttcagtggaggaatccattcaagtaatcaattcagcaattcagcaattggtaatagagcggactactgaaaaaggcttcaaaattttcaaggctcacgaaagtaagatggttgagaagtacaatgccgttgttagcttgtggagaagagtatcggctatgtccaagggattgcgatatggtgatgcagtaaaacttatgtcaatgcttgaggatgcttcaaatgggttttctagtgctgtgaactccaccatttcaagtctgcaccctgtccaatgcacccgcgaaaggaaggtcgacgtgcagctagacttgacaacacttcctgcttttctagctgtatttttgttgctttggtttcttctacgtccaaggagaccgaagcctaagatcaactgaacaccgagccaatgagcagcataggccatagagtttttgtgaatacgcgcatggattacagatggcgctggagcatggcccgggaattccaaaggtccaaaacaccgggtggcagggaacaaggtttcagaagattgcaatcctgacacatccccaagttgtagcagagttggaatgtcatgaaaactttaattcattcagtcctgtcctcgttccgggtttagccaattcttcctcgttccgggtaaggccttgttcgtttgtgtcggattggtgggtcggaacaattcccggccggattgcttctctaatttatataaactttgattagccggaacgattccgggtgcaatccgacgcaaacgaacaagccctaactgagattaatttgtccttgctgtaatgtttagccagtcctgccccgatccggggaactgagagattgtctttatcgcaacattaacggctagcggttagtatcatcttccagtcacctggaatgttactagtacaatccaattgtctgtttcctgccgcttacatgtaaaagtccatactcaagttttacagaaagaaacatgttctgtcatttattacaaaataaagccaaatagtaaaatgttatgtgtacgtag

SEQ ID NO: 50248 - DNA, 3643 bp, Zea Mays
cgtgagtcggggactcgggaaccggagcacacaccaaaacccccagtgccgccggcggacgccctccagtttccggtcttcactaactccccgttttccgtactgctgcggcgcctcggcagtcggcaccacagccggcaagatgccccccttccgaatgccttcccacttcctcgcgcttccgctcctactcttgctgctcctccaggcgccgtccccggaggcggccgagtctacgccggggacccggacgcgcaagatcggcagctcgggggcgtcctcggtgttctcgctctttaacctcaaggacaagagcaagttctggactgagtcgatcatccgtaaagagttcgatgacttggaaggttctgcgtcgcgggactctagcaaaaacggcctgctcaacttcacaagagctggtaatattgcaaactatttgagcctggcagaggttgattccatatatcttccgatccctgtgaacttcatctttattggatttgatggaaatggacggcatgagtttaagttggggcctgaagaactggagcgctggtttacaaaaatagatcacatatttgagcacacaagaatccctccagttggtgaagttcttaccccgttctataagactactgttaagaaacttcagcattatgatcttcctttagtcagccatgtgaaccacaatttctctgtgcatgccatacacatgggagaagatgtcttatctgtttttgagcatgctataaaagttctatcctgtaaagatgatctcgtggattccagagaaaatgaagagatttttttgcaagtggatagtgctcaaatggaacatatattttcaactcttgttgatcaccttcagatacaagaggcttacaatatctttgttctgaaccccaagcctattggcaagaggattaattatggttatcggaaaggcttctctgagtctgagatcaatttgctcagggagaacaagaccctgcaagctcggatactccagtctaaaagtgacaacaaactcttccttgatatcgagaagggagtcaatagaaggccgttatatgaaagtcatcctctatcatcattttcatggacccgaactgacagtatggatatgggggattggtcaaagaaatgcaaggaagcattaagcaagtttgagctgctgaaggaagggaagagtaaagaggacattgtttatgaaaaggctgttcagatattacacggtacaaaggatgaggtgcatgacattgttcaaagtgctcttaagtccagtgatttgaagggtctccatgcccaatgtcttacagatatatggataggcagagagaggtttgcttttgttgatctgagtgcagggccatttgcctgggggccttctgttggtggtgatggtgtccgtacagaacttagtctgccaaatgttgcaaagactgtcggggctgttgcagaagttacagaagaagaagctgaagaaaaattgcaagacacaataagggagaggttttcgtcctttggtgaggattaccatgctgttgatattctattagcagagattgatgtgtatgaactttttgctttcaagcattgtgtgggaagaaggatacagcttgccctttgtaaagaacttgatgagaggatgcatgacctgaaaaaggaactggagggttacaatactggagattttgatgaaactaacaagaagaaagctcttgatgcactgaagagaatggaaagctggaacttattcagagatacttcagtggaacatcatagttacacagtggctcatgattcatttcttgcacaacttggatctatgttatggggctctatgaggcatgtaattgctccttctgcctctcatagagtgtaccattactatgagaagttatcgtttcagttgtattttgtgacacgagagaaagtcaggagtataaagcagttacctgttaatgtaaaatccatcagggagagcctgaattctgtgctattacatcatcaaaactccatgtttagccaaaacatgctgtcattgtcagaggatccatcattgatgatggcattttcaatggcacgtcgtgcagctgcggtgccgcttctattagtcaatggcacctataagtcaactgttagcacataccttgattctgctattctccaacatcagctacagaagctaaatgagcacaattcactgaaaggaaggcattcaaatcacaggtcaacattagaggtcccaatattctggttcatacataatgaacccatattattggacaaacattatcaagccaaggctctctcaaatatggtcgtagtagttcagtcagatgatgattcctgggaaagccatttgcagtgcaatggaagacccatcttatgggatttgaggaaaccggttaaagctgctattgctgcaactgctgagtatgtatctggtctacttcctccacatctggtttatagccatgctcatgaaactgcaattgaggactggacctggtctgtgggttgtaatccctcagctgtgacttctgaaggttcacaactttcagagttccagcaagatgtgattgctcgtaactatattattacttcagtggaggaatccattcaagtaatcaattcagcaattcagcaattggtaatagagcggactattagctgaaaaaggcttcaaaattttcaaggctcacgaaagtaagatggttgagaagtacaatgccgttgttagcttgtggagaagagtatcggctatgtccaagggattgcgatatggtgatgcagtaaaacttatgtcaatgcttgaggatgcttcaaatgggttttctagtgctgtgaactccaccatttcaagtctgcaccctgtccaatgcacccgcgaaaggaaggtcgacgtgcagctagacttgacaacacttcctgcttttctagctgtatttttgttgctttggtttcttctacgtccaaggagaccgaagcctaagatcaactgaacaccgagccaatgagcagcataggccatagagtttttgtgaatacgcgcatggattacagatggcgctggagcatggcccgggaattccaaaggtccaaaacaccgggtggcagggaacaaggtttcagaagattgcaatcctgacacatccccaagttgtagcagagttggaatgtcatgaaaactttaattcattcagtcctgtcctcgttccgggtttagccaattcttcctcgttccgggtaaggccttgttcgtttgtgtcggattggtgggtcggaacaattcccggccggattgcttctctaatttatataaactttgattagccggaacgattccgggtgcaatccgacgcaaacgaacaagccctaactgagattaatttgtccttgctgtaatgtttagccagtcctgccccgatccggggaactgagagattgtctttatcgcaacattaacggctagcggttagtatcatcttccagtcacctggaatgttactagtacaatccaattgtctgtttcctgccgcttacatgtaaaagtccatactcaagttttacagaaagaaacatgttctgtcatttattacaaaataaagccaaatagtaaaatgttatgtgtacgtag

SEQ ID NO: 50249 - DNA, 3535 bp, Zea Mays
cgtgagtcggggactcgggaaccggagcacacaccaaaacccccagtgccgccggcggacgccctccagtttccggtcttcactaactccccgttttccgtactgctgcggcgcctcggcagtcggcaccacagccggcaagatgccccccttccgaatgccttcccacttcctcgcgcttccgctcctactcttgctgctcctccaggcgccgtccccggaggcggccgagtctacgccggggacccggacgcgcaagatcggcagctcgggggcgtcctcggtgttctcgctctttaacctcaaggacaagagcaagttctggactgagtcgatcatccgtaaagagttcgatgacttggaaggttctgcgtcgcgggactctagcaaaaacggcctgctcaacttcacaagagctggtaatattgcaaactatttgagcctggcagaggttgattccatatatcttccgatccctgtgaacttcatctttattggatttgatggaaatggacggcatgagtttaagttggggcctgaagaactggagcgctggtttacaaaaatagatcacatatttgagcacacaagaatccctccagttggtgaagttcttaccccgttctataagactactgttaagaaacttcagcattatgatcttcctttagtcagccatgtgaaccacaatttctctgtgcatgccatacacatgggagaagatgtcttatctgtttttgagcatgctataaaagttctatcctgtaaagatgatctcgtggattccagagaaaatgaagagatttttttgcaagtggatagtgctcaaatggaacatatattttcaactcttgttgatcaccttcagatacaagaggcttacaatatctttgttctgaaccccaagcctattggcaagaggattaattatggttatcggaaaggcttctctgagtctgagatcaatttgctcagggagaacaagaccctgcaagctcggatactccagtctaaaagtgacaacaaactcttccttgatatcgagaagggagtcaatagaaggccgttatatgaaagtcatcctctatcatcattttcatggacccgaactgacagtatggatatgggggattggtcaaagaaatgcaaggaagcattaagcaagtttgagctgctgaaggaagggaagagtaaagaggacattgtttatgaaaaggctgttcagatattacacggtacaaaggatgaggtgcatgacattgttcaaagtgctcttaagtccagtgatttgaagggtctccatgcccaatgtcttacagatatatggataggcagagagaggtttgcttttgttgatctgagtgcagggccatttgcctgggggccttctgttggtggtgatggtgtccgtacagaacttagtctgccaaatgttgcaaagactgtcggggctgttgcagaagttacagaagaagaagctgaagaaaaattgcaagacacaataagggagaggttttcgtcctttggtgaggattaccatgctgttgatattctattagcagagattgatgtgtatgaactttttgctttcaagcattgtgtgggaagaaggatacagcttgccctttgtaaagaacttgatgagaggatgcatgacctgaaaaaggaactggagggttacaatactggagattttgatgaaactaacaagaagaaagctcttgatgcactgaagagaatggaaagctggaacttattcagagatacttcagtggaacatcatagttacacagtggctcatgattcatttcttgcacaacttggatctatgttatggggctctatgaggcatgtaattgctccttctgcctctcatagagtgtaccattactatgagaagttatcgtttcagttgtattttgtgacacgagaggctgtcattgtcagaggatccatcattgatgatggcattttcaatggcacgtcgtgcagctgcggtgccgcttctattagtcaatggcacctataagtcaactgttagcacataccttgattctgctattctccaacatcagctacagaagctaaatgagcacaattcactgaaaggaaggcattcaaatcacaggtcaacattagaggtcccaatattctggttcatacataatgaacccatattattggacaaacattatcaagccaaggctctctcaaatatggtcgtagtagttcagtcagatgatgattcctgggaaagccatttgcagtgcaatggaagacccatcttatgggatttgaggaaaccggttaaagctgctattgctgcaactgctgagtatgtatctggtctacttcctccacatctggtttatagccatgctcatgaaactgcaattgaggactggacctggtctgtgggttgtaatccctcagctgtgacttctgaaggttcacaactttcagagttccagcaagatgtgattgctcgtaactatattattacttcagtggaggaatccattcaagtaatcaattcagcaattcagcaattggtaatagagcggactactgaaaaaggcttcaaaattttcaaggctcacgaaagtaagatggttgagaagtacaatgccgttgttagcttgtggagaagagtatcggctatgtccaagggattgcgatatggtgatgcagtaaaacttatgtcaatgcttgaggatgcttcaaatgggttttctagtgctgtgaactccaccatttcaagtctgcaccctgtccaatgcacccgcgaaaggaaggtcgacgtgcagctagacttgacaacacttcctgcttttctagctgtatttttgttgctttggtttcttctacgtccaaggagaccgaagcctaagatcaactgaacaccgagccaatgagcagcataggccatagagtttttgtgaatacgcgcatggattacagatggcgctggagcatggcccgggaattccaaaggtccaaaacaccgggtggcagggaacaaggtttcagaagattgcaatcctgacacatccccaagttgtagcagagttggaatgtcatgaaaactttaattcattcagtcctgtcctcgttccgggtttagccaattcttcctcgttccgggtaaggccttgttcgtttgtgtcggattggtgggtcggaacaattcccggccggattgcttctctaatttatataaactttgattagccggaacgattccgggtgcaatccgacgcaaacgaacaagccctaactgagattaatttgtccttgctgtaatgtttagccagtcctgccccgatccggggaactgagagattgtctttatcgcaacattaacggctagcggttagtatcatcttccagtcacctggaatgttactagtacaatccaattgtctgtttcctgccgcttacatgtaaaagtccatactcaagttttacagaaagaaacatgttctgtcatttattacaaaataaagccaaatagtaaaatgttatgtgtacgtag

SEQ ID NO: 50250 - DNA, 2427 bp, Zea Mays
tgatcttttaatgatattacacggtacaaaggatgaggtgcatgacattgttcaaagtgctcttaagtccagtgatttgaagggtctccatgcccaatgtcttacagatatatggataggcagagagaggtttgcttttgttgatctgagtgcagggccatttgcctgggggccttctgttggtggtgatggtgtccgtacagaacttagtctgccaaatgttgcaaagactgtcggggctgttgcagaagttacagaagaagaagctgaagaaaaattgcaagacacaataagggagaggttttcgtcctttggtgaggattaccatgctgttgatattctattagcagagattgatgtgtatgaactttttgctttcaagcattgtgtgggaagaaggatacagcttgccctttgtaaagaacttgatgagaggatgcatgacctgaaaaaggaactggagggttacaatactggagattttgatgaaactaacaagaagaaagctcttgatgcactgaagagaatggaaagctggaacttattcagagatacttcagtggaacatcatagttacacagtggctcatgattcatttcttgcacaacttggatctatgttatggggctctatgaggcatgtaattgctccttctgcctctcatagagtgtaccattactatgagaagttatcgtttcagttgtattttgtgacacgagagaaagtcaggagtataaagcagttacctgttaatgtaaaatccatcagggagagcctgaattctgtgctattacatcatcaaaactccatgtttagccaaaacatgctgtcattgtcagaggatccatcattgatgatggcattttcaatggcacgtcgtgcagctgcggtgccgcttctattagtcaatggcacctataagtcaactgttagcacataccttgattctgctattctccaacatcagctacagaagctaaatgagcacaattcactgaaaggaaggcattcaaatcacaggtcaacattagaggtcccaatattctggttcatacataatgaacccatattattggacaaacattatcaagccaaggctctctcaaatatggtcgtagtagttcagtcagatgatgattcctgggaaagccatttgcagtgcaatggaagacccatcttatgggatttgaggaaaccggttaaagctgctattgctgcaactgctgagtatgtatctggtctacttcctccacatctggtttatagccatgctcatgaaactgcaattgaggactggacctggtctgtgggttgtaatccctcagctgtgacttctgaaggttcacaactttcagagttccagcaagatgtgattgctcgtaactatattattacttcagtggaggaatccattcaagtaatcaattcagcaattcagcaattggtaatagagcggactactgaaaaaggcttcaaaattttcaaggctcacgaaagtaagatggttgagaagtacaatgccgttgttagcttgtggagaagagtatcggctatgtccaagggattgcgatatggtgatgcagtaaaacttatgtcaatgcttgaggatgcttcaaatgggttttctagtgctgtgaactccaccatttcaagtctgcaccctgtccaatgcacccgcgaaaggaaggtcgacgtgcagctagacttgacaacacttcctgcttttctagctgtatttttgttgctttggtttcttctacgtccaaggagaccgaagcctaagatcaactgaacaccgagccaatgagcagcataggccatagagtttttgtgaatacgcgcatggattacagatggcgctggagcatggcccgggaattccaaaggtccaaaacaccgggtggcagggaacaaggtttcagaagattgcaatcctgacacatccccaagttgtagcagagttggaatgtcatgaaaactttaattcattcagtcctgtcctcgttccgggtttagccaattcttcctcgttccgggtaaggccttgttcgtttgtgtcggattggtgggtcggaacaattcccggccggattgcttctctaatttatataaactttgattagccggaacgattccgggtgcaatccgacgcaaacgaacaagccctaactgagattaatttgtccttgctgtaatgtttagccagtcctgccccgatccggggaactgagagattgtctttatcgcaacattaacggctagcggttagtatcatcttccagtcacctggaatgttactagtacaatccaattgtctgtttcctgccgcttacatgtaaaagtccatactcaagttttacagaaagaaacatgttctgtcatttattacaaaataaagccaaatagtaaaatgttatgtgtacgtag

SEQ ID NO: 50251 - DNA, 2602 bp, Zea Mays
aggcagagaagggagtcaatagaaggccgttatatgaaagtcatcctctatcatcattttcatggacccgaactgacagtatggatatgggggattggtcaaagaaatgcaaggaagcattaagcaagtttgagctgctgaaggaagggaagagtaaagaggacattgtttatgaaaaggctgttcagatattacacggtacaaaggatgaggtgcatgacattgttcaaagtgctcttaagtccagtgatttgaagggtctccatgcccaatgtcttacagatatatggataggcagagagaggtttgcttttgttgatctgagtgcagggccatttgcctgggggccttctgttggtggtgatggtgtccgtacagaacttagtctgccaaatgttgcaaagactgtcggggctgttgcagaagttacagaagaagaagctgaagaaaaattgcaagacacaataagggagaggttttcgtcctttggtgaggattaccatgctgttgatattctattagcagagattgatgtgtatgaactttttgctttcaagcattgtgtgggaagaaggatacagcttgccctttgtaaagaacttgatgagaggatgcatgacctgaaaaaggaactggagggttacaatactggagattttgatgaaactaacaagaagaaagctcttgatgcactgaagagaatggaaagctggaacttattcagagatacttcagtggaacatcatagttacacagtggctcatgattcatttcttgcacaacttggatctatgttatggggctctatgaggcatgtaattgctccttctgcctctcatagagtgtaccattactatgagaagttatcgtttcagttgtattttgtgacacgagagaaagtcaggagtataaagcagttacctgttaatgtaaaatccatcagggagagcctgaattctgtgctattacatcatcaaaactccatgtttagccaaaacatgctgtcattgtcagaggatccatcattgatgatggcattttcaatggcacgtcgtgcagctgcggtgccgcttctattagtcaatggcacctataagtcaactgttagcacataccttgattctgctattctccaacatcagctacagaagctaaatgagcacaattcactgaaaggaaggcattcaaatcacaggtcaacattagaggtcccaatattctggttcatacataatgaacccatattattggacaaacattatcaagccaaggctctctcaaatatggtcgtagtagttcagtcagatgatgattcctgggaaagccatttgcagtgcaatggaagacccatcttatgggatttgaggaaaccggttaaagctgctattgctgcaactgctgagtatgtatctggtctacttcctccacatctggtttatagccatgctcatgaaactgcaattgaggactggacctggtctgtgggttgtaatccctcagctgtgacttctgaaggttcacaactttcagagttccagcaagatgtgattgctcgtaactatattattacttcagtggaggaatccattcaagtaatcaattcagcaattcagcaattggtaatagagcggactactgaaaaaggcttcaaaattttcaaggctcacgaaagtaagatggttgagaagtacaatgccgttgttagcttgtggagaagagtatcggctatgtccaagggattgcgatatggtgatgcagtaaaacttatgtcaatgcttgaggatgcttcaaatgggttttctagtgctgtgaactccaccatttcaagtctgcaccctgtccaatgcacccgcgaaaggaaggtcgacgtgcagctagacttgacaacacttcctgcttttctagctgtatttttgttgctttggtttcttctacgtccaaggagaccgaagcctaagatcaactgaacaccgagccaatgagcagcataggccatagagtttttgtgaatacgcgcatggattacagatggcgctggagcatggcccgggaattccaaaggtccaaaacaccgggtggcagggaacaaggtttcagaagattgcaatcctgacacatccccaagttgtagcagagttggaatgtcatgaaaactttaattcattcagtcctgtcctcgttccgggtttagccaattcttcctcgttccgggtaaggccttgttcgtttgtgtcggattggtgggtcggaacaattcccggccggattgcttctctaatttatataaactttgattagccggaacgattccgggtgcaatccgacgcaaacgaacaagccctaactgagattaatttgtccttgctgtaatgtttagccagtcctgccccgatccggggaactgagagattgtctttatcgcaacattaacggctagcggttagtatcatcttccagtcacctggaatgttactagtacaatccaattgtctgtttcctgccgcttacatgtaaaagtccatactcaagttttacagaaagaaacatgttctgtcatttattacaaaataaagccaaatagtaaaatgttatgtgtacgtag

SEQ ID NO: 50252 - DNA, 1178 bp, Zea Mays
aaagattctttcactggataaactgtatccagttgtctataagactggacctggtctgtgggttgtaatccctcagctgtgacttctgaaggttcacaactttcagagttccagcaagatgtgattgctcgtaactatattattacttcagtggaggaatccattcaagtaatcaattcagcaattcagcaattggtaatagagcggactactgaaaaaggcttcaaaattttcaaggctcacgaaagtaagatggttgagaagtacaatgccgttgttagcttgtggagaagagtatcggctatgtccaagggattgcgatatggtgatgcagtaaaacttatgtcaatgcttgaggatgcttcaaatgggttttctagtgctgtgaactccaccatttcaagtctgcaccctgtccaatgcacccgcgaaaggaaggtcgacgtgcagctagacttgacaacacttcctgcttttctagctgtatttttgttgctttggtttcttctacgtccaaggagaccgaagcctaagatcaactgaacaccgagccaatgagcagcataggccatagagtttttgtgaatacgcgcatggattacagatggcgctggagcatggcccgggaattccaaaggtccaaaacaccgggtggcagggaacaaggtttcagaagattgcaatcctgacacatccccaagttgtagcagagttggaatgtcatgaaaactttaattcattcagtcctgtcctcgttccgggtttagccaattcttcctcgttccgggtaaggccttgttcgtttgtgtcggattggtgggtcggaacaattcccggccggattgcttctctaatttatataaactttgattagccggaacgattccgggtgcaatccgacgcaaacgaacaagccctaactgagattaatttgtccttgctgtaatgtttagccagtcctgccccgatccggggaactgagagattgtctttatcgcaacattaacggctagcggttagtatcatcttccagtcacctggaatgttactagtacaatccaattgtctgtttcctgccgcttacatgtaaaagtccatactcaagttttacagaaagaaacatgttctgtcatttattacaaaataaagccaaatagtaaaatgttatgtgtacgtag

SEQ ID NO: 50253 - DNA, 831 bp, Zea Mays
cacactttgctaggataaataatggttttctagtgctgtgaactccaccatttcaagtctgcaccctgtccaatgcacccgcgaaaggaaggtcgacgtgcagctagacttgacaacacttcctgcttttctagctgtatttttgttgctttggtttcttctacgtccaaggagaccgaagcctaagatcaactgaacaccgagccaatgagcagcataggccatagagtttttgtgaatacgcgcatggattacagatggcgctggagcatggcccgggaattccaaaggtccaaaacaccgggtggcagggaacaaggtttcagaagattgcaatcctgacacatccccaagttgtagcagagttggaatgtcatgaaaactttaattcattcagtcctgtcctcgttccgggtttagccaattcttcctcgttccgggtaaggccttgttcgtttgtgtcggattggtgggtcggaacaattcccggccggattgcttctctaatttatataaactttgattagccggaacgattccgggtgcaatccgacgcaaacgaacaagccctaactgagattaatttgtccttgctgtaatgtttagccagtcctgccccgatccggggaactgagagattgtctttatcgcaacattaacggctagcggttagtatcatcttccagtcacctggaatgttactagtacaatccaattgtctgtttcctgccgcttacatgtaaaagtccatactcaagttttacagaaagaaacatgttctgtcatttattacaaaataaagccaaatagtaaaatgttatgtgtacgtag

SEQ ID NO: 50254 - DNA, 2998 bp, Zea Mays
gcgagcatgggcattccaagaatggtctccccttcttcctcgcagacgccgccgccgcccaccgcagctgccgcccaccgactgccccgccaccaccgactctccgcggttgttgctgcttcaacaaggagggaaggctatcggagcaggactacggcacccgggcggcgcggtgacggcggagtgggctccatctgggtaaacccgagcgctccgccgcgccccggcgtggccagccgcactctccgccgcctcgttgagctcgacaacctcgacgccgcgctgcgtctcctcctcggcggtccctcctcaacgcccgcgacatcggactcggcgccggagccgccggctgtcatcagctgcaacatcctcatcaaaaagctctgcgcccgccgccgcctcgccgacgcggagcgcgtgcttgaggcgctcaaggcctctggtgctgccgacgccgtctcccataacaccctcgtcgcgggttactgccgcgacggcagcctcggggacgcggagcgcgtggtcgaggcggctagggcatctggcaccgcgaacgtagttacctacacagccctcatcgacgggtactgccgctccgggcgcctcgccgatgccctgcgcctcatcgcctccatgcctgtggcgcccgacacctacacctacaacaccgtgttgaagggcttgtgctgtgctaagcagtgggagcaggccgaggaactcatgcgggagatgatccggaacagttgccatccgaatgaggtgaccttcgccacacagatccgtgctttctgccaaaatgggttgcttgaccgagctgtggagcttcttgagcaaatgccaaagtatgggtgcacgcctgatgttatcatatacagtacgctggttaatggattctcagagcatgggcgtgtagatgaggcactcaagctattgaacaccatgttatgcaggcctaatacggtttgttataatgctgcattgaagggtttatgtattgctgggcgatgggaggaagttggagagctcatagctgaaatggttaggaaagattgcccgccaaatgatgcaacatttagtacgctgatcaattccttatgccaaaacaggttggttgaatatgcggttgaagttcttgagcaaatgcagaagtatggatatatgcctgatgttgtcagttacaacacaatcatcagctgtttttctgaccaagcgcgtgcagatgatgccctcaagttactaaagagcatgctatgcaagcctgacacgattagcttcaatgctgtgttgaaatgtttatgtaaagccaaacgatggtatgatgctgtggagcttgtggctaagatgttaaagaaggattgccgtataaatgaaatgacttttaacatactcatcgattcactatgccaaaatggacaagtcaaggatgccattgaggtgtttgagctcatgccaaaatatagatgtatgcctgatattgtcacatacagtagccttattaatggcttttctgaacaaggccttgatgaaatggcctttgatttgttcagaagcatgccatgcagggctgatatatttagctacaatgctacattgaagggtttgtgtatggctgcacgatgggatgatgctggagagcttatagctgatatggtcacagaagattgtctcccaaatgaagtgacattcaatatactaatcagttccttgtgccaaaagggactggtcaatcgtgcaattgatgtttatgagcaaatgcccaagtatggaattacaccggatattttcacatataatgctcttatcaacggctattctgaacaaggtcgtttggatgatgccctcaagttcttgagcaccatgccttgtgagcctgacaccatttcctataattctatactgaagggtttgtgtagggctgagcgctggaaagatgcagagaaacttgtcactgagatgcttagaaagaattgcactccaaatgaagtaacattcaagtatgctaatcaattatttattaaataagagtagttgaatgaataactaaattcctggagctaatgccaaagtttggatggctacgttctgaaatgtatgctgtcttcattgatggctttttgtggcagaggccaacgatcttctgagctaagaagcagcataattgtgcaagcctagcatagttttctattatgttgcattaatgacatttagatatgaacaacaggagaatttaaaaacttctagctgacagatgcaatgcgagcatcccaggagttcacatttgttatttagaggaattcatgctccaaaatgaagtactaattgctataattggaagaggcagttcaatcttcgacaatgtttgttgtcaaatggctggaaaaggtttatagatagtgtctggctgaaggattgtcaaaggtacatagcattactgagcaaatgtcaagaaacaaagaagcatatcataagatcatgtgtgatgatgccattaaggtagtgtttggatggatggatgaggaaggatgaagagagataaggtgggatcattctaacttgacccatgtttggtttggaggtccagagtcagggtcaaagaatattcttcaaaaatagtggatggggccatccctcaaaaaataagggacgaggtcaacccaggattgatcccgtcccatccctcgttgacaccgaaccaaacacataatgagcaccatgtaacctctactggagaaccgttggatccaatatatttggggttttgcgccacctatgcagcacattctttgtggatgtatcagaattgagaaggatctttgaattgctcagatctaagtcttctcttaagttgtagcaaatgtgcagcatgtttctctatggacaacctcctgcaccatctgacgtgcaatattaagttccatgtaaaggcattaaaagtaaatttactctagctttattttttaaaatagtttaaaaaggttaacaataaaaaatcgtttcc

SEQ ID NO: 50255 - DNA, 1471 bp, Zea Mays
ggtggagccatgaatgatatatcctaggtacacctccagcttcccttaccatctccttggcctcttcctcccccccattggccttctccttctgatgaatcattttacctagatttgtcactgcttgctaatcgttgctccaaccgttgagtttgcgcggtggatttcttttcctagcatcaacacatgtaaaacaggggagatttagatccaacacatcagcgaagtggcacccttgctggcaaaataatacgtctaggtctcgtagaacacctaacactggtaagtactcctaatatgcaagtggttatgctgatgttgatgaatcgattggtattttgagacttgtattatgtctcctttgaggaggttttatttcaccaggtacactacattatttgatcatcgtattatggttatttgatcactgtattttattattttatcgctgtattatctggacaaattacgaatatgcctactactgtatcataattacttgttgcctactctatcgacctttgcaaagattgctactgttttgttgtctaaaccacttgctatcaatatttcttaaagtgttgtgtatctaatcgtcctctaataagcacatcagttaagttcaagttaacacaattacactcccatacatgtatacaatgatgatgacctattgtacattctgattgcttgggtattcattctctggtgctcatagtctaatggatggtatgatcaccgcttagtatgttctgttctgtttttgaactgaattatctcaaccttttatctatgattgtgtagtggtctagggattgcgtattaggatattgaggatgggattttcacaaattgctacagtccaattattttcttcccttctaccctgctacacgccagatcatatgttataatggcgtttgctgctggaggcacatcccgattcgtcaatagggccgagtgcatctgcctcattcacaagataaacgacgctcctaccccctcctctgttttctacctgcttgaacatatcagcaatcttgcttgtataacttgtggatggtaggcctggagtgctgtcgaattccttccttagcgcaactgttgttcagaccgattatatatccaggtatggacttgaagtttaatgccacacctgctccaggagagcagacaaccttcaagtgggacattgatcatgggtgtaaaatgttaagctgaatgcaaaccgtcgagatggtcctggtcgaggacctccatggcacctacgttggtgtgggttgtgccgcctcatcgcgaccgtcatcgattgggccttcgaggttctttgttgttggcattttggtcgtaatgcagatgacttggtaaaccgacattttcaaagtcaaacccgagaacctggatattgtggcttaagaattctatgttgatcctggaagaagaaattatagccactcctgtttggtttggg

SEQ ID NO: 50256 - DNA, 814 bp, Zea Mays
ttggcctcttcctcccccccattggccttctccttctgatgaatcattttacctagatttgtcactgcttgctaatcgttgctccaaccgttgagtttgcgcggtggatttcttttcctagcatcaacacatgtaaaacaggggagatttagatccaacacatcagcgaagtggcacccttgctggcaaaataatacgtctaggtctcgtagaacacctaacactgtggtctagggattgcgtattaggatattgaggatgggattttcacaaattgctacagtccaattattttcttcccttctaccctgctacacgccagatcatatgttataatggcgtttgctgctggaggcacatcccgattcgtcaatagggccgagtgcatctgcctcattcacaagataaacgacgctcctaccccctcctctgttttctacctgcttgaacatatcagcaatcttgcttgtataacttgtggatggtaggcctggagtgctgtcgaattccttccttagcgcaactgttgttcagaccgattatatatccaggtatggacttgaagtttaatgccacacctgctccaggagagcagacaaccttcaagtgggacattgatcatgggtgtaaaatgttaagctgaatgcaaaccgtcgagatggtcctggtcgaggacctccatggcacctacgttggtgtgggttgtgccgcctcatcgcgaccgtcatcgattgggccttcgaggatattgtggcttaagaattctatgttgatcctggaagaagaaattatagccactcctgtttggtttggg

SEQ ID NO: 50257 - DNA, 1280 bp, Zea Mays
atttgtcactgcttgctaatcgttgctccaaccgttgagtttgcgcggtggatttcttttcctagcatcaacacatgtaaaacaggggagatttagatccaacacatcagcgaagtggcacccttgctggcaaaataatacgtctaggtctcgtagaacacctaacactggtaagtactcctaatatgcaagtggttatgctgatgttgatgaatcgattggtattttgagacttgtattatgtctcctttgaggaggttttatttcaccaggtacactacattatttgatcatcgtattatggttatttgatcactgtattttattattttatcgctgtattatctggacaaattacgaatatgcctactactgtatcataattacttgttgcctactctatcgacctttgcaaagattgctactgttttgttgtctaaaccacttgctatcaatatttcttaaagtgttgtgtatctaatcgtcctctaataagcacatcagttaagttcaagttaacacaattacactcccatacatgtatacaatgatgatgacctattgtacattctgattgcttgggtattcattctctggtgctcatagtctaatggatggtatgatcaccgcttagtatgttctgttctgtttttgaactgaattatctcaaccttttatctatgattgtgtagtggtctagggattgcgtattaggatattgaggatgggattttcacaaattgctacagtccaattattttcttcccttctaccctgctacacgccagatcatatgttataatggcgtttgctgctggaggcacatcccgattcgtcaatagggccgagtgcatctgcctcattcacaagataaacgacgctcctaccccctcctctgttttctacctgcttgaacatatcagcaatcttgcttgtataacttgtggatggtaggcctggagtgctgtcgaattccttccttagcgcaactgttgttcagaccgattatatatccaggtatggacttgaagtttaatgccacacctgctccaggagagcagacaaccttcaagtgggacattgatcatgggtgtaaaatgttaagctgaatgcaaaccgtcgagatggtcctggtcgaggacctccatggcacctacgttggtgtgggttgtgccgcctcatcgcgaccgtcatcgattgggccttcgaggatattgtggcttaagaattctatgttgatcctggaagaagaaattatagccactcctgtttggtttggg

SEQ ID NO: 50258 - DNA, 404 bp, Zea Mays
caaaataatacgtctaggtctcgtagaacacctaacactgtggtctagggattgcgtattaggatattgaggatgggattttcacaaattgctacagtccaattattttcttcccttctaccctgctacacgccagatcatatgttataatggcgtttgctgctggaggcacatcccgattcgtcaatagggccgagtgcatctgcctcattcacaagataaacgacgctcctaccccctcctctgttttctacctgcttgaacatatcagcaatcttgcttgtataacttgtggatggtaggcctggagtgctgtcgaattccttccttagcgcaactgttgttcaggtatggacttgaagtttaatgccacacctgctccaggagagcagacaaccttcaag

SEQ ID NO: 50259 - DNA, 1152 bp, Zea Mays
agaacacctaacactggtaagtactcctaatatgcaagtggttatgctgatgttgatgaatcgattggtattttgagacttgtattatgtctcctttgaggaggttttatttcaccaggtacactacattatttgatcatcgtattatggttatttgatcactgtattttattattttatcgctgtattatctggacaaattacgaatatgcctactactgtatcataattacttgttgcctactctatcgacctttgcaaagattgctactgttttgttgtctaaaccacttgctatcaatatttcttaaagtgttgtgtatctaatcgtcctctaataagcacatcagttaagttcaagttaacacaattacactcccatacatgtatacaatgatgatgacctattgtacattctgattgcttgggtattcattctctggtgctcatagtctaatggatggtatgatcaccgcttagtatgttctgttctgtttttgaactgaattatctcaaccttttatctatgattgtgtagtggtctagggattgcgtattaggatattgaggatgggattttcacaaattgctacagtccaattattttcttcccttctaccctgctacacgccagatcatatgttataatggcgtttgctgctggaggcacatcccgattcgtcaatagggccgagtgcatctgcctcattcacaagataaacgacgctcctaccccctcctctgttttctacctgcttgaacatatcagcaatcttgcttgtataacttgtggatggtaggcctggagtgctgtcgaattccttccttagcgcaactgttgttcaggtatgtcggctcaagtcatatgatcttgcaaagcttgtcaagcatattccaacaaatagaggagggtgaatcttatccttcggatgactgctcattttttgttttacgtactttctcagtccaagtttttgttctctttgtcccacgcttcttgttgtctttttttgagctttcactacttgtttttcttttgttttggtctttcttaatattgcccgtgtcattgttttcagaccgattatatatccaggtatggacttgaagtttaatgccacacctgctccaggagagcagacaaccttcaag

SEQ ID NO: 50260 - DNA, 1112 bp, Zea Mays
agaacacctaacactggtaagtactcctaatatgcaagtggttatgctgatgttgatgaatcgattggtattttgagacttgtattatgtctcctttgaggaggttttatttcaccaggtacactacattatttgatcatcgtattatggttatttgatcactgtattttattattttatcgctgtattatctggacaaattacgaatatgcctactactgtatcataattacttgttgcctactctatcgacctttgcaaagattgctactgttttgttgtctaaaccacttgctatcaatatttcttaaagtgttgtgtatctaatcgtcctctaataagcacatcagttaagttcaagttaacacaattacactcccatacatgtatacaatgatgatgacctattgtacattctgattgcttgggtattcattctctggtgctcatagtctaatggatggtatgatcaccgcttagtatgttctgttctgtttttgaactgaattatctcaaccttttatctatgattgtgtagtggtctagggattgcgtattaggatattgaggatgggattttcacaaattgctacagtccaattattttcttcccttctaccctgctacacgccagatcatatgttataatggcgtttgctgctggaggcacatcccgattcgtcaatagggccgagtgcatctgcctcattcacaagataaacgacgctcctaccccctcctctgttttctacctgcttgaacatatcagcaatcttgcttgtataacttgtggatggtaggcctggagtgctgtcgaattccttccttagcgcaactgttgttcaggtatggacttgaagtttaatgccacacctgctccaggagagcagacaaccttcaagtgggacattgatcatgggtgtaaaatgttaagctgaatgcaaaccgtcgagatggtcctggtcgaggacctccatggcacctacgttggtgtgggttgtgccgcctcatcgcgaccgtcatcgattgggccttcgaggttctttgttgttggcattttggtcgtaatgcagatgacttggtaaaccgacattttcaaagtcaaacccgag

SEQ ID NO: 50261 - DNA, 946 bp, Zea Mays
gcgctgccagcctgtcactgaaactacctgtgtccggacgcccgatctagcaactagcaagcgccgcatccctcgcctcttcccgacttcccccctcgattcgatccgagctcacttctagggttcttggccccgctccaccgtcgcccatggcagacgatgccaaccgagcggccttcatggagctgcagtcccggatgatagataccaccgcgaagatcaagcagttacaaacccaaatgcgttctaaagaaggggaaaagaagcgtgcctaccttactttggaggaacttcgccagttgccagatgataccaacacctacaagactgtcggtttattctggagccgaagtcagttctgttcaatgagcaggagcaaaagcttaatgacagtgagagtgcgatagcttcaatgcagacatccaaagactaccttgagaaacagcagggcgaagtggagaacaatattagggagctgcttcaacaggacccaggacttgcgcgtcagatcctctcaatgaccgttcaatgagagttgtttttctctccatttaattttttagataatttgtaatgtcgcagtttgatcagtcatgctgtggtcttgccttatctgtgagacatgtgcggtctgtaatttctgaggtgtttggctggtggaatgatgtggtccatcattatctcactctagtgctttgtttggtttgtggaatagattgagttaattcatcatcatcccattcctcacaagctaacaattaatgcaaataatagcataaggaatgggttatttcactgagggttagtttggaaactcaaattcccaagaggattagagaggattgaggtaatgaactgattttctcctcaatccctccaagctagcactaaatgtgaggtataggctcgtgatgcatcgctgagtctaggataaattggtttcagg

SEQ ID NO: 50262 - DNA, 328 bp, Zea Mays
ggacgcccgatctagcaactagcaagcgccgcatccctcgcctcttcccgacttcccccctcgattcgatccgagctcacttctagggttcttggccccgctccaccgtcgcccatggcagacgatgccaaccgagcggccttcatggagctgcagtcccggatgatagataccaccgcgaagatcaagcagttacaaacccaaatgcgttctaaagaaggggaaaagaagcgtgcctaccttactttggaggaacttcgccagttgccagatgataccaacacctacaagactgtcgctgtccaactttgagtgagatgttatatgt

SEQ ID NO: 50263 - DNA, 3338 bp, Zea Mays
cactgccactccactaggactaggagcaaaaagcacaggttgcgttatatccatcttccatccacgcctagggctctactagtctaggccaaacaagaggggagcagtactattgtagcataccatagcatagctgctgctgacaagcgaccggcggtgtgccacacgctcacacagacagacacagcgcgcatcagcgatgcgggcgggggcgtacacggtgcaccagtcgctcaccgcggaggcggccgcggcgctgcagctctcgctgggcctggcgcgccgccgcggccacgcgcaggtcacgccgctgcacgtcgcctacacgctgctcggcggctccgagccgcccccgtcgtcgtcgtcgcctcggctcttcaccaccatcgccgcgtccgcgccggcgtacggtctcctcgtgcgcgcctgcgccaggtcccgccgccagacgcacccggcgcagcagtgccgggcgctggagctctgcttcaacgtcgccctcaaccgcctgcccacgggcacggccaacgcggggggcttgggctcctcgccctcgcccgccacctccttcgcggcgtcgctcctccagcagcagcccgccagcccgacgctgtccaacgcgctcgtggccgcgctcaagcgcgcgcaggccaatcagcgccgcggctgcgtcgagctccagagccagccgtcgccgccgccgccaccgccaggccagcagccgcactccaccacctccccgagccaccagcagcagcagcctgtgctcacgatcaaggtcgagctggaccagctcatcgtctccatcctcgacgaccccagcgtgagccgggtcatgcgggaggccggcttctccagcgccgccgtcaaggccagcctcgaggaggagagcgccgccatgctggctgccctcggcaaccaccaggtccaccaccacggcgcctcctcgacgccgccgccgccgccgccgtcctcccatcatcctcccaccgcggccggattagtactaccgcctcgtcacttcttcctgctggacccttacggaggaggaggcttccctgcgcacgccggtgcctgcagcggcgcgccgtgggcagcgcccttcccgagcgtccacagccgccacccgcccgagcccgacgacgtgaactccgagcccccatgcgaggcggaggcggaagacgtgagagcgatcgtggaggtgatgacgcggcgccgggggagactccgacgagccaaccccgtcgtggtcgccgactccgcgcccgccgccgaggcgtgcgtcgccgagctcgtgcggcgggtggagcgaggaggagacgtccccgacgagctgcgcggcgcgcgcgtcctccgcctccacctctcccgcgcccgcgtccgcctcatgacccgcgccgacgcggacgcgtgggcggccggcctgcgccgaagcgtcgccggcagtaacagcaccggcgcaggcggcggcctcgtcatctacgtcggcgacatgcgctgggccgtcgacgacggcaccgacgacgacgaccacgcccgcggcctgcaggggccgtcgtcgtccggctcctacagccccgctgcgcacctggccgcggagctcgcccgcctcctcgccgacctccgcctccgcgccgcgtcgcgcgcctggctgctggcggccgccagctatgccaccttcatgcgctgccagcggtcgtccctggacgtgacgtggggcctgcaacccgtgtccgtccccgctggcgctggcggcggcggcggcctcggcctggagctcggccctcgcgctgccactgcaaggtgacaatgcattaatccacgtggctactgcattgtttgtttgtttattttagggctccttgcttgcttttggttcactttgctgtgactgatgcgttgctatctgtcggctgccctggttgctctcttttggtctcgtccgttctgtttggagtttggatggactgcctgcaggctgcagccctgcactcactggaaggggataccggatacccctgaaaccattgctttagccatatatccattagagtagagtagacgtatgtagcctgaaataatcggaaactactagtgcacgttacgtatcatttttcattccgttagcaggattcgcaatctccaatgcaaacaatctgattgtgtgatgtctatacgcaacactgaagtctagttgcatctgttcttcctgttgtgtgctatgcggtcttagcaggccggctgctcaacgacctgctcagctccctccgctggatcgtgcaccaagagaagaggatggcgtgccaacgccgaccctgtgcgctgaatgcgccgaacactacgagagggaagcatcggacgtgagagccaaggcagcaggcaccgatctcgcgctgaccttcttccctggctggccgcacgcggacgagccccagacgtcgcacaaggatgatctgatgaagctcaagtggaaatggagccgactctgccagcagcggaaccaaccggcccgtcgtccgtgcaatgcaaccacctctagcaacagcagcagcaacccaggcctgtgcttgagctttgaggaggctcccaccaccttccaatgcaggagcaacaagatcgagcaccagggcgtcaggaccaccctgagcctcctcccggacgccgacaagtcatccgacgaggtccaccgccacgggagcgagcccaggccggcggcgccgcagcaggaaccagacgtggcgggggcagctgaagctgaacccagtggcacgaagaaggtcggggtcccatggttgccgtccggcgatctcaagaggaaggcggaggagagtgtcgtccggaggccgagcgagtccaacaagcgccgctggaagggcagcggcggcggcggtggccttgacctgaacctacgcgctgacgacgacgaggaggagagtggtggcggtggcagcagtgacgacgacgagctcgttccggcgagcgacttgacgaacgacggtgaagaagcagcagcagccagcggtgatgcgactgacagctccggtagccgtcgccaggctgctgtgagtgtgaccgaccttcgacctcgatcgctaagtggttgcggtattgatggtgccaacgagtgatggagtcatggagatgcttggatggagcaacaggcggtcgttgctgcttgccgacttcagaattggcgggaacgtgtggagaggggaagcagagacgttcctgcgtatatgtatgtatatatgggctctggggggcttcctgctcgaataggcgacatgcatgtgggctcggctcgtttggctcccaatttttgtccagctataatgcac

SEQ ID NO: 50264 - DNA, 1864 bp, Zea Mays
cctacccgctccgcgctggcgcacgtgagcggcatgccgtctcagatcgggatcggcaacacccactccgtcactcccctacaaagatgttttctcagtcaagtcgcctccccctactgtaggccgctgctgctcctctcctcccatctcaccacacaccgcagccccagcaagatcgcgcggaggccatggcgaagcccaagccttcctccgccggcgccaagccgaccgcggctgcgccaccggttacagtgcactcggcgctggtcacctacacctccatgctcgcgctcctctccctctgcccgcccttcgtcatcctcctgtggtacacgatggtgcacgcggacggatcggtggtgcggacttacgagcacctcagggatcacggcgtgctcgaggggctcaaggccatctggcccatgcccaccctcgtcgcgtggaagatcatcttcggcttcgggctcttcgaggccgtcctacagctgctgctccctgggaagcgcttcgaagggcccatctcgcctgccgggaacgtgccggtctacaaggcaaatggcttacaagcatatgcagtgaccttgataacttaccttggtttgtggtggttcggtatatttaaccctgcaatagtgtatgatcacttgggggagatatactctgctcttgtttttggaagctttgtgttctgtatttttctctacataaagggccatgtatttccatcttcatctgactctggatcctctgggaatgtgataattgacttctactggggtatggagctgtaccctcggattggcaagtactttgatatcaaagtattcaccaactgtcgtttcggtatgatgtcctgggctgttcttgccgtaacctattgcataaagcagtatgaaatgaatggcagagttgctgattctatgcttgtgaatactgcacttatgttgatctatatcactaagttcttttggtgggaatctggatattggtgtactatggacattgctcatgatagagctagcactctcaattcttctagctggaatgttgtgcatatacataaactatgattgtgaccgtcagcgccaagaatttcgacggacgaatgggaaatgctcggtctggggcaaggctccatctaagattgttgcctcttatcagactacaaagggagaaactaaaaccagtcttctcttgacttctggatggtggggcttgtcacgtcacttccactatgtcccagagatactatctgcatttttctggactgttccagctcttttcaatcacttcctaccatacttctacgtgatctttctgactatattattgtttgaccgagcaaagagggatgatgaccggtgctcatcaaagtacgggaagtactggaagatttactgcaacaaagtaccatacagagtcattcctggcatttactgagcatctcgagttctggacgactcttgatattaagctcaacagatgccacgatatccagtcttcataccgatttgctactgattgtgtaatgtcgctggtaggcttgggctgtacgcagtattaggtgtaggcaacttggcttttggcatttaccttgtatgtgtcgtgtatctagggctggggcttgctccttcagttgttagacagtagggggtaatctcaggggtgcaatgtactccctccgtcctaaaataaaagcatatctagtatttaaattttgtttcaaataaaaatgcacaatgaactatcatatcgtgtaacgatgtgtttgattgtgggacaaactagctggagatgggatggtggatttgaaggatatgaaaggatcatgatgctgaagaggaagggtgaattgagtttctct

SEQ ID NO: 50265 - DNA, 1737 bp, Zea Mays
cctacccgctccgcgctggcgcacgtgagcggcatgccgtctcagatcgggatcggcaacacccactccgtcactcccctacaaagatgttttctcagtcaagtcgcctccccctactgtaggccgctgctgctcctctcctcccatctcaccacacaccgcagccccagcaagatcgcgcggaggccatggcgaagcccaagccttcctccgccggcgccaagccgaccgcggctgcgccaccggttacagtgcactcggcgctggtcacctacacctccatgctcgcgctcctctccctctgcccgcccttcgtcatcctcctgtggtacacgatggtgcacgcggacggatcggtggtgcggacttacgagcacctcagggatcacggcgtgctcgaggggctcaaggccatctggcccatgcccaccctcgtcgcgtggaagatcatcttcggcttcgggctcttcgaggccgtcctacagctgctgctccctgggaagcgcttcgaagggcccatctcgcctgccgggaacgtgccggtctacaaggcaaatggcttacaagcatatgcagtgaccttgataacttaccttggtttgtggtggttcggtatatttaaccctgcaatagtgtatgatcacttgggggagatatactctgctcttgtttttggaagctttgtgttctgtatttttctctacataaagggccatgtatttccatcttcatctgactctggatcctctgggaatgtgataattgacttctactggggtatggagctgtaccctcggattggcaagtactttgatatcaaagtattcaccaactgtcgtttcggtatgatgtcctgggctgttcttgccgtaacctattgcataaagcagctagcactctcaattcttctagctggaatgttgtgcatatacataaactatgattgtgaccgtcagcgccaagaatttcgacggacgaatgggaaatgctcggtctggggcaaggctccatctaagattgttgcctcttatcagactacaaagggagaaactaaaaccagtcttctcttgacttctggatggtggggcttgtcacgtcacttccactatgtcccagagatactatctgcatttttctggactgttccagctcttttcaatcacttcctaccatacttctacgtgatctttctgactatattattgtttgaccgagcaaagagggatgatgaccggtgctcatcaaagtacgggaagtactggaagatttactgcaacaaagtaccatacagagtcattcctggcatttactgagcatctcgagttctggacgactcttgatattaagctcaacagatgccacgatatccagtcttcataccgatttgctactgattgtgtaatgtcgctggtaggcttgggctgtacgcagtattaggtgtaggcaacttggcttttggcatttaccttgtatgtgtcgtgtatctagggctggggcttgctccttcagttgttagacagtagggggtaatctcaggggtgcaatgtactccctccgtcctaaaataaaagcatatctagtatttaaattttgtttcaaataaaaatgcacaatgaactatcatatcgtgtaacgatgtgtttgattgtgggacaaactagctggagatgggatggtggatttgaaggatatgaaaggatcatgatgctgaagaggaagggtgaattgagtttctct

SEQ ID NO: 50266 - DNA, 2025 bp, Zea Mays
agttttcgcggatctcagttccccttgcacctttttctgggtttctcccccatcacggaaagcgcaaagccgcggccacaccgcaacaaagccaacgagcccaacccggacgggtgagcgagcggctcgtgcggaggtacacagagacgcggaccgggtcgccggacgacgagacgcaccatggcaccgtcgcagctgcttggcagcaccgatctctggcggcccgttgccgccgcgcgcgggggcggctgggccacggccgccgtgctcctcctcctccttgcctctcacctcgcagtcctcctcgtccgcctccgccgccgcctccgcggcggaggccgaaacgcccatccggaggccgccgtggcacccgcgcctgcctccacgccccctggttccgcttccgcctcaggaatagagggattagtgacggagggcgatctgaggcagctggtaggcagtctgggcttgggcgcgcacgaaccagagagggagggctgggagcacgtcatctccaagagcagcgacgacgtctcctacaaggcctggtgcgacaagcccacggctggccctcctaaatatctgagtattacaacatacgagagatgctcggcagagcagctgagggacttctacatggataatgagtacagaatggagtgggataacactgtcaaaaaacatgagcagctgcagtatgacgagaacagtggggtggaggtagggcgaacaattaagaagtttccacttctaacaccaagagagtacatattggcatggcgagtctgggaagcaaacgacaagtctttctattgctttatcaaggaatgtgaacaccctcttgcggcacgacagagaaagtttgttagagtgcaacttctaagatcaggatggtgtattaggaaaatcccaggcagggatgcatgccaaatcacggtgctgcatcatgaggacaatggaatgaatatagagatggcaaagctagctttttccaagggcatctggagctacatatgtaaaatgaacaatgctctacgtcggtatcctcagcatggcagtccatcagtgtcaattctgaccatgcagaaacttatgaagaaggtgatggttttagtatatttaaatttgctgtcagtagttttttcctttcttaaccttctgatctgaagcgtattatggaatatgttgttttttttctgtcatgtgcacatctttgatgaattaggagccaattctaacgttttatttaattattatgtttctcacgttcgtttgcaggacaatgttaaatccctgaaactgtttttagaagttctgaatcaaggaatcacataatttgagtagactgttatagtatcttgattcttgacctgctcgttcaggatctgacaaatctaatcctctttgcatgtcagtttccccaggatttggagactgccgacgcaagcctttctgcttctcagaacactgcagcatcggtcgttccttccacaccgacttccaggacttcaccatgcaagcttgaggggaggaagtctcgccaaatgatcgcgagcgggattctgctggttggaagcatcgtttgtctatctcgaggccgatccaacctcggggcgcagctcgcgatggccttcttcctgaaaaaggccttcaagcaagagaggcaatcaagctcctcatcgacatgaatggtgaaaacaaacgtgactagatgcaggcggtagccgtactggtttgagccgtgcagactccagacaacgtattattagcatttttaacctttctctgattacagaatacgtgactagataacctttgaccctgagccgtgcagacaagttgtaaagagttttttccggaactagttttgtaaataatcgttttcaaatctggaaacatagaattactttgagaatggaagaccgtgcatgcctgattttctaaggaaaattgcggacgaatgcagaatgtggtagggtggagcttcaaaagtgcaggagttcctggccgggtcgctatccagta

SEQ ID NO: 50267 - DNA, 1706 bp, Zea Mays
agttttcgcggatctcagttccccttgcacctttttctgggtttctcccccatcacggaaagcgcaaagccgcggccacaccgcaacaaagccaacgagcccaacccggacgggtgagcgagcggctcgtgcggaggtacacagagacgcggaccgggtcgccggacgacgagacgcaccatggcaccgtcgcagctgcttggcagcaccgatctctggcggcccgttgccgccgcgcgcgggggcggctgggccacggccgccgtgctcctcctcctccttgcctctcacctcgcagtcctcctcgtccgcctccgccgccgcctccgcggcggaggccgaaacgcccatccggaggccgccgtggcacccgcgcctgcctccacgccccctggttccgcttccgcctcaggagggattagtgacggagggcgatctgaggcagctggtaggcagtctgggcttgggcgcgcacgaaccagagagggagggctgggagcacgtcatctccaagagcagcgacgacgtctcctacaaggcctggtgcgacaagcccacggctggccctcctaaatatctgagtattacaacatacgagagatgctcggcagagcagctgagggacttctacatggataatgagtacagaatggagtgggataacactgtcaaaaaacatgagcagctgcagtatgacgagaacagtggggtggaggtagggcgaacaattaagaagtttccacttctaacaccaagagagtacatattggcatggcgagtctgggaagcaaacgacaagtctttctattgctttatcaaggaatgtgaacaccctcttgcggcacgacagagaaagtttgttagagtgcaacttctaagatcaggatggtgtattaggaaaatcccaggcagggatgcatgccaaatcacggtgctgcatcatgaggacaatggaatgaatatagagatggcaaagctagctttttccaagggcatctggagctacatatgtaaaatgaacaatgctctacgtcggtatcctcagcatggcagtccatcagtgtcaattctgaccatgcagaaacttatgaagaagtttccccaggatttggagactgccgacgcaagcctttctgcttctcagaacactgcagcatcggtcgttccttccacaccgacttccaggacttcaccatgcaagcttgaggggaggaagtctcgccaaatgatcgcgagcgggattctgctggttggaagcatcgtttgtctatctcgaggccgatccaacctcggggcgcagctcgcgatggccttcttcctgaaaaaggccttcaagcaagagaggcaatcaagctcctcatcgacatgaatggtgaaaacaaacgtgactagatgcaggcggtagccgtactggtttgagccgtgcagactccagacaacgtattattagcatttttaacctttctctgattacagaatacgtgactagataacctttgaccctgagccgtgcagacaagttgtaaagagttttttccggaactagttttgtaaataatcgttttcaaatctggaaacatagaattactttgagaatggaagaccgtgcatgcctgattttctaaggaaaattgcggacgaatgcagaatgtggtagggtggagcttcaaaagtgcaggagttcctggccgggtcgctatccagta

SEQ ID NO: 50268 - DNA, 2301 bp, Zea Mays
gctactcacgcgtggtcttcgctcccccgtcctctcggcatgagtgacaccacccctgcggccacagcactgaaccactggaaccgctcgatccagctcgccgccgcgtcgggttcttacggccactgcctccgcctctacgcgggaccgctcctcgccgcgggcctccgcggtgacgcctccactttcccttccctcgccaaatcctgcgccgcgctgcgcctgccggggctcggccgtgccgtccacgccctcgcattcctctcgggcgctgccgtttctcgcgacgccttcgtgcgcacctctctcgtcgacatgtacgccaagtgcggcaggcttcccgacgcgcaccgcctgttcgacgaaacgccgtgctcgagccggacgctggtcgcctggaactgcatgatctcggcgtacggacggagctctcaggtcgaggaggccgtcggggtgttcaacgctatgcggcgcgcggaggtcaggcccagcgggagcacggtcgtcggcctcctgtccgggtgtgcggactcggtgtccgcgaggtaccctggggtgtccgtctatgggctcaccatcaaatcgggccttgacgcggatttgcttgtctcgaactcggtgctcaccatgcttgtccgtggtggccagctggactctgcaaggctgcttttcgatcgtgtggagaacaagtccgtggttacttggagcgccatggcatctgcttatttgcagacaggggactggatggaagtgtttgcactgttcagcagcatgcgagagacagagcaacctatggattcagtcgtgcttgccaatctaatcacggccgctatgctgttcggaaacaacttggtggctaaaggcgtgcacgcccttgcaatcaaggttggttttgatcgtcaggaggatttggcagcatccttggtaaacttgtattccaagtgtggaaatcttttggcagctagagaggtttttgattcactccagtggaagagtgtaatcatgtggacttcgatgttgaacggatatgtcgaatgtggttatccggatgaggctctggcgacatttgatgccatgttgtgtgccaaggtagagccaaacaaagcaaccgttctagcggttctttcagcaggcgctaatctgggatccgctaatgttgcccaaaaggtcgaggagcatgtgaaagcaatggagctgcagtcagacctgcaagtttgtactcgactgatagacatgtactgcaagtgtgggagcatccagcgtgctagaaaaatatttgacagtgttcctaacagggacttagctatctggagtgccatgatcaatggacatgcttgcaatggagaaggcagtgaggctgttgtccttttcaacgagatgcagagcaaaggtgtccgacctgatgccattgtcttcactcatatcctaacagcatgcagccactctggttcagtagatgaaggtcttcgctgctttcatagcatgactgcagaacatggtatcgaaccatcagtcgaacattacatgtgcatgattgatttgctttgtaaagctggtcatctcagtagcgctataaagttctttggtgagatgccagttcggttgcgaaaccaggttttggctcctctaattagtgcacacagagttaatggtgctgattcatccgtagagttcatgtcagaaggactactgaacctgggctcccaagattctggtcactgtgtcctaatttctaacatgcttagctgtttggggcagtggaagaaggccagaagttataggacgctaataagcaagcaaggattagtcaagaagcctggatggagttacatcgagctgggtggctagctgctctatgtttgtagagaacccaatccaccgaatcctacgagatggcatgagttctttcaagcgcttttggaccaggctcagtctagttaaggcaatgagatttagtatgatgctggagtttgcattgattcggtgtgacaaaatgcaaagacaatgagcacacacaatcaggaaactagtccgtattgagttgaggcttaatgaggataagctaaggtcgtgctcagcagagcgcagagcgtatagttgtgtaaaacacatttttgcgttcagtggagcacgtatatagccgtgtaaaacatatttttgcattgtaaaccgtactgattacatagtggagtttgaaataagaattgagataataaatatgatagaaaggctgtcggagatagcctaaggactttctggatgtagttgctatggttaaatgaaatgaacagggaattcttg

SEQ ID NO: 50269 - DNA, 3892 bp, Zea Mays
gcctctctcccgcacgcccccgccccgaagacctcgcgacgccaaaaaggaggagagaccgccacccccacgcccgcacggcccactcagcgctctccacccccgtcccctcgcggcggcggcggagcccgagcctgagtcctgcccccccgggctaggttggtctccgcctccgccctccagtctctttggcacaacctgcagccgctggcgcaggtggacatggatctgccaagcctcgccgtcgtgctgcgcgccgcgctcagtcacgttcctgaggagcgcaaagctgcagaggagagtctcaaccagttccagttcacaccacagcatttggtgagattgttacagatcattgtcgatggaagttgtgatatggctgtaagacaggttgcaagcattcatttcaagaattttattgcgaaaaactggtcacccaatgatccagatgagtctccgaaagttttggaaagtgacaaggccatggttcgtgaaaacgtacttggttttattgttcaagtgccccctttgttaagagcccagcttggagaaagtatcaaaacaattattcattctgattatcctgagcagtggccaagtctccttcactgggtttcacacaacatagacttacagaatcaaatttttggtgctttatatgtcctaagggttcttgccagaaaatatgaaaaaatcctggctacgcctctgaaggcaaccaagttggagattccgaagcaactatttgatccaaatgtcttcaatgcatggatggttttgtttataaacttgttggaaaggccagttcctgtggaaggccaaccaatggatcctgagattaggaaatcttgggcctggtggaaagttaagaaatggactatccatatcctgaaccgtctctacaccagattcggtgatctgaagcttcagaaaccagagagtaaagctttcgctcaaatgtttcagaagacttatgcaggaaaaatattggcatgccacatgcagctgctgaatgcaattcgtagtggtgattacttgccagatagggttatcaatcttgttcttcagtatctaactaacagtgttacaaagaacagtatgtatcagatgatgcagcctcagattgatatacttctttttgagataatttttcctcttatgtgcttcaatgacaatgaccaaaagttatgggaagaagatccccatgaatatgttcgcaagggctatgatatcatcgaagatttgtacagtccccgaacagctgctatggactttgtgagtgaattgattagaaagcgagggaaaaacaatctccaaaagttcatccatttcattgtggatatttttaggaggtatgatgaagcacctgctgatcttaagccatatcgccaaaaagatggtgctcttctcgctattgggacactctgtgataaactgaagcaaacagatccatataaaacagagcttgagagcagcatgggttgctgggcagtatgcccatatcaacttttcagaccagaacaattttcgtcaggctatgcactgtatgtctcaggaatgcgtgatccagatcttcctgtgagggttgattcggtctttgcacttcgttgttttgttgaagcttgcaaagatttaaatgagatccgacctatacttcctcagctccttgatgaattttttaagctgatgaatgaggttgagaatgaggatcttgtattcaccctagaaaccattgttgacaaatttggcgaagagatggcaccttatgcactaggtttgtgccagaatttggctgctgctttctggagatgtatggctagttcagaagctgatgatgaagctgatgattctggtgctttggcagctgttggttgcttacgagcaattagcacaattcttgagtccataagcagcctcccacatctttttctgcaaatagaacctacattgttacctataatgcgcaggatgttgacatctgatggccaagatgtttatgaagaagttcttgaaattgtttcctatatgacatttttctcacctacaatttcactggacatgtggagcttgtggccactgatgatggaagcgcttaatgactgggctatagatttctttgagaatattcttgttccactggacaactacatttctcggggaactgatatctttcttgcaagcaaagatccagattaccagcaaagcctgtgggatgcactacaatctataatgatggacgaaaacatggaagattctgatattgaacctgctcccaagctcattgaagttgtttttcaaaattgcaaaggcaacgtggatcagtgggttgagcactacctcaggattacaattgcacggttacgtagagcacagaaaccatacttgaaatgcctccttgtacaagtgatcgctaatgcgctctactacaatcctgcgctgacccttgaatctttaaataaacttggggttgcagctgacatttttaaccattggtttgctatgctacaacaagttaaaaaaagtggagcacgggttaatttcaagagggagcatgataagaaagtttgctgcttgggcctgacctctcttatcgcgcttccagctgataagattccagcagaagctttggatcggatcttcaaagcaacacttgagcttcttgttgcttacaaggaccaagttgcagaagctaagaaggaaaatgaagaggctgctgatgatatggatggttttgatgctgatgaagaagatgatgatgaagttgactccgataaggagatgggtgttgatgatgaagacggggatgaaataagcagtcttcagctgcaaaaattagctgcagagatagctggtctgcaggggatgccagggcgctggtgtttgaagatggtgcactgcccatgcagcatgaagggcagcagcaaaaataatgctgttgacatgaagcaggcgatggaagctgggacagatctgcagcggaatctggcatggagacgtctgttgtcccgtagccctgcaagccatctgctgaacgaggctagaggcttccaaccagccgacgaggatgatgactcagatgatgatttcagtgacgatgaggagctacactcaccaatagatgaggtggatccgttcattttctttgtagaaactgttcaagctttgcaggcatctgatcctgccaggttccagaaccttatgcagacattggatttccgttatcaggcgcttgctagtggcataggacaacatgccgagcaaagaaaaattgaaattgagagagagaaatctgagaaggcaaatgcacagtgacataataaatcatttctggccgcccttgtttttgccattttgccagtataagccattggtgtctggtcaattccctgtgatttgcaggtcgctggtatgagttttgcagccttagccaacctttaagggtaggacaattttaggctcgcaaaattctatccttgtgaggaagcatcttggataatctgtcacgtcggccatgttcttcgtggcctgttgttgccgtcttggttgcgcaagaaagtttctctcgaggacagttgctccgtcttgttgaatttttttttgggggggggcttgtaagagcatttgttatagaaactcacctcaggtggtggggttgcattctccgagttgtcaaagtttattactggttcggagtagattgtatatggtttcggttggtaagacaacggttgtacgagctgcggtatatgtttttttttgtcaacaggacattgtaattgggttttgttctttggtcggcgagagcaagaaaaattggcattgttctgcggagttaccttgtttggtttcattgtccacttgcctgtgttgcaaaattatataatgttataga

SEQ ID NO: 50270 - DNA, 3883 bp, Zea Mays
gcctctctcccgcacgcccccgccccgaagacctcgcgacgccaaaaaggaggagagaccgccacccccacgcccgcacggcccactcagcgctctccacccccgtcccctcgcggcggcggcggagcccgagcctgagtcctgcccccccgggctaggttggtctccgcctccgccctccagtctctttggcacaacctgcagccgctggcgcaggtggacatggatctgccaagcctcgccgtcgtgctgcgcgccgcgctcagtcacgttcctgaggagcgcaaagctgcagaggagagtctcaaccagttccagttcacaccacagcatttggtgagattgttacagatcattgtcgatggaagttgtgatatggctgtaagacaggttgcaagcattcatttcaagaattttattgcgaaaaactggtcacccaatgatccagatgagtctccgaaagttttggaaagtgacaaggccatggttcgtgaaaacgtacttggttttattgttcaagtgccccctttgttaagagcccagcttggagaaagtatcaaaacaattattcattctgattatcctgagcagtggccaagtctccttcactgggtttcacacaacatagacttacagaatcaaatttttggtgctttatatgtcctaagggttcttgccagaaaatatgagttcaagtctgaggatgagaggatacctttatatcacattgtagaggagacatttcctcgtctactaagcatttttagcaaattggttcagattgtcaatccaccaattgaagttgctgatttaatcaagttgatatgtaaaatattttggtcatcaatttatttggagattccgaagcaactatttgatccaaatgtcttcaatgcatggatggttttgtttataaacttgttggaaaggccagttcctgtggaaggccaaccaatggatcctgagattaggaaatcttgggcctggtggaaagttaagaaatggactatccatatcctgaaccgtctctacaccagattcggtgatctgaagcttcagaaaccagagagtaaagctttcgctcaaatgtttcagaagacttatgcaggaaaaatattggcatgccacatgcagctgctgaatgcaattcgtagtggtgattacttgccagatagggttatcaatcttgttcttcagtatctaactaacagtgttacaaagaacagtatgtatcagatgatgcagcctcagattgatatacttctttttgagataatttttcctcttatgtgcttcaatgacaatgaccaaaagttatgggaagaagatccccatgaatatgttcgcaagggctatgatatcatcgaagatttgtacagtccccgaacagctgctatggactttgtgagtgaattgattagaaagcgagggaaaaacaatctccaaaagttcatccatttcattgtggatatttttaggaggtatgatgaagcacctgctgatcttaagccatatcgccaaaaagatggtgctcttctcgctattgggacactctgtgataaactgaagcaaacagatccatataaaacagagcttgagagtatgctggtccgacatgtctttcctgaattcaacagtcgtgttggacacttgcgagcaaaggcagcatgggttgctgggcagtatgcccatatcaacttttcagaccagaacaattttcgtcaggctatgcactgtatgtctcaggaatgcgtgatccagatcttcctgtgagggttgattcggtctttgcacttcgttgttttgttgaagcttgcaaagatttaaatgagatccgacctatacttcctcagctccttgatgaattttttaagctgatgaatgaggttgagaatgaggatcttgtattcaccctagaaaccattgttgacaaatttggcgaagagatggcaccttatgcactaggtttgtgccagaatttggctgctgctttctggagatgtatggctagttcagaagctgatgatgaagctgatgattctggtgctttggcagctgttggttgcttacgagcaattagcacaattcttgagtccataagcagcctcccacatctttttctgcaaatagaacctacattgttacctataatgcgcaggatgttgacatctgatggccaagatgtttatgaagaagttcttgaaattgtttcctatatgacatttttctcacctacaatttcactggacatgtggagcttgtggccactgatgatggaagcgcttaatgactgggctatagatttctttgagaatattcttgttccactggacaactacatttctcggggaactgatatctttcttgcaagcaaagatccagattaccagcaaagcctgtgggatgcactacaatctataatgatggacgaaaacatggaagattctgatattgaacctgctcccaagctcattgaagttgtttttcaaaattgcaaaggcaacgtggatcagtgggttgagcactacctcaggattacaattgcacggttacgtagagcacagaaaccatacttgaaatgcctccttgtacaagtgatcgctaatgcgctctactacaatcctgcgctgacccttgaatctttaaataaacttggggttgcagctgacatttttaaccattggtttgctatgctacaacaagttaaaaaaagtggagcacgggttaatttcaagagggagcatgataagaaagtttgctgcttgggcctgacctctcttatcgcgcttccagctgataagattccagcagaagctttggatcggatcttcaaagcaacacttgagcttcttgttgcttacaaggaccaagttgcagaagctaagaaggaaaatgaagaggctgctgatgatatggatggttttgatgctgatgaagaagatgatgatgaagttgactccgataaggagatgggtgttgatgatgaagacggggatgaaataagcagtcttcagctgcaaaaattagctgcagaggctagaggcttccaaccagccgacgaggatgatgactcagatgatgatttcagtgacgatgaggagctacactcaccaatagatgaggtggatccgttcattttctttgtagaaactgttcaaggcatctgatcctgccaggttccagaaccttatgcagacattggatttccgttatcaggcgcttgctagtggcataggacaacatgccgagcaaagaaaaattgaaattgagagagagaaatctgagaaggcaaatgcacagtgacataataaatcatttctggccgcccttgtttttgccattttgccagtataagccattggtgtctggtcaattccctgtgatttgcaggtcgctggtatgagttttgcagccttagccaacctttaagggtaggacaattttaggctcgcaaaattctatccttgtgaggaagcatcttggataatctgtcacgtcggccatgttcttcgtggcctgttgttgccgtcttggttgcgcaagaaagtttctctcgaggacagttgctccgtcttgttgaatttttttttgggggggggcttgtaagagcatttgttatagaaactcacctcaggtggtggggttgcattctccgagttgtcaaagtttattactggttcggagtagattgtatatggtttcggttggtaagacaacggttgtacgagctgcggtatatgtttttttttgtcaacaggacattgtaattgggttttgttctttggtcggcgagagcaagaaaaattggcattgttctgcggagttaccttgtttggtttcattgtccacttgcctgtgttgcaaaattatataatgttataga

SEQ ID NO: 50271 - DNA, 3829 bp, Zea Mays
gcctctctcccgcacgcccccgccccgaagacctcgcgacgccaaaaaggaggagagaccgccacccccacgcccgcacggcccactcagcgctctccacccccgtcccctcgcggcggcggcggagcccgagcctgagtcctgcccccccgggctaggttggtctccgcctccgccctccagtctctttggcacaacctgcagccgctggcgcaggtggacatggatctgccaagcctcgccgtcgtgctgcgcgccgcgctcagtcacgttcctgaggagcgcaaagctgcagaggagagtctcaaccagttccagttcacaccacagcatttggtgagattgttacagatcattgtcgatggaagttgtgatatggctgtaagacaggttgcaagcattcatttcaagaattttattgcgaaaaactggtcacccaatgatccagatgagtctccgaaagttttggaaagtgacaaggccatggttcgtgaaaacgtacttggttttattgttcaagtgccccctttgttaagagcccagcttggagaaagtatcaaaacaattattcattctgattatcctgagcagtggccaagtctccttcactgggtttcacacaacatagacttacagaatcaaatttttggtgctttatatgtcctaagggttcttgccagaaaatatgagttcaagtctgaggatgagaggatacctttatatcacattgtagaggagacatttcctcgtctactaagcatttttagcaaattggttcagattgtcaatccaccaattgaagttgctgatttaatcaagttgatatgtaaaatattttggtcatcaatttatttggagattccgaagcaactatttgatccaaatgtcttcaatgcatggatggttttgtttataaacttgttggaaaggccagttcctgtggaaggccaaccaatggatcctgagattaggaaatcttgggcctggtggaaagttaagaaatggactatccatatcctgaaccgtctctacaccagattcggtgatctgaagcttcagaaaccagagagtaaagctttcgctcaaatgtttcagaagacttatgcaggaaaaatattggcatgccacatgcagctgctgaatgcaattcgtagtggtgattacttgccagatagggttatcaatcttgttcttcagtatctaactaacagtgttacaaagaacagtatgtatcagatgatgcagcctcagattgatatacttctttttgagataatttttcctcttatgtgcttcaatgacaatgaccaaaagttatgggaagaagatccccatgaatatgttcgcaagggctatgatatcatcgaagatttgtacagtccccgaacagctgctatggactttgtgagtgaattgattagaaagcgagggaaaaacaatctccaaaagttcatccatttcattgtggatatttttaggaggtatgatgaagcacctgctgatcttaagccatatcgccaaaaagatggtgctcttctcgctattgggacactctgtgataaactgaagcaaacagatccatataaaacagagcttgagagcagcatgggttgctgggcagtatgcccatatcaacttttcagaccagaacaattttcgtcaggctatgcactgtatgtctcaggaatgcgtgatccagatcttcctgtgagggttgattcggtctttgcacttcgttgttttgttgaagcttgcaaagatttaaatgagatccgacctatacttcctcagctccttgatgaattttttaagctgatgaatgaggttgagaatgaggatcttgtattcaccctagaaaccattgttgacaaatttggcgaagagatggcaccttatgcactaggtttgtgccagaatttggctgctgctttctggagatgtatggctagttcagaagctgatgatgaagctgatgattctggtgctttggcagctgttggttgcttacgagcaattagcacaattcttgagtccataagcagcctcccacatctttttctgcaaatagaacctacattgttacctataatgcgcaggatgttgacatctgatggccaagatgtttatgaagaagttcttgaaattgtttcctatatgacatttttctcacctacaatttcactggacatgtggagcttgtggccactgatgatggaagcgcttaatgactgggctatagatttctttgagaatattcttgttccactggacaactacatttctcggggaactgatatctttcttgcaagcaaagatccagattaccagcaaagcctgtgggatgcactacaatctataatgatggacgaaaacatggaagattctgatattgaacctgctcccaagctcattgaagttgtttttcaaaattgcaaaggcaacgtggatcagtgggttgagcactacctcaggattacaattgcacggttacgtagagcacagaaaccatacttgaaatgcctccttgtacaagtgatcgctaatgcgctctactacaatcctgcgctgacccttgaatctttaaataaacttggggttgcagctgacatttttaaccattggtttgctatgctacaacaagttaaaaaaagtggagcacgggttaatttcaagagggagcatgataagaaagtttgctgcttgggcctgacctctcttatcgcgcttccagctgataagattccagcagaagctttggatcggatcttcaaagcaacacttgagcttcttgttgcttacaaggaccaagttgcagaagctaagaaggaaaatgaagaggctgctgatgatatggatggttttgatgctgatgaagaagatgatgatgaagttgactccgataaggagatgggtgttgatgatgaagacggggatgaaataagcagtcttcagctgcaaaaattagctgcagaggctagaggcttccaaccagccgacgaggatgatgactcagatgatgatttcagtgacgatgaggagctacactcaccaatagatgaggtggatccgttcattttctttgtagaaactgttcaagctttgcaggcatctgatcctgccaggttccagaaccttatgcagacattggatttccgttatcaggcgcttgctagtggcataggacaacatgccgagcaaagaaaaattgaaattgagagagagaaatctgagaaggcaaatgcacagtgacataataaatcatttctggccgcccttgtttttgccattttgccagtataagccattggtgtctggtcaattccctgtgatttgcaggtcgctggtatgagttttgcagccttagccaacctttaagggtaggacaattttaggctcgcaaaattctatccttgtgaggaagcatcttggataatctgtcacgtcggccatgttcttcgtggcctgttgttgccgtcttggttgcgcaagaaagtttctctcgaggacagttgctccgtcttgttgaatttttttttgggggggggcttgtaagagcatttgttatagaaactcacctcaggtggtggggttgcattctccgagttgtcaaagtttattactggttcggagtagattgtatatggtttcggttggtaagacaacggttgtacgagctgcggtatatgtttttttttgtcaacaggacattgtaattgggttttgttctttggtcggcgagagcaagaaaaattggcattgttctgcggagttaccttgtttggtttcattgtccacttgcctgtgttgcaaaattatataatgttataga

SEQ ID NO: 50272 - DNA, 3762 bp, Zea Mays
gcctctctcccgcacgcccccgccccgaagacctcgcgacgccaaaaaggaggagagaccgccacccccacgcccgcacggcccactcagcgctctccacccccgtcccctcgcggcggcggcggagcccgagcctgagtcctgcccccccgggctaggttggtctccgcctccgccctccagtctctttggcacaacctgcagccgctggcgcaggtggacatggatctgccaagcctcgccgtcgtgctgcgcgccgcgctcagtcacgttcctgaggagcgcaaagctgcagaggagagtctcaaccagttccagttcacaccacagcatttggtgagattgttacagatcattgtcgatggaagttgtgatatggctgtaagacaggttgcaagcattcatttcaagaattttattgcgaaaaactggtcacccaatgatccagatgagtctccgaaagttttggaaagtgacaaggccatggttcgtgaaaacgtacttggttttattgttcaagtgccccctttgttaagagcccagcttggagaaagtatcaaaacaattattcattctgattatcctgagcagtggccaagtctccttcactgggtttcacacaacatagacttacagaatcaaatttttggtgctttatatgtcctaagggttcttgccagaaaatatgaaaaaatcctggctacgcctctgaaggcaaccaagttggagattccgaagcaactatttgatccaaatgtcttcaatgcatggatggttttgtttataaacttgttggaaaggccagttcctgtggaaggccaaccaatggatcctgagattaggaaatcttgggcctggtggaaagttaagaaatggactatccatatcctgaaccgtctctacaccagattcggtgatctgaagcttcagaaaccagagagtaaagctttcgctcaaatgtttcagaagacttatgcaggaaaaatattggcatgccacatgcagctgctgaatgcaattcgtagtggtgattacttgccagatagggttatcaatcttgttcttcagtatctaactaacagtgttacaaagaacagtatgtatcagatgatgcagcctcagattgatatacttctttttgagataatttttcctcttatgtgcttcaatgacaatgaccaaaagttatgggaagaagatccccatgaatatgttcgcaagggctatgatatcatcgaagatttgtacagtccccgaacagctgctatggactttgtgagtgaattgattagaaagcgagggaaaaacaatctccaaaagttcatccatttcattgtggatatttttaggaggtatgatgaagcacctgctgatcttaagccatatcgccaaaaagatggtgctcttctcgctattgggacactctgtgataaactgaagcaaacagatccatataaaacagagcttgagagtatgctggtccgacatgtctttcctgaattcaacagtcgtgttggacacttgcgagcaaaggcagcatgggttgctgggcagtatgcccatatcaacttttcagaccagaacaattttcgtcaggctatgcactgtatgtctcaggaatgcgtgatccagatcttcctgtgagggttgattcggtctttgcacttcgttgttttgttgaagcttgcaaagatttaaatgagatccgacctatacttcctcagctccttgatgaattttttaagctgatgaatgaggttgagaatgaggatcttgtattcaccctagaaaccattgttgacaaatttggcgaagagatggcaccttatgcactaggtttgtgccagaatttggctgctgctttctggagatgtatggctagttcagaagctgatgatgaagctgatgattctggtgctttggcagctgttggttgcttacgagcaattagcacaattcttgagtccataagcagcctcccacatctttttctgcaaatagaacctacattgttacctataatgcgcaggatgttgacatctgatggccaagatgtttatgaagaagttcttgaaattgtttcctatatgacatttttctcacctacaatttcactggacatgtggagcttgtggccactgatgatggaagcgcttaatgactgggctatagatttctttgagaatattcttgttccactggacaactacatttctcggggaactgatatctttcttgcaagcaaagatccagattaccagcaaagcctgtgggatgcactacaatctataatgatggacgaaaacatggaagattctgatattgaacctgctcccaagctcattgaagttgtttttcaaaattgcaaaggcaacgtggatcagtgggttgagcactacctcaggattacaattgcacggttacgtagagcacagaaaccatacttgaaatgcctccttgtacaagtgatcgctaatgcgctctactacaatcctgcgctgacccttgaatctttaaataaacttggggttgcagctgacatttttaaccattggtttgctatgctacaacaagttaaaaaaagtggagcacgggttaatttcaagagggagcatgataagaaagtttgctgcttgggcctgacctctcttatcgcgcttccagctgataagattccagcagaagctttggatcggatcttcaaagcaacacttgagcttcttgttgcttacaaggaccaagttgcagaagctaagaaggaaaatgaagaggctgctgatgatatggatggttttgatgctgatgaagaagatgatgatgaagttgactccgataaggagatgggtgttgatgatgaagacggggatgaaataagcagtcttcagctgcaaaaattagctgcagaggctagaggcttccaaccagccgacgaggatgatgactcagatgatgatttcagtgacgatgaggagctacactcaccaatagatgaggtggatccgttcattttctttgtagaaactgttcaagctttgcaggcatctgatcctgccaggttccagaaccttatgcagacattggatttccgttatcaggcgcttgctagtggcataggacaacatgccgagcaaagaaaaattgaaattgagagagagaaatctgagaaggcaaatgcacagtgacataataaatcatttctggccgcccttgtttttgccattttgccagtataagccattggtgtctggtcaattccctgtgatttgcaggtcgctggtatgagttttgcagccttagccaacctttaagggtaggacaattttaggctcgcaaaattctatccttgtgaggaagcatcttggataatctgtcacgtcggccatgttcttcgtggcctgttgttgccgtcttggttgcgcaagaaagtttctctcgaggacagttgctccgtcttgttgaatttttttttgggggggggcttgtaagagcatttgttatagaaactcacctcaggtggtggggttgcattctccgagttgtcaaagtttattactggttcggagtagattgtatatggtttcggttggtaagacaacggttgtacgagctgcggtatatgtttttttttgtcaacaggacattgtaattgggttttgttctttggtcggcgagagcaagaaaaattggcattgttctgcggagttaccttgtttggtttcattgtccacttgcctgtgttgcaaaattatataatgttataga

SEQ ID NO: 50273 - DNA, 3700 bp, Zea Mays
gcctctctcccgcacgcccccgccccgaagacctcgcgacgccaaaaaggaggagagaccgccacccccacgcccgcacggcccactcagcgctctccacccccgtcccctcgcggcggcggcggagcccgagcctgagtcctgcccccccgggctaggttggtctccgcctccgccctccagtctctttggcacaacctgcagccgctggcgcaggtggacatggatctgccaagcctcgccgtcgtgctgcgcgccgcgctcagtcacgttcctgaggagcgcaaagctgcagaggagagtctcaaccagttccagttcacaccacagcatttggtgagattgttacagatcattgtcgatggaagttgtgatatggctgtaagacaggttgcaagcattcatttcaagaattttattgcgaaaaactggtcacccaatgatccagatgagtctccgaaagttttggaaagtgacaaggccatggttcgtgaaaacgtacttggttttattgttcaagtgccccctttgttaagagcccagcttggagaaagtatcaaaacaattattcattctgattatcctgagcagtggccaagtctccttcactgggtttcacacaacatagacttacagaatcaaatttttggtgctttatatgtcctaagggttcttgccagaaaatatgaaaaaatcctggctacgcctctgaaggcaaccaagttggagattccgaagcaactatttgatccaaatgtcttcaatgcatggatggttttgtttataaacttgttggaaaggccagttcctgtggaaggccaaccaatggatcctgagattaggaaatcttgggcctggtggaaagttaagaaatggactatccatatcctgaaccgtctctacaccagattcggtgatctgaagcttcagaaaccagagagtaaagctttcgctcaaatgtttcagaagacttatgcaggaaaaatattggcatgccacatgcagctgctgaatgcaattcgtagtggtgattacttgccagatagggttatcaatcttgttcttcagtatctaactaacagtgttacaaagaacagtatgtatcagatgatgcagcctcagattgatatacttctttttgagataatttttcctcttatgtgcttcaatgacaatgaccaaaagttatgggaagaagatccccatgaatatgttcgcaagggctatgatatcatcgaagatttgtacagtccccgaacagctgctatggactttgtgagtgaattgattagaaagcgagggaaaaacaatctccaaaagttcatccatttcattgtggatatttttaggaggtatgatgaagcacctgctgatcttaagccatatcgccaaaaagatggtgctcttctcgctattgggacactctgtgataaactgaagcaaacagatccatataaaacagagcttgagagcagcatgggttgctgggcagtatgcccatatcaacttttcagaccagaacaattttcgtcaggctatgcactgtatgtctcaggaatgcgtgatccagatcttcctgtgagggttgattcggtctttgcacttcgttgttttgttgaagcttgcaaagatttaaatgagatccgacctatacttcctcagctccttgatgaattttttaagctgatgaatgaggttgagaatgaggatcttgtattcaccctagaaaccattgttgacaaatttggcgaagagatggcaccttatgcactaggtttgtgccagaatttggctgctgctttctggagatgtatggctagttcagaagctgatgatgaagctgatgattctggtgctttggcagctgttggttgcttacgagcaattagcacaattcttgagtccataagcagcctcccacatctttttctgcaaatagaacctacattgttacctataatgcgcaggatgttgacatctgatggccaagatgtttatgaagaagttcttgaaattgtttcctatatgacatttttctcacctacaatttcactggacatgtggagcttgtggccactgatgatggaagcgcttaatgactgggctatagatttctttgagaatattcttgttccactggacaactacatttctcggggaactgatatctttcttgcaagcaaagatccagattaccagcaaagcctgtgggatgcactacaatctataatgatggacgaaaacatggaagattctgatattgaacctgctcccaagctcattgaagttgtttttcaaaattgcaaaggcaacgtggatcagtgggttgagcactacctcaggattacaattgcacggttacgtagagcacagaaaccatacttgaaatgcctccttgtacaagtgatcgctaatgcgctctactacaatcctgcgctgacccttgaatctttaaataaacttggggttgcagctgacatttttaaccattggtttgctatgctacaacaagttaaaaaaagtggagcacgggttaatttcaagagggagcatgataagaaagtttgctgcttgggcctgacctctcttatcgcgcttccagctgataagattccagcagaagctttggatcggatcttcaaagcaacacttgagcttcttgttgcttacaaggaccaagttgcagaagctaagaaggaaaatgaagaggctgctgatgatatggatggttttgatgctgatgaagaagatgatgatgaagttgactccgataaggagatgggtgttgatgatgaagacggggatgaaataagcagtcttcagctgcaaaaattagctgcagaggctagaggcttccaaccagccgacgaggatgatgactcagatgatgatttcagtgacgatgaggagctacactcaccaatagatgaggtggatccgttcattttctttgtagaaactgttcaagctttgcaggcatctgatcctgccaggttccagaaccttatgcagacattggatttccgttatcaggcgcttgctagtggcataggacaacatgccgagcaaagaaaaattgaaattgagagagagaaatctgagaaggcaaatgcacagtgacataataaatcatttctggccgcccttgtttttgccattttgccagtataagccattggtgtctggtcaattccctgtgatttgcaggtcgctggtatgagttttgcagccttagccaacctttaagggtaggacaattttaggctcgcaaaattctatccttgtgaggaagcatcttggataatctgtcacgtcggccatgttcttcgtggcctgttgttgccgtcttggttgcgcaagaaagtttctctcgaggacagttgctccgtcttgttgaatttttttttgggggggggcttgtaagagcatttgttatagaaactcacctcaggtggtggggttgcattctccgagttgtcaaagtttattactggttcggagtagattgtatatggtttcggttggtaagacaacggttgtacgagctgcggtatatgtttttttttgtcaacaggacattgtaattgggttttgttctttggtcggcgagagcaagaaaaattggcattgttctgcggagttaccttgtttggtttcattgtccacttgcctgtgttgcaaaattatataatgttataga

SEQ ID NO: 50274 - DNA, 4021 bp, Zea Mays
gcctctctcccgcacgcccccgccccgaagacctcgcgacgccaaaaaggaggagagaccgccacccccacgcccgcacggcccactcagcgctctccacccccgtcccctcgcggcggcggcggagcccgagcctgagtcctgcccccccgggctaggttggtctccgcctccgccctccagtctctttggcacaacctgcagccgctggcgcaggtggacatggatctgccaagcctcgccgtcgtgctgcgcgccgcgctcagtcacgttcctgaggagcgcaaagctgcagaggagagtctcaaccagttccagttcacaccacagcatttggtgagattgttacagatcattgtcgatggaagttgtgatatggctgtaagacaggttgcaagcattcatttcaagaattttattgcgaaaaactggtcacccaatgatccagatgagtctccgaaagttttggaaagtgacaaggccatggttcgtgaaaacgtacttggttttattgttcaagtgccccctttgttaagagcccagcttggagaaagtatcaaaacaattattcattctgattatcctgagcagtggccaagtctccttcactgggtttcacacaacatagacttacagaatcaaatttttggtgctttatatgtcctaagggttcttgccagaaaatatgagttcaagtctgaggatgagaggatacctttatatcacattgtagaggagacatttcctcgtctactaagcatttttagcaaattggttcagattgtcaatccaccaattgaagttgctgatttaatcaagttgatatgtaaaatattttggtcatcaatttatttggagattccgaagcaactatttgatccaaatgtcttcaatgcatggatggttttgtttataaacttgttggaaaggccagttcctgtggaaggccaaccaatggatcctgagattaggaaatcttgggcctggtggaaagttaagaaatggactatccatatcctgaaccgtctctacaccagattcggtgatctgaagcttcagaaaccagagagtaaagctttcgctcaaatgtttcagaagacttatgcaggaaaaatattggcatgccacatgcagctgctgaatgcaattcgtagtggtgattacttgccagatagggttatcaatcttgttcttcagtatctaactaacagtgttacaaagaacagtatgtatcagatgatgcagcctcagattgatatacttctttttgagataatttttcctcttatgtgcttcaatgacaatgaccaaaagttatgggaagaagatccccatgaatatgttcgcaagggctatgatatcatcgaagatttgtacagtccccgaacagctgctatggactttgtgagtgaattgattagaaagcgagggaaaaacaatctccaaaagttcatccatttcattgtggatatttttaggaggtatgatgaagcacctgctgatcttaagccatatcgccaaaaagatggtgctcttctcgctattgggacactctgtgataaactgaagcaaacagatccatataaaacagagcttgagagcagcatgggttgctgggcagtatgcccatatcaacttttcagaccagaacaattttcgtcaggctatgcactgtatgtctcaggaatgcgtgatccagatcttcctgtgagggttgattcggtctttgcacttcgttgttttgttgaagcttgcaaagatttaaatgagatccgacctatacttcctcagctccttgatgaattttttaagctgatgaatgaggttgagaatgaggatcttgtattcaccctagaaaccattgttgacaaatttggcgaagagatggcaccttatgcactaggtttgtgccagaatttggctgctgctttctggagatgtatggctagttcagaagctgatgatgaagctgatgattctggtgctttggcagctgttggttgcttacgagcaattagcacaattcttgagtccataagcagcctcccacatctttttctgcaaatagaacctacattgttacctataatgcgcaggatgttgacatctgatggccaagatgtttatgaagaagttcttgaaattgtttcctatatgacatttttctcacctacaatttcactggacatgtggagcttgtggccactgatgatggaagcgcttaatgactgggctatagatttctttgagaatattcttgttccactggacaactacatttctcggggaactgatatctttcttgcaagcaaagatccagattaccagcaaagcctgtgggatgcactacaatctataatgatggacgaaaacatggaagattctgatattgaacctgctcccaagctcattgaagttgtttttcaaaattgcaaaggcaacgtggatcagtgggttgagcactacctcaggattacaattgcacggttacgtagagcacagaaaccatacttgaaatgcctccttgtacaagtgatcgctaatgcgctctactacaatcctgcgctgacccttgaatctttaaataaacttggggttgcagctgacatttttaaccattggtttgctatgctacaacaagttaaaaaaagtggagcacgggttaatttcaagagggagcatgataagaaagtttgctgcttgggcctgacctctcttatcgcgcttccagctgataagattccagcagaagctttggatcggatcttcaaagcaacacttgagcttcttgttgcttacaaggaccaagttgcagaagctaagaaggaaaatgaagaggctgctgatgatatggatggttttgatgctgatgaagaagatgatgatgaagttgactccgataaggagatgggtgttgatgatgaagacggggatgaaataagcagtcttcagctgcaaaaattagctgcagagatagctggtctgcaggggatgccagggcgctggtgtttgaagatggtgcactgcccatgcagcatgaagggcagcagcaaaaataatgctgttgacatgaagcaggcgatggaagctgggacagatctgcagcggaatctggcatggagacgtctgttgtcccgtagccctgcaagccatctgctgaacgaggctagaggcttccaaccagccgacgaggatgatgactcagatgatgatttcagtgacgatgaggagctacactcaccaatagatgaggtggatccgttcattttctttgtagaaactgttcaagctttgcaggcatctgatcctgccaggttccagaaccttatgcagacattggatttccgttatcaggcgcttgctagtggcataggacaacatgccgagcaaagaaaaattgaaattgagagagagaaatctgagaaggcaaatgcacagtgacataataaatcatttctggccgcccttgtttttgccattttgccagtataagccattggtgtctggtcaattccctgtgatttgcaggtcgctggtatgagttttgcagccttagccaacctttaagggtaggacaattttaggctcgcaaaattctatccttgtgaggaagcatcttggataatctgtcacgtcggccatgttcttcgtggcctgttgttgccgtcttggttgcgcaagaaagtttctctcgaggacagttgctccgtcttgttgaatttttttttgggggggggcttgtaagagcatttgttatagaaactcacctcaggtggtggggttgcattctccgagttgtcaaagtttattactggttcggagtagattgtatatggtttcggttggtaagacaacggttgtacgagctgcggtatatgtttttttttgtcaacaggacattgtaattgggttttgttctttggtcggcgagagcaagaaaaattggcattgttctgcggagttaccttgtttggtttcattgtccacttgcctgtgttgcaaaattatataatgttataga

SEQ ID NO: 50275 - DNA, 1432 bp, Zea Mays
ggaaggttcaacttgcacaccccccaggtgaattattgtctctgtcctttgctaatggtcatgtgcagtcgagcatctatataaagaggagggaggggggcgatccaggagcgacacaagtccccagtggtagtaggagctagcactggagctgatagatcgaagaggagagagagagagagagagatagagagggaaaatgtacatggagtgctgtcggtaacagatagagagagggagagggagaaactatgatatttcatcaaggctaaagggagaagagagagagtacagccttgttgccatcttcttgatgcaaagaaagttgcatactacacacacctggggagctcttgtgatgaagcaagcgttagatctggatcacgtacgtactacacagcagccacgcatcagaagttcagaactcggtgcaactctaacttttggccagtttcgtttttcttttcgtttctttcaaacagctcctcatagcacatgcatgcatcctatagctacattctctgtcagcttattaattagtacatatttcgtgtatatatatatggcgtatgtgttaatcatttgcacgtacaggtaggcacaccgtatatgtaggcagaactaaatgcttcaaatttgcaaatttcaagttttccgcgaaagaaactaatttctccattcagataaagtaagatgtctcctctagttaccgtttgtttttagtcatcatgcactgttttcttctatctagttatcctttgccgagttttttttaccggttgtttttttttgttagacactcggcaatgaacttttttgtcaagtgtccgaaaaaaacactcgacaacttgtttgacactcggtaaagagccagattctgatagtgaaccattgcttgctgagtcgtctcaatccactttcactatcaaaactaagcaaaatgggatgagattgaatgaacatgatggacgactatatatcagtcagttatcatataccaattgctcatcaccttggcaaaatatacagagcggagctttttgcttggctgcgtaactccgtttcacatttaatctatagatagatagatggattgaccagtatggagtgcagcggcgtttggatttcagacacacaaatatcgagtccccacaaacgactccggctgctgaatggctgtgtcactgtgtgacatagctgacacacatcccctaacacggcccagaagcgaacctgacctcggcctgtttatattcttttatacaagcaaaaagcccaatacgttagcccgcccatggtatatctatagtatgttaacttttttatatataagatgatgtgaacctcactgacactgagccatgcatgagtggtaagatgtgtgacttgcaatttgatttctctgcaccgtatatgaattaagacatcagag

SEQ ID NO: 50276 - DNA, 2867 bp, Zea Mays
cgccgttgcggcggcgaaaaccgcgcaaaccacgcgcccgctgccgatcctccgatccgatccatccgcccggctcgttggttttcatttcgtgtcgtgtcggacccggcgaccccaaagccagtggcactggcaataggcaatagcggcattcttctcttggtttccttcccgctttcccctaccactgcgggccccacgtgccgcattcccaccgatccccgtcctcctccttcgtccgaccttttcatagtcaaaccttccctcttcatcttcttcttctgtcctatattccgttgaagtcgaagagaggcatgcgctcgggaggtggttggctgcttcatcatagtccgtagccgcctgcgaggcccttcatatcttagaagaggaggaggaggagaagaagagcagggagaggagccaggcgcgcctctgcagcgatggaagtggcggacgaggtggtgcgggtgctcggcgccgggttcgacctcacgtccgacttccgcctgcggttcgccaaggccagcgaggggcggcgcctggtggagctcggcgaggacacaagggacgtgccgctccccggcggcggcggggccacgctccgcggggtgccgcgcgacgtcggcgtcgacaagggcgaccgcatccgcttccgctccgacgtcctcgagttcaatcagatgtcagaattgcttaatcagaaatcttcagtccaagggaaagttccttcaggctattttaacgctctctttgaattaagtggagcttggttgactgatgccaaagacaccaagcatctagcatttgacggatatttcatttctttgtacaacatgcacctaaaggcttctccattagttcttcgagatgaagtaaaaaaggctgttccatccaagtgggatcctgttgcattatcatggtttatcaagacttatgggacacacatcattgttgaaatgggaattggaggtcaggatgtcatatgtgttaaacaaagtcattcttcaacagtttcaactgctgatcttaagttgcacctggaggatcttggcgatttcttattttctgatgggaagaaccactccccaatacatcgtaagacaaaggatggcaagagcacggtgcctgatgtttttgtcaggatagtgcagcattctaataacttgcacctttctagctactctgaaacatcaaccaaggatggactgacagttacctgttcgaagaggggaggagaagcatacctacccaaccactccaaatggctgcaaacagtgccaaagaaacctgatgccattatgtttaaatttgtccccatcacctctcttctaactggtattcctggcagtggttacctcagccatgccatcaatttatatcttcgctataaacctgatcttcaagacttgcaatatttcttggagtttcaagttcctctacaatgggcacctatgttcaatgagcttgtccttggacctcaaaggagaaaaggctcgtacccttcaatgcagttcagatttctcggccccaaactccacgtcagcacttctcaggaagtgcaaccggttggccatccatgtccagcacctctccagtgttccaagcatgatcgcagactccgtggcgtcttcaatgtcagaatggcgcgagtcccaggacaacgacccagggtacatcgaggcaatccagtggaagaactactcgtgcgtctgcacctccgccatcaagtacaacccggagtggcacaagagagcccccggcggagtgtttatcgtcactggcgcccagctcgtctcgaagggggcctgggccaagaaggtcctccatctgcgcctcctctacacccacatccccaactgcaccatccagaggaccgagtggaggaacgctccggcggcgtctcagaaggggagcttcctgacgacgatcagcacgacactgagctcccctttcacgcagcgtgctgacacccaccaggcgaaacatgagccggcggtgcagctgaactcaggtgtctaccccgacggaccgccggtcccgctccggtccaggaagctcctcaagttcgtcgacatctcggaggtggtaaaagggccacacgacgtcccgggccactggctggtgatcgcggcgaagcttgtgaaggagggagggaagatcgggatccatgtgaagtttgcactgctgggctatgaagggcagtcgcagggtaacagtttcatgagctgaagtctctgtacataacaacggctggctctgatctttgtagatttcaggattttggaagaagcacatgattaggatttttaatactggattttttttgtgtgtggagtcgacaggaactgtgtggagggcagtcggaaaatagaccaatcacctctttgttaggaatgcctgtggaattcccgtggcagtataattagagcacgtagttgtaaattgctcctttacaaggtgtgttttatttcagtaggaaacacctcagttaagaattactgtaccgatattttcatttatatttatatgatgcaaaattacgaccacaactaagtatctttaaataaaaaactgcgtcgcccagcagcaggcacgccaggtcaatttgatatcaagttgtagtcaagataacaacatcaactgcaaggaggatggtggtggggaggcgtccgcgctttgtatttatagcggttcatgtcccccgccctcgatgtggtgcgggcgccgaggatttaggtcgctgtcgatggaaggtggcgtcgacgatggaatgggattcggccatttccttgaatggagtgagggctccgatggtagaggtagcaatggcccgtgggattgcgtgaatagcgggggcgaggctcacg

SEQ ID NO: 50277 - DNA, 2894 bp, Zea Mays
cgccgttgcggcggcgaaaaccgcgcaaaccacgcgcccgctgccgatcctccgatccgatccatccgcccggctcgttggttttcatttcgtgtcgtgtcggacccggcgaccccaaagccagtggcactggcaataggcaatagcggcattcttctcttggtttccttcccgctttcccctaccactgcgggccccacgtgccgcattcccaccgatccccgtcctcctccttcgtccgaccttttcatagtcaaaccttccctcttcatcttcttcttctgtcctatattccgttgaagtcgaagagaggcatgcgctcgggaggtggttggctgcttcatcatagtccgtagccgcctgcgaggcccttcatatcttagaagaggaggaggaggagaagaagagcagggagaggagccaggcgcgcctctgcagcgatggaagtggcggacgaggtggtgcgggtgctcggcgccgggttcgacctcacgtccgacttccgcctgcggttcgccaaggccagcgaggggcggcgcctggtggagctcggcgaggacacaagggacgtgccgctccccggcggcggcggggccacgctccgcggggtgccgcgcgacgtcggcgtcgacaagggcgaccgcatccgcttccgctccgacgtcctcgagttcaatcagatgtcagaattgcttaatcagaaatcttcagtccaagggaaagttccttcaggctattttaacgctctctttgaattaagtggagcttggttgactgatgccaaagacaccaagcatctagcatttgacggatatttcatttctttgtacaacatgcacctaaaggcttctccattagttcttcgagatgaagtaaaaaaggctgttccatccaagtgggatcctgttgcattatcatggtttatcaagacttatgggacacacatcattgttgaaatgggaattggaggtcaggatgtcatatgtgttaaacaaagtcattcttcaacagtttcaactgctgatcttaagttgcacctggaggatcttggcgatttcttattttctgatgggaagaaccactccccaatacatcgtgcctgatgtttttgtcaggatagtgcagcattctaataacttgcacctttctagctactctgaaacatcaaccaaggatggactgacagttacctgttcgaagaggggaggagaagcatacctacccaaccactccaaatggctgcaaacagtgccaaagaaacctgatgccattatgtttaaatttgtccccatcacctctcttctaactggtattcctggcagtggttacctcagccatgccatcaatttatatcttcgctataaacctgatcttcaagacttgcaatatttcttggagtttcaagttcctctacaatgggcacctatgttcaatgagcttgtccttggacctcaaaggagaaaaggctcgtacccttcaatgcagttcagatttctcggccccaaactccacgtcagcacttctcaggtatctagctctcagaaaccggttgttggcctacggctatacctggagggcaggaagtgcaaccggttggccatccatgtccagcacctctccagtgttccaagcatgatcgcagactccgtggcgtcttcaatgtcagaatggcgcgagtcccaggacaacgacccagggtacatcgaggcaatccagtggaagaactactcgtgcgtctgcacctccgccatcaagtacaacccggagtggcacaagagagcccccggcggagtgtttatcgtcactggcgcccagctcgtctcgaagggggcctgggccaagaaggtcctccatctgcgcctcctctacacccacatccccaactgcaccatccagaggaccgagtggaggaacgctccggcggcgtctcagaaggggagcttcctgacgacgatcagcacgacactgagctcccctttcacgcagcgtgctgacacccaccaggcgaaacatgagccggcggtgcagctgaactcaggtgtctaccccgacggaccgccggtcccgctccggtccaggaagctcctcaagttcgtcgacatctcggaggtggtaaaagggccacacgacgtcccgggccactggctggtgatcgcggcgaagcttgtgaaggagggagggaagatcgggatccatgtgaagtttgcactgctgggctatgaagggcagtcgcagggtaacagtttcatgagctgaagtctctgtacataacaacggctggctctgatctttgtagatttcaggattttggaagaagcacatgattaggatttttaatactggattttttttgtgtgtggagtcgacaggaactgtgtggagggcagtcggaaaatagaccaatcacctctttgttaggaatgcctgtggaattcccgtggcagtataattagagcacgtagttgtaaattgctcctttacaaggtgtgttttatttcagtaggaaacacctcagttaagaattactgtaccgatattttcatttatatttatatgatgcaaaattacgaccacaactaagtatctttaaataaaaaactgcgtcgcccagcagcaggcacgccaggtcaatttgatatcaagttgtagtcaagataacaacatcaactgcaaggaggatggtggtggggaggcgtccgcgctttgtatttatagcggttcatgtcccccgccctcgatgtggtgcgggcgccgaggatttaggtcgctgtcgatggaaggtggcgtcgacgatggaatgggattcggccatttccttgaatggagtgagggctccgatggtagaggtagcaatggcccgtgggattgcgtgaatagcgggggcgaggctcacg

SEQ ID NO: 50278 - DNA, 1854 bp, Zea Mays
ctaataggtatgactcacgctatgtgtccactggatatcttgatccactagccactgccatctccaagctgtctccttcagattgtgtatacattataaagtataaaatattatttttttcattctttttttatttgtcgtaaatgataaatatttgagaacatagataatattttatatcgtattgtactgtttatatagtaaaatttgaaatatggagtcgatggatgtgagaaagggagggttgttggagacagtctaaacccttctccatccgacggcggacaccagcttccctccgcccgcccacatccctgctgtgtgctgcgcctccccgcctgatcttgtcgcgcccgagagaccgcgcgccagggaacgtcggccgccggagcctggcctgcattccgggggcagcgagaggatgttgcgttgcgcatacacgcagcggcggtgggcgcaccgccgggggggcttcgtaaccggcagcaccggttggtccaagccgccaccgccgggcctcggccgcgccgcgggggttggtacgaagaagtcggagtggtggacggtggacggggagatgcacgagatcggggaaagcgtgccgcatcgcgagcgcttcgccatcccgcgggacaacctccctaaccgccgccgcaagcagatgcgggagcaattcatgcgccgcacccgcctcgttctcaaagactcggaacacgaaacatggtgcaaaaattacatggaattataccaagaacttagagaaaactgggaaaggttgtactgggacgaaggttattcaaaaaagattgccgaatctcatgctaattatgactctgccgaagaagatgatattgacttctcgccatacagcaggagaaggcagtccaatgtagaaccaaacaaggaccttggcttcggggtgaacaaacgaggtgaaacgtgggaaagggttactcaaattcgtgacaaatttgaatatgacagagaaaggagaatgagagaacgaggtaagttcatatttgtttgtaccagatgttttttttttcgttgatgatgtttttgtcttcaaggttatacacataaaatttaaatgaatgatatgaggtattgtttcttgcaataaatgacagctcactccttttgacaactcatcaaaatatactgttatagatagttctgcatgttaagttcttgtaatatctccctgtttcttgcagcatttgctcccatgaacactgagaacaattatgctcggcgtgacccaagatttagaagccaggatgattcaagttttgctcatacgaacatgagtgatgattttggcttgcatgttcaaacttttggaaaccgttctgatcaaagttatgaaaatgagtcaaatttcaggaataagcgtgattcaagtttccaacatgaaccaagtgacagaaaccagcgtaatttaaatatccaaaacgaaccaagtttcagaaaccaccgatatccagatttccaaaaccaaggtggcacaagaagtcagacatttgatgagtagagggtgaaaaaaaagtggctactgatttgctggcaacgtgagcatgctggttttgctgatttctgtggtggctcgtatgagatgttgtaatttattctaaaatgattggtgtaagaaattatctcttgtggtagctggttgcaacaaaatagaaaggaagagatctgctgttataatcttgtaatatacgttggctacttactaagccaaaaaccgtaggcattggattttgggcttgcacgttgctgagcaagttaaaagttggaataatgaggctaatttccaaatctgcctttgcaaaaagaatgcaggttgctcct

SEQ ID NO: 50279 - DNA, 1557 bp, Zea Mays
gacactgggggtgtcacaaccgctgggaaagagcaagtggtgtggcggcgaggcgcatgggcaatgcagaaccctgccccgcctacggagggtcgaggcacaacaagtgggtaatgcggagaagaagggaatctggttctacgactctacaaggagagggcacatgggtggtggccgtgcgtcgtgcctgtctgccctgagggctgcctgatttgctcggatctgcggtctgcctgcctgtgcgtacaacagacagggccagtgccgccggcagagtggtagacaacagactgccatgcgtgcctcacgttgtatccatggagatgaggacgacattgcctccaagtctgctccaccggcatccatcgacggtgcaagatccagcagatagattgatggcgaagaggacgactccatgtccaggcgtactccccgccttgcatcgacattgcagtttccgagcggatcccagtttccggtcgatccggccgcgtagataggagatacgacagctagaggactggctcagggaggtcgacagccgcctctgcgtccgccgccacgcccaccgtgtcatcccggcccttcccatacggcctcgcctgcgggaggaccgaggtcccttgataccaacaacggcggcctccttggggtagcgctccccgttaggcatgagtagggtgagccatcgccatcttggctgtcttcaatgcctggagctccgcgataccgccgggcactagggcataagcgagcgccgccggcctccgtaggcccacccgcccttctcctgtaccttcgccacctggctccgacgagcgcaccccacaacggtgctgctcgccgaatccgaggtggaggcgcctgcgctgtcgacggagctgtcgagcctgtggtggtgtggctgagcctgccctcctatgggctcaccgacatgctgtctcggccttcaggaacctcacgttcctgcagatgctgaacctgagctatgattggttccgtggggaggtcctggcgaccatcggccgccttgcgcatctgcaagtgctagacctgagctacaacgccttctccggtgaggtgaatttaatgctgacggcttatctcttggagcagaagcaacaggtgagctcattgagccctcaatggtaggtggctggacctggtggaccgaagatcctgagccattctgcataccagcacatggataaacaatgctccatagatcatgaagcagatgctcccgccacctaaggatttggagattgctatagtgcaagtagagtgtagtgattatgtagctatagtgcaagcagatgcccccgccacctaagtagcttctttggtgtacacaaaataatgttcaaaggctacaagcattagccgggacatagtccaagcctgatacaagaaaagtgtcacttaacgttatgcccaacattgttttgtttgtgctacgagctgtataactatttaagcaattatgtagctatttttatttcagtttcactagcattgtctagaacacagtgttcgatatacatgttttatagtaat

SEQ ID NO: 50280 - DNA, 860 bp, Zea Mays
gacactgggggtgtcacaaccgctgggaaagagcaagtggtgtggcggcgaggcgcatgggcaatgcagaaccctgccccgcctacggagggtcgaggcacaacaagtgggtaatgcggagaagaagggaatctggttctacgactctacaaggagagggcacatgggtggtggccgtgcgtcgtgcctgtctgccctgagggctgcctgatttgctcggatctgcggtctgcctgcctgtgcgtacaacagacagggccagtgccgccggcagagtggtagacaacagactgccatgcgtgcctcacgttgtatccatggagatgaggacgacattgcctccaagtctgctccaccggcatccatcgacggtgcaaggtgaggtgaatttaatgctgacggcttatctcttggagcagaagcaacaggtgagctcattgagccctcaatggtaggtggctggacctggtggaccgaagatcctgagccattctgcataccagcacatggataaacaatgctccatagatcatgaagcagatgctcccgccacctaaggatttggagattgctatagtgcaagtagagtgtagtgattatgtagctatagtgcaagcagatgcccccgccacctaagtagcttctttggtgtacacaaaataatgttcaaaggctacaagcattagccgggacatagtccaagcctgatacaagaaaagtgtcacttaacgttatgcccaacattgttttgtttgtgctacgagctgtataactatttaagcaattatgtagctatttttatttcagtttcactagcattgtctagaacacagtgttcgatatacatgttttatagtaat

SEQ ID NO: 50281 - DNA, 937 bp, Zea Mays
gacactgggggtgtcacaaccgctgggaaagagcaagtggtgtggcggcgaggcgcatgggcaatgcagaaccctgccccgcctacggagggtcgaggcacaacaagtgggtaatgcggagaagaagggaatctggttctacgactctacaaggagagggcacatgggtggtggccgtgcgtcgtgcctgtctgccctgagggctgcctgatttgctcggatctgcggtctgcctgcctgtgcgtacaacagacagggccagtgccgccggcagagtggtagacaacagactgccatgcgtgcctcacgttgtatccatggagatgaggacgacattgcctccaagtctgctccaccggcatccatcgacggtgcaaggtgaggtgaatttaatgctgacggcttatctcttggagcagaagcaacaggtgagctcattgagccctcaatggtaggtggctggacctggtggaccgaagatcctgagccattctgcataccagcacatgggcgcaattccacagcgccaacaacaaactcctttccatacttggtggtaataaattacggagatgcattagctcaggataaacaatgctccatagatcatgaagcagatgctcccgccacctaaggatttggagattgctatagtgcaagtagagtgtagtgattatgtagctatagtgcaagcagatgcccccgccacctaagtagcttctttggtgtacacaaaataatgttcaaaggctacaagcattagccgggacatagtccaagcctgatacaagaaaagtgtcacttaacgttatgcccaacattgttttgtttgtgctacgagctgtataactatttaagcaattatgtagctatttttatttcagtttcactagcattgtctagaacacagtgttcgatatacatgttttatagtaat

SEQ ID NO: 50282 - DNA, 872 bp, Zea Mays
gacactgggggtgtcacaaccgctgggaaagagcaagtggtgtggcggcgaggcgcatgggcaatgcagaaccctgccccgcctacggagggtcgaggcacaacaagtgggtaatgcggagaagaagggaatctggttctacgactctacaaggagagggcacatgggtggtggccgtgcgtcgtgcctgtctgccctgagggctgcctgatttgctcggatctgcggtctgcctgcctgtgcgtacaacagacagggccagtgccgccggcagagtggtagacaacagactgccatgcgtgcctcacgttgtatccatggagatgaggacgacattgcctccaagtctgctccaccggcatccatcgacggtgcaagcatcatttacaggtgaggtgaatttaatgctgacggcttatctcttggagcagaagcaacaggtgagctcattgagccctcaatggtaggtggctggacctggtggaccgaagatcctgagccattctgcataccagcacatggataaacaatgctccatagatcatgaagcagatgctcccgccacctaaggatttggagattgctatagtgcaagtagagtgtagtgattatgtagctatagtgcaagcagatgcccccgccacctaagtagcttctttggtgtacacaaaataatgttcaaaggctacaagcattagccgggacatagtccaagcctgatacaagaaaagtgtcacttaacgttatgcccaacattgttttgtttgtgctacgagctgtataactatttaagcaattatgtagctatttttatttcagtttcactagcattgtctagaacacagtgttcgatatacatgttttatagtaat

SEQ ID NO: 50283 - DNA, 1602 bp, Zea Mays
gacactgggggtgtcacaaccgctgggaaagagcaagtggtgtggcggcgaggcgcatgggcaatgcagaaccctgccccgcctacggagggtcgaggcacaacaagtgggtaatgcggagaagaagggaatctggttctacgactctacaaggagagggcacatgggtggtggccgtgcgtcgtgcctgtctgccctgagggctgcctgatttgctcggatctgcggtctgcctgcctgtgcgtacaacagacagggccagtgccgccggcagagtggtagacaacagactgccatgcgtgcctcacgttgtatccatggagatgaggacgacattgcctccaagtctgctccaccggcatccatcgacggtgcaaggtacggattcgagcctccggtccttcaatctagccaccaggtagattcgtctcagtggtggtcagattcatctcgacagtggtcagatccagcagatagattgatggcgaagaggacgactccatgtccaggcgtactccccgccttgcatcgacattgcagtttccgagcggatcccagtttccggtcgatccggccgcgtagataggagatacgacagctagaggactggctcagggaggtcgacagccgcctctgcgtccgccgccacgcccaccgtgtcatcccggcccttcccatacggcctcgcctgcgggaggaccgaggtcccttgataccaacaacggcggcctccttggggtagcgctccccgttaggcatgagtagggtgagccatcgccatcttggctgtcttcaatgcctggagctccgcgataccgccgggcactagggcataagcgagcgccgccggcctccgtaggcccacccgcccttctcctgtaccttcgccacctggctccgacgagcgcaccccacaacggtgctgctcgccgaatccgaggtggaggcgcctgcgctgtcgacggagctgtcgagcctgtggtggtgtggctgagcctgccctcctatgggctcaccgacatgctgtctcggccttcaggaacctcacgttcctgcagatgctgaacctgagctatgattggttccgtggggaggtcctggcgaccatcggccgccttgcgcatctgcaagtgctagacctgagctacaacgccttctccgaagcaacaggtgagctcattgagccctcaatggtaggtggctggacctggtggaccgaagatcctgagccattctgcataccagcacatggataaacaatgctccatagatcatgaagcagatgctcccgccacctaaggatttggagattgctatagtgcaagtagagtgtagtgattatgtagctatagtgcaagcagatgcccccgccacctaagtagcttctttggtgtacacaaaataatgttcaaaggctacaagcattagccgggacatagtccaagcctgatacaagaaaagtgtcacttaacgttatgcccaacattgttttgtttgtgctacgagctgtataactatttaagcaattatgtagctatttttatttcagtttcactagcattgtctagaacacagtgttcgatatacatgttttatagtaat

SEQ ID NO: 50284 - DNA, 1679 bp, Zea Mays
gacactgggggtgtcacaaccgctgggaaagagcaagtggtgtggcggcgaggcgcatgggcaatgcagaaccctgccccgcctacggagggtcgaggcacaacaagtgggtaatgcggagaagaagggaatctggttctacgactctacaaggagagggcacatgggtggtggccgtgcgtcgtgcctgtctgccctgagggctgcctgatttgctcggatctgcggtctgcctgcctgtgcgtacaacagacagggccagtgccgccggcagagtggtagacaacagactgccatgcgtgcctcacgttgtatccatggagatgaggacgacattgcctccaagtctgctccaccggcatccatcgacggtgcaaggtacggattcgagcctccggtccttcaatctagccaccaggtagattcgtctcagtggtggtcagattcatctcgacagtggtcagatccagcagatagattgatggcgaagaggacgactccatgtccaggcgtactccccgccttgcatcgacattgcagtttccgagcggatcccagtttccggtcgatccggccgcgtagataggagatacgacagctagaggactggctcagggaggtcgacagccgcctctgcgtccgccgccacgcccaccgtgtcatcccggcccttcccatacggcctcgcctgcgggaggaccgaggtcccttgataccaacaacggcggcctccttggggtagcgctccccgttaggcatgagtagggtgagccatcgccatcttggctgtcttcaatgcctggagctccgcgataccgccgggcactagggcataagcgagcgccgccggcctccgtaggcccacccgcccttctcctgtaccttcgccacctggctccgacgagcgcaccccacaacggtgctgctcgccgaatccgaggtggaggcgcctgcgctgtcgacggagctgtcgagcctgtggtggtgtggctgagcctgccctcctatgggctcaccgacatgctgtctcggccttcaggaacctcacgttcctgcagatgctgaacctgagctatgattggttccgtggggaggtcctggcgaccatcggccgccttgcgcatctgcaagtgctagacctgagctacaacgccttctccgaagcaacaggtgagctcattgagccctcaatggtaggtggctggacctggtggaccgaagatcctgagccattctgcataccagcacatgggcgcaattccacagcgccaacaacaaactcctttccatacttggtggtaataaattacggagatgcattagctcaggataaacaatgctccatagatcatgaagcagatgctcccgccacctaaggatttggagattgctatagtgcaagtagagtgtagtgattatgtagctatagtgcaagcagatgcccccgccacctaagtagcttctttggtgtacacaaaataatgttcaaaggctacaagcattagccgggacatagtccaagcctgatacaagaaaagtgtcacttaacgttatgcccaacattgttttgtttgtgctacgagctgtataactatttaagcaattatgtagctatttttatttcagtttcactagcattgtctagaacacagtgttcgatatacatgttttatagtaat

SEQ ID NO: 50285 - DNA, 1931 bp, Zea Mays
gacactgggggtgtcacaaccgctgggaaagagcaagtggtgtggcggcgaggcgcatgggcaatgcagaaccctgccccgcctacggagggtcgaggcacaacaagtgggtaatgcggagaagaagggaatctggttctacgactctacaaggagagggcacatgggtggtggccgtgcgtcgtgcctgtctgccctgagggctgcctgatttgctcggatctgcggtctgcctgcctgtgcgtacaacagacagggccagtgccgccggcagagtggtagacaacagactgccatgcgtgcctcacgttgtatccatggagatgaggacgacattgcctccaagtctgctccaccggcatccatcgacggtgcaaggtacggattcgagcctccggtccttcaatctagccaccaggtagattcgtctcagtggtggtcagattcatctcgacagtggtcagatccagcagatagattgatggcgaagaggacgactccatgtccaggcgtactccccgccttgcatcgacattgcagtttccgagcggatcccagtttccggtcgatccggccgcgtagataggagatacgacagctagaggactggctcagggaggtcgacagccgcctctgcgtccgccgccacgcccaccgtgtcatcccggcccttcccatacggcctcgcctgcgggaggaccgaggtcccttgataccaacaacggcggcctccttggggtagcgctccccgttaggcatgagtagggtgagccatcgccatcttggctgtcttcaatgcctggagctccgcgataccgccgggcactagggcataagcgagcgccgccggcctccgtaggcccacccgcccttctcctgtaccttcgccacctggctccgacgagcgcaccccacaacggtgctgctcgccgaatccgaggtggaggcgcctgcgctgtcgacggagctgtcgagcctgtggtggtgtggctgagcctgccctcctatgggctcaccgacatgctgtctcggccttcaggaacctcacgttcctgcagatgctgaacctgagctatgattggttccgtggggaggtcctggcgaccatcggccgccttgcgcatctgcaagtgctagacctgagctacaacgccttctccggtacgttgtcctccaacctcagctcctgcgtcaacttactggtgctgagcctccgtagcaaccatatccatggctagacgcggtgacccccacaccgaacacttcctcctccacggttgccgcattgtccttggtggcaacacaagctcttgtacctccagccggtgaaatcggagactcaagaattttatgttttcagcatcatttacaggtgaggtgaatttaatgctgacggcttatctcttggagcagaagcaacaggtgagctcattgagccctcaatggtaggtggctggacctggtggaccgaagatcctgagccattctgcataccagcacatgggcgcaattccacagcgccaacaacaaactcctttccatacttggtggtaataaattacggagatgcattagctcaggataaacaatgctccatagatcatgaagcagatgctcccgccacctaaggatttggagattgctatagtgcaagtagagtgtagtgattatgtagctatagtgcaagcagatgcccccgccacctaagtagcttctttggtgtacacaaaataatgttcaaaggctacaagcattagccgggacatagtccaagcctgatacaagaaaagtgtcacttaacgttatgcccaacattgttttgtttgtgctacgagctgtataactatttaagcaattatgtagctatttttatttcagtttcactagcattgtctagaacacagtgttcgatatacatgttttatagtaat

SEQ ID NO: 50286 - DNA, 1331 bp, Zea Mays
cttcaatccaatgcaacatctacttgtccaccttccatatgaagctaaggttggtggtcctgtgcaatacaggtggagatactcatatcgagcatgcacactccatgttccataagaacgcgacagatattgttgcggatatgatgttctatgttcgaatccaggtgattaatcaagctatgttgagtagtgaaggacgacgtgtaaccagtaagagcgaggcgtcacaatatggactttctatgactgagcaagattttctttaggtaattgatgtttttgcttatgttggaaaaaaattgatgtttttgcatatgatgtactgtgttccttgtatatgttacagttacttataaatgaatggtgtttccatagcattcgattccatggatagccgccaatgatgctgcttggcgtgccttatgccgtttttgggcttcggataatttcaaggcaaagtctatacgacaaagttccaatcgtggaaccgagtcgtatcacaagtatggaggaagctagcagtggtgtagtgcccagtgatgttcaaatatacctgagggggcacagaggaccagatcctgcaaatccagatgtgttgtgtagccaaaaggcaacagatcgtctgggaggctgcatatgctgaggcgatgtctagtcagcacggatcgaactatgactggaggaccgcacctattgatcctcaggctgtgtatgcaactagtggaaaaccccatggaaggtactcgattttcgataatgtcatcgactcgagccaggtgacggttcagaggggaggtttgtcgaggtctgctgctcgtagctcccgtcactctactcaggatactgcagaagttgagcaactacgagaagagcttaggcaacatcaggagcggcaaagggttcaagaggaatacttgaggcaacatgctgctcaacaagaatactatgctactcagtttcaacaacaacaagcactgatacaagtatatgagactcctccagctaccttgccggcgcagcaacaagatgatgggttagactttgtcaatacgctcttcacgagtggaggtagtgagcatcactcttcgatatttcctaatgttgatcgacagtagtgggcttccattcgatgtgttttgtgagacttcaaacttgtgtcttgtgagacttgtgaattcttatgttgaggtggatttgacttgtgagacttgtgtcttgtgagacttgtgaatttttatgttgttattatgtatgtgagatgttatatgtgatatgttgtgtattgtggctgttatatatatttgttatgtatgcaatgtgttgaatttcca

SEQ ID NO: 50287 - DNA, 1177 bp, Zea Mays
atgatgctgcttggcgtgccttatgccgtttttgggcttcggataatttcaaggcaaagtctatacgacaaagttccaatcgtggaaccgagtcgtatcacaagtatggaggaagctagcagtggtgtagtgcccagtgatgttcaaatatacctgagggggcacagaggaccagatcctgcaaatccagatgtgttgtgtagccaaaaggcaacagatcgtctggctgcatatgctgaggcgatgtctagtcagcacggatcgaactatgactggaggaccgcacctattgatcctcaggctgtgtatgcaactagtggaaaaccccatggaaggtactcgattttcgataatgtcatcgactcgagccaggtgacggttcagaggggaggtttgtcgaggtctgctgctcgtagctcccgtcactctactcaggatactgcagaagttgagcaactacgagaagagcttaggcaacatcaggagcggcaaagggttcaagaggaatacttgaggcaacatgctgctcaacaagaatactatgctactcagtttcaacaacaacaagcactgatacaagtaagttcaaaaagatcattcattttaagttatgtattgatttaaaacactgacattaatgtgttcggaaatttggtagcaactagcacaagcccaagggatacagtttctgatggcccccccacctccaccttccatacattttccttggccttcacctccacctccacctaccgaacatcaggtatgcaaatttatcataatttacttgttacattacgatgtaactccgtgaatgtcatttgtataggtatatgagactcctccagctaccttgccggcgcagcaacaagatgatgggttagactttgtcaatacgctcttcacgagtggaggtagtgagcatcactcttcgatatttcctaatgttgatcgacagtagtgggcttccattcgatgtgttttgtgagacttcaaacttgtgtcttgtgagacttgtgaattcttatgttgaggtggatttgacttgtgagacttgtgtcttgtgagacttgtgaatttttatgttgttattatgtatgtgagatgttatatgtgatatgttgtgtattgtggctgttatatatatttgttatgtatgcaatgtgttgaatttcca

SEQ ID NO: 50288 - DNA, 333 bp, Zea Mays
atgctgtttacacacaatcctagacagaccttcgtgccattccaatttccagcaaaaactcaaggtcatgctagaaaaactcaaggtcagagtttcagctgccccatatctctcgtgtcacttccagtgccctcgtcgtacgcatgcgtgtggtctggatccctcctcagggtgaagcttgcttcctcggcttcggggcagcccggcctctcggtaaggaactgctcccagaacttgtcgttcaccaccacctggggacctgtatgttcttcagggggagcttggctgccccgatgcggcctacccgttgcatctgctgcggccccagcgtga

SEQ ID NO: 50289 - DNA, 3859 bp, Zea Mays
cgttaacgacgcacgaaacggtttcctgtagaaaagtaatcctttataatggcagaagagaaaggacggagcaaaacagaccccttctttactctaaccatatctgccgcaaaccgcaacacacaatccagagcgaggtcgtggcgtggactccaaatccttcctcttcaggactcaacagcggagttcgctccgaccacgggccctgctgccatggcggcggcggcagatcttgagcctcagttggggatatcgccggcgacacccgacattgtccgcaagctagctcgaccgtccgggacaaccaccgcagttggctattgctgcactgctctgtacaccagcacggctgctggccccggaaaggtggacggcgatggccttgcctcggtgccgttgcatgcccatgaacattctcagtccgccgcactggataatttggtccaagtggactgtgatcccgtgggcactcaggagtccagcaccttgcctgcactggtgggcgagtcctctggcaaggttgcacagcaagagcagcagcacaaggaaggtgttgatagtgccagagatgcaggtgctgcttctcctgcccctacttctactccggagaacatggagcccacacctcggaggagggggaagaagtcgaccaagggggttcaacgtctcaaagtggccaaagataaagtgatgaagctcaaggtgaccacgcctagtacagtaaaaaagaagaaaatgacagaggatgatattcaacatattggtgcccacaggtctaatagtgcaagacgcaagttagatttggatttacattcatcagaaagtaaaacatgtttcagcagagccgagctgatgattaatttgaagtgcattggcaagagttatggtttaatcagtgaactgactacacataagaggagcaagagagggaaaaaaaggaaaatgatggtaggaaacaaggaaagtggtcagctagcacttttgccttacaactggactacaacggttgcggtatcacgccctctaactcatgtaaagaaattgcgggctaaggttttgggccttactgatgaaacaatgcgggtttgtgctgttttggcaaattggaatgggagcgacaatgaaagttttgaaggttttgatattggcaatggacccgaatgggatacaacaagacaaatgtttgaacaatttgtggatatattcattaatgctatgtttgatctaattgggcctagaaaatattctcagtggggaggatccctaattgattctgtggtgggtactttccttacacagaattctgctgataatttatcaagccaagcttttatgaatatagcggcgaagtttcctaagagtgagagacactgtcaagataatgcgactcaattaatagatggtgtcgatagaaaaatgaagtcaaaagaagcatttgataactttgacttggttcattcacattttgatgaatacattaaatctgaggaagaagttgactttgataaaaaggtgaaaagtcaatacggcgaagactacaatagaattataggaaattttgctgcaagtatgaagcagaaaaacatctctacttgggacagtgatcttatgaatttagtgaaagataaatatggaaatccagtgtgcgacgagaacaacttgagaaagatcttagcttcactacgacaaccagtcacagcatctaattggaaagagttacaggaggaagcatataaaaaaggatacaataacaaaagtcaaactgaaacaagtgatgttgtagattgggaatcagttctaaacgctccattttctgaggttgcaaaatgcattgcaatcaggggacagcacaacattttggctgtgcggatactggcttttctcgaccatgtaaagaaagctcaagatggaagctttgacctagattggcttagatttgtatcacgtgaaaaagccaaaaaatttctgcttagtatacatgggattggagtgaaaagtgctgactgcatttgccttttgtcattgaggcatagagcatttccagttgatgtcaatgtagctcgcatagtgacaaggctaggatgggtcaaacttcagcccttaaacggtgctgatttccacctaattgacctttatccgatcttggatgatgtacaaaggtatttatggcctcgattgtgcaccattgataaggaaaagttgtatgaactgcactgtcttatgataacttttggaaaggtagtttgcaggaaaaaaaatccaaactgcggagcttgtcctttcagtgcaagttgtaaatattacaatagttcacttgccaaaaagtcgctacctcttccagagaagcatgaacaaggagaacagcaaacaagcatggttgcttatgggagttgcacaccaagttctcaacaaatgtatcggtatcaaattgcaataagcagcactactactgaaacaccacccatccatagctgcgagccaattgttgagatgccaccaagcccagaatatgaatacaatgaaacacctaatgagcaagaagatttctacgaagattatgcatgtgatattgaagattttgcaccaggagtacaatatgattctgaaataaatatttgttcaaacaagcatacgctgaacaataattcttggacaccgaactgtgggaaggacttggctgtgatcaatccaaagtgtagctttggccaaagtaaaaaactaaaaaataccggtcgtcttaggacagaacacaatgcatacgtcctcccagatggtcatgtaatcctagaagagttcgaagacagagttccgggagatagatgtccttacctactagtggttatttcatgtcctgatgactacaaagttaaaggcacggttctgataccgtgtcggacagcaaatagaggaaagtttccactgaatggtacctacttccaggaaaatgaggtttttgcagattactcatctagccgaaacccaataactgtacctagggaatgtattgggatgctggagagaagcattgtatactttggttcatctatacactcgatcacaaaaggtcaaacaaggcaagatatacaggaatgcttgaaggaaggatatatctgtgtacggtcgttccaccggaagaccagaataccactacgcctatgtagcacactacatgctaccaacaccaaacctgctcgtgagaagcctatgaagcggactaggacatcgccggaggggaagaagaacgggacatcgccggaggggaagaagaacgagagcctcttctgatgcttgacttcgtgtacaagttgtagctgaatgttcctcaaaatataggattaactagttctgtaacactaacaccccggcttggttatgacttagaaactgttaggccatgtttggttcacatctcctaaagtttagtcacttgtttaaaaatgttaaaggaggtaactaaaaaaaacctcttaaataggacattatagggactaatgtttagttcctaaaatttaggagatgactaaaggaaccaaacatagtttactaagccttagtaaacgtgtgaataaatgcctctcttgtgtggcggctatttttatttctgcatattattttcatctgtttaccttgatgttattgcaactggaattgcatcctgaaaattggtaggatcaatccttcaccaaacatttgtaggattaggaataagtgtatttaggccaaccagcattgtgaagaatgtaattctagtcttcttcggcacggttattatcaacatcggaaaggtcaaccctgtaattctagtcttctcgtactaatttactattgacacgaacaactgaatgacgactcgctagac

SEQ ID NO: 50290 - DNA, 3769 bp, Zea Mays
cacgaaacggtttcctgtagaaaagtaatcctttataatggcagaagagaaaggacggagcaaaacagaccccttctttactctaaccatatctgccgcaaaccgcaacacacaatccagagcgaggtcgtggcgtggactccaaatccttcctcttcaggactcaacagcggagttcgctccgaccacgggccctgctgccatggcggcggcggcagatcttgagcctcagttggggatatcgccggcgacacccgacattgtccgcaagctagctcgaccgtccgggacaaccaccgcagttggctattgctgcactgctctgtacaccagcacggctgctggccccggaaaggtggacggcgatggccttgcctcggtgccgttgcatgcccatgaacattctcagtccgccgcactggataatttggtccaagtggactgtgatcccgtgggcactcaggagtccagcaccttgcctgcactggtgggcgagtcctctggcaaggttgcacagcaagagcagcagcacaaggaaggtgttgatagtgccagagatgcaggtgctgcttctcctgcccctacttctactccggagaacatggagcccacacctcggaggagggggaagaagtcgaccaagggggttcaacgtctcaaagtggccaaagataaagtgatgaagctcaaggtgaccacgcctagtacagtaaaaaagaagaaaatgacagaggatgatattcaacatattggtgcccacaggtctaatagtgcaagacgcaagttagatttggatttacattcatcagaaagtaaaacatgtttcagcagagccgagctgatgattaatttgaagtgcattggcaagagttatggtttaatcagtgaactgactacacataagaggagcaagagagggaaaaaaaggaaaatgatggtaggaaacaaggaaagtggtcagctagcacttttgccttacaactggactacaacggttgcggtatcacgccctctaactcatgtaaagaaattgcgggctaaggttttgggccttactgatgaaacaatgcgggtttgtgctgttttggcaaattggaatgggagcgacaatgaaagttttgaaggttttgatattggcaatggacccgaatgggatacaacaagacaaatgtttgaacaatttgtggatatattcattaatgctatgtttgatctaattgggcctagaaaatattctcagtggggaggatccctaattgattctgtggtgggtactttccttacacagaattctgctgataatttatcaagccaagcttttatgaatatagcggcgaagtttcctaagagtgagagacactgtcaagataatgcgactcaattaatagatggtgtcgatagaaaaatgaagtcaaaagaagcatttgataactttgacttggttcattcacattttgatgaatacattaaatctgaggaagaagttgactttgataaaaaggtgaaaagtcaatacggcgaagactacaatagaattataggaaattttgctgcaagtatgaagcagaaaaacatctctacttgggacagtgatcttatgaatttagtgaaagataaatatggaaatccagtgtgcgacgagaacaacttgagaaagatcttagcttcactacgacaaccagtcacagcatctaattggaaagagttacaggaggaagcatataaaaaaggatacaataacaaaagtcaaactgaaacaagtgatgttgtagattgggaatcagttctaaacgctccattttctgaggttgcaaaatgcattgcaatcaggggacagcacaacattttggctgtgcggatactggcttttctcgaccatgtaaagaaagctcaagatggaagctttgacctagattggcttagatttgtatcacgtgaaaaagccaaaaaatttctgcttagtatacatgggattggagtgaaaagtgctgactgcatttgccttttgtcattgaggcatagagcatttccagttgatgtcaatgtagctcgcatagtgacaaggctaggatgggtcaaacttcagcccttaaacggtgctgatttccacctaattgacctttatccgatcttggatgatgtacaaaggtagtttgcaggaaaaaaaatccaaactgcggagcttgtcctttcagtgcaagttgtaaatattacaatagttcacttgccaaaaagtcgctacctcttccagagaagcatgaacaaggagaacagcaaacaagcatggttgcttatgggagttgcacaccaagttctcaacaaatgtatcggtatcaaattgcaataagcagcactactactgaaacaccacccatccatagctgcgagccaattgttgagatgccaccaagcccagaatatgaatacaatgaaacacctaatgagcaagaagatttctacgaagattatgcatgtgatattgaagattttgcaccaggagtacaatatgattctgaaataaatatttgttcaaacaagcatacgctgaacaataattcttggacaccgaactgtgggaaggacttggctgtgatcaatccaaagtgtagctttggccaaagtaaaaaactaaaaaataccggtcgtcttaggacagaacacaatgcatacgtcctcccagatggtcatgtaatcctagaagagttcgaagacagagttccgggagatagatgtccttacctactagtggttatttcatgtcctgatgactacaaagttaaaggcacggttctgataccgtgtcggacagcaaatagaggaaagtttccactgaatggtacctacttccaggaaaatgaggtttttgcagattactcatctagccgaaacccaataactgtacctagggaatgtattgggatgctggagagaagcattgtatactttggttcatctatacactcgatcacaaaaggtcaaacaaggcaagatatacaggaatgcttgaaggaaggatatatctgtgtacggtcgttccaccggaagaccagaataccactacgcctatgtagcacactacatgctaccaacaccaaacctgctcgtgagaagcctatgaagcggactaggacatcgccggaggggaagaagaacgggacatcgccggaggggaagaagaacgagagcctcttctgatgcttgacttcgtgtacaagttgtagctgaatgttcctcaaaatataggattaactagttctgtaacactaacaccccggcttggttatgacttagaaactgttaggccatgtttggttcacatctcctaaagtttagtcacttgtttaaaaatgttaaaggaggtaactaaaaaaaacctcttaaataggacattatagggactaatgtttagttcctaaaatttaggagatgactaaaggaaccaaacatagtttactaagccttagtaaacgtgtgaataaatgcctctcttgtgtggcggctatttttatttctgcatattattttcatctgtttaccttgatgttattgcaactggaattgcatcctgaaaattggtaggatcaatccttcaccaaacatttgtaggattaggaataagtgtatttaggccaaccagcattgtgaagaatgtaattctagtcttcttcggcacggttattatcaacatcggaaaggtcaaccctgtaattctagtcttctcgtactaatttactattgacacgaacaactgaatgacgactcgctagac

SEQ ID NO: 50291 - DNA, 1642 bp, Zea Mays
atggcaagtggaagaagaagggataaggatgcctcccttaacgagtacggggaacaacgacttgcaaccatcgcagaaaacaaaaggcgattggaagctcttaatatccctactttgagcaatatgaatcaacatggtagaactaaaaaaagaactaagaggattcataacactagtgatgtagcaactgaaggtcacaatctgcgtgcaaggccacaaaagaattgtgttgaaaatggaaatgaacaaattaatgaagaccttggttgtgaatcaattggagatttcttatgtgataatgaagattcacgcaacatcgcagaaaagaagaggaaaggaaggggtatcactagattggatgaaatatttgcaaggaagcccagcatgcctaaaatcaaagtagaactcaataaatatgttgtttgttctgactggagacttgtggatcctcaaaagaagtatgaggtgtgggaagatatgaagaaaatttatgatatcgatgatgctgccttcagttggtttatggatagcgccggaaggaaatggaaggattttaagtcaacattaaagcatcaattttttgatgaaaacatatcagatgcagacctaaaggaaagacataaaggcagagttaatgatgatgattggaagtttctcatagaatattggaggtcatctgaatctgaaactcgctcagaaatagcaaaagaatgtcgttcaaaggtgggaaatcatcacacttcaggcagcaagagctttgcttgttctgcgcatgaactagctaataaactaaggcgttctccaagaagagatgaggtctatatcaagacacatacaagaaaaaatggagttccatcaagacatgcagaaccaattattaataaattgaaagccatagttgaagcccatccagagttgaagcaaagaacaattcaagagggcgatgcatttgctgctgcttgtggagaaaaggagccaagaggacgtgttcgtgctttgggtttaggaccaactccccaagatgttggtaccccagggttgaagtgttacacacccacaagactgcagatggaaggtttggcccgtaaaaaggctgaatgtgagaaagtagctcttcaacaacgcataactgaattggagcagcaaatgcaagaggaaagggtggcaagggaattgcaagatgtggaactcatttcacataatggttcaaattcacgacagactgggagccgaaggtatgaagagcatgatgtggaggcgcaacatgatgctcaatttgtagaagatgaagattgtgcagaaaatcacatcaatcatcactgtgatgatggttggaaaggatgtaatattatatgccattattggacctgagcaacctgtggctaagggaacaattgtttcaactaatcctaacactttgctaggaggtgtgcctcttgggaaagaatattgtgaagttattgtgaacattgtattgaaaagggatgccattttgccttgtccttatggttatgtagagacgatggctgatgctcatcaaatgtcagttgcttggctttataagaggatgaagattagcaaggcatcaggatcaccccaaggtattggaggtatgctaaaacttgctttacctattacatga

SEQ ID NO: 50292 - DNA, 1141 bp, Zea Mays
cgcgcccctcggcatctcaactacctcgtgatgcctcccccacccccgatctataaaccagccgctcgccactcctcccgtatgctcacctcgacgtccacgatctgcttctcccccgcgcccctcggcaagctcgcagtccaggatccgcctctcgcgcgcccccgccgacgcacacagctcgcagacggcgccccccatatccacttcttgctggccgctcagatcctctgtatccctcctcttgctgcagatgatatgctagagcgtcagcaaggcggactctccatccctccagagagggagggaggcagcagccaatgcccagcacgtaccaatctgcgtgacaggaggtgtccggactgcgtacccacgggcgagcaggattttgacgatccacgacccgatgaagtcgccggcgtcggtgacgcacaaggcggcggtggccatcgtgcgctgacgcccagtcccttcttcctctcggggcggtggtgccgccaggcgaatggattcgtccgagagcgagcaaatagggttctattcttgcgtagtgcagctccgaagtcgctgctaccaggtgcccccgtgcctatcaagtatcaacactgcttatcaacgggctatacccttgtatggtggacattcacgaagagcaagctccagcaccgttgctgttctggtctcgaccgtggagatggaactatgattaaaagaaaagagaacactacggaaggaacctactgatgctcagtgtactgcgactttcccacgatgctcatgatgtcgaagtctgcagttgctagactggcccgagtaattgctaagttttgtagaaaatgtttaggcccatttttgaacgcatgaatttcgtatagactgtatttcacacgaaatacacaggaacaaacatttttcctgccttccaaacaggctgttaggattagttgaagttccagtttgatcataggcacctaggtcgatgctctttagtaagatgtaagtaatctgtcttctggccaggttgagcaaggcttagctgcagtgtatcagtgtggtacaactgatgtatttatactgtacaacctaatgagactgtatggattagagctataagaacctgcacagatatttcacaataaac

SEQ ID NO: 50293 - DNA, 1585 bp, Zea Mays
ctcgtatcgtcccgggctcctctcaaaagatcacagagagagaaaacgaaacgccgctccctcgcctcatcccttccctcctcctgcatcctacctccctggtgcccgtcacgttcaccacgttcgcccgctcattcaccggcggcgtcgcccagctcggcctcccgccgcccacggaggccaggtccccgggccgcccgctcggtccgccacggaggcaaggcatggtggcgtctttagacaatgtgaggggcttgactttagccatgtcatctagtgcattcattggttctagctttgtgatcaagaaagttggattgaagaaggctggggataatggggtgcgtgcagcttctggaggcttctcatatctatatgagccgttatggtggttgggaatgataactatgattctaggcgaggtagccaattttgcagcatatgcatttgcccctgccgtacttgttactcctctaggagctctaagcatcatatttagtgctcgcacacttcattctgaaagaaaatttgcacatgtttggcgttgttggttgcatactatgtgttgttggttctgttggtatagttttgcatgccccaaaggagagaaaaattgattctatgaaggaaatatggcatcttgcaacacagccaggttttattgtttattcatgcgtggcagtggcctgcgttctttttttgatatttcgggttgttgagcgctctgggcacagattgatgcttgtttacatagcaatctgttcattaatgggatctcttacggttatcagtgtaaaagcagttgctattgctttaaagctatcatttggtggatcaaatcaattcatctacgtccagacatggttcttcatagtagtagtcactatttgctgcttggtgcaattaaactacttaaacaaggctctggactcgttcaacacggctgtggtttctcctgtatactacgtgatgttcaccattcttaccattgttgcaaacatgatcatgtacaaggactgggcctcgcagactgcaacgcagatcgcaacacagctatgtgggtttgtgaccattgtcgcggggacttttctgcttcacaagactagggatatgggaaatccaccaccaccaccacctgaccaaatgtgcctgcaagaagccggggaatgtgctccacggtcaatgaccagttctagctgaacacactaagatgtcaaaatctcacagcctctatggactgaattggaattttgagctatatggtgacctttgtagatatattaggaaggagtaaagattggagtgcccagcagttggacataccgatgaagttttacgtttctgcaaaagaaagaatgaactgtatgaaggcatcggaatcttgtgaagacatgagattcaaactagctacctaactttggtaaatagcttgttatgccattttaaaacgatcatgatgctcaagaggcagggcgaattaggcttctctatactttttgtgataattaaaccctagttacaaatttaactttacccgagtgtccaatatatgtacaaaagctttaaaccttaatttcaactgtac

SEQ ID NO: 50294 - DNA, 1618 bp, Zea Mays
ctcgtatcgtcccgggctcctctcaaaagatcacagagagagaaaacgaaacgccgctccctcgcctcatcccttccctcctcctgcatcctacctccctggtgcccgtcacgttcaccacgttcgcccgctcattcaccggcggcgtcgcccagctcggcctcccgccgcccacggaggccaggtccccgggccgcccgctcggtccgccacggaggcaaggaattggttcttttagtacttgacagaaataaatatattccaggcatggtggcgtctttagacaatgtgaggggcttgactttagccatgtcatctagtgcattcattggttctagctttgtgatcaagaaagttggattgaagaaggctggggataatgggcttctggaggcttctcatatctatatgagccgttatggtggttgggaatgataactatgattctaggcgaggtagccaattttgcagcatatgcatttgcccctgccgtacttgttactcctctaggagctctaagcatcatatttagtgctcgcacacttcattctgaaagaaaatttgcacatgtttggcgttgttggttgcatactatgtgttgttggttctgttggtatagttttgcatgccccaaaggagagaaaaattgattctatgaaggaaatatggcatcttgcaacacagccaggttttattgtttattcatgcgtggcagtggcctgcgttctttttttgatatttcgggttgttgagcgctctgggcacagattgatgcttgtttacatagcaatctgttcattaatgggatctcttacggttatcagtgtaaaagcagttgctattgctttaaagctatcatttggtggatcaaatcaattcatctacgtccagacatggttcttcatagtagtagtcactatttgctgcttggtgcaattaaactacttaaacaaggctctggactcgttcaacacggctgtggtttctcctgtatactacgtgatgttcaccattcttaccattgttgcaaacatgatcatgtacaaggactgggcctcgcagactgcaacgcagatcgcaacacagctatgtgggtttgtgaccattgtcgcggggacttttctgcttcacaagactagggatatgggaaatccaccaccaccaccacctgaccaaatgtgcctgcaagaagccggggaatgtgctccacggtcaatgaccagttctagctgaacacactaagatgtcaaaatctcacagcctctatggactgaattggaattttgagctatatggtgacctttgtagatatattaggaaggagtaaagattggagtgcccagcagttggacataccgatgaagttttacgtttctgcaaaagaaagaatgaactgtatgaaggcatcggaatcttgtgaagacatgagattcaaactagctacctaactttggtaaatagcttgttatgccattttaaaacgatcatgatgctcaagaggcagggcgaattaggcttctctatactttttgtgataattaaaccctagttacaaatttaactttacccgagtgtccaatatatgtacaaaagctttaaaccttaatttcaactgtac

SEQ ID NO: 50295 - DNA, 1278 bp, Zea Mays
ctcgtatcgtcccgggctcctctcaaaagatcacagagagagaaaacgaaacgccgctccctcgcctcatcccttccctcctcctgcatcctacctccctggtgcccgtcacgttcaccacgttcgcccgctcattcaccggcggcgtcgcccagctcggcctcccgccgcccacggaggccaggtccccgggccgcccgctcggtccgccacggaggcaagcttctggaggcttctcatatctatatgagccgttatggtggttgggaatgataactattttgcatgccccaaaggagagaaaaattgattctatgaaggaaatatggcatcttgcaacacagccaggttttattgtttattcatgcgtggcagtggcctgcgttctttttttgatatttcgggttgttgagcgctctgggcacagattgatgcttgtttacatagcaatctgttcattaatgggatctcttacggttatcagtgtaaaagcagttgctattgctttaaagctatcatttggtggatcaaatcaattcatctacgtccagacatggttcttcatagtagtagtcactatttgctgcttggtgcaattaaactacttaaacaaggctctggactcgttcaacacggctgtggtttctcctgtatactacgtgatgttcaccattcttaccattgttgcaaacatgatcatgtacaaggactgggcctcgcagactgcaacgcagatcgcaacacagctatgtgggtttgtgaccattgtcgcggggacttttctgcttcacaagactagggatatgggaaatccaccaccaccaccacctgaccaaatgtgcctgcaagaagccggggaatgtgctccacggtcaatgaccagttctagctgaacacactaagatgtcaaaatctcacagcctctatggactgaattggaattttgagctatatggtgacctttgtagatatattaggaaggagtaaagattggagtgcccagcagttggacataccgatgaagttttacgtttctgcaaaagaaagaatgaactgtatgaaggcatcggaatcttgtgaagacatgagattcaaactagctacctaactttggtaaatagcttgttatgccattttaaaacgatcatgatgctcaagaggcagggcgaattaggcttctctatactttttgtgataattaaaccctagttacaaatttaactttacccgagtgtccaatatatgtacaaaagctttaaaccttaatttcaactgtac

SEQ ID NO: 50296 - DNA, 1580 bp, Zea Mays
ctcgtatcgtcccgggctcctctcaaaagatcacagagagagaaaacgaaacgccgctccctcgcctcatcccttccctcctcctgcatcctacctccctggtgcccgtcacgttcaccacgttcgcccgctcattcaccggcggcgtcgcccagctcggcctcccgccgcccacggaggccaggtccccgggccgcccgctcggtccgccacggaggcaaggcatggtggcgtctttagacaatgtgaggggcttgactttagccatgtcatctagtgcattcattggttctagctttgtgatcaagaaagttggattgaagaaggctggggataatgggcttctggaggcttctcatatctatatgagccgttatggtggttgggaatgataactatgattctaggcgaggtagccaattttgcagcatatgcatttgcccctgccgtacttgttactcctctaggagctctaagcatcatatttagtgcagtgctcgcacacttcattctgaaagaaaatttgcacatgtttggcgttgttggttgcatactatgtgttgttggttctgttggtatagttttgcatgccccaaaggagagaaaaattgattctatgaaggaaatatggcatcttgcaacacagccaggttttattgtttattcatgcgtggcagtggcctgcgttctttttttgatatttcgggttgttgagcgctctgggcacagattgatgcttgtttacatagcaatctgttcattaatgggatctcttacggttatcagtgtaaaagcagttgctattgctttaaagctatcatttggtggatcaaatcaattcatctacgtccagacatggttcttcatagtagtagtcactatttgctgcttggtgcaattaaactacttaaacaaggctctggactcgttcaacacggctgtggtttctcctgtatactacgtgatgttcaccattcttaccattgttgcaaacatgatcatgtacaaggactgggcctcgcagactgcaacgcagatcgcaacacagctatgtgggtttgtgaccattgtcgcggggacttttctgcttcacaagactagggatatgggaaatccaccaccaccaccacctgaccaaatgtgcctgcaagaagccggggaatgtgctccacggtcaatgaccagttctagctgaacacactaagatgtcaaaatctcacagcctctatggactgaattggaattttgagctatatggtgacctttgtagatatattaggaaggagtaaagattggagtgcccagcagttggacataccgatgaagttttacgtttctgcaaaagaaagaatgaactgtatgaaggcatcggaatcttgtgaagacatgagattcaaactagctacctaactttggtaaatagcttgttatgccattttaaaacgatcatgatgctcaagaggcagggcgaattaggcttctctatactttttgtgataattaaaccctagttacaaatttaactttacccgagtgtccaatatatgtacaaaagctttaaaccttaatttcaactgtac

SEQ ID NO: 50297 - DNA, 691 bp, Zea Mays
cgtcatttcatttaaggaagaaaagaggctctggactcgttcaacacggctgtggtttctcctgtatactacgtgatgttcaccattcttaccattgttgcaaacatgatcatgtacaaggactgggcctcgcagactgcaacgcagatcgcaacacagctatgtgggtttgtgaccattgtcgcggggacttttctgcttcacaagactagggatatgggaaatccaccaccaccaccacctgaccaaatgtgcctgcaagaagccggggaatgtgctccacggtcaatgaccagttctagctgaacacactaagatgtcaaaatctcacagcctctatggactgaattggaattttgagctatatggtgacctttgtagatatattaggaaggagtaaagattggagtgcccagcagttggacataccgatgaagttttacgtttctgcaaaagaaagaatgaactgtatgaaggcatcggaatcttgtgaagacatgagattcaaactagctacctaactttggtaaatagcttgttatgccattttaaaacgatcatgatgctcaagaggcagggcgaattaggcttctctatactttttgtgataattaaaccctagttacaaatttaactttacccgagtgtccaatatatgtacaaaagctttaaaccttaatttcaactgtac

SEQ ID NO: 50298 - DNA, 708 bp, Zea Mays
gaacatcagattgcagcgtggccatgttttccaataatgccattgctctggactcgttcaacacggctgtggtttctcctgtatactacgtgatgttcaccattcttaccattgttgcaaacatgatcatgtacaaggactgggcctcgcagactgcaacgcagatcgcaacacagctatgtgggtttgtgaccattgtcgcggggacttttctgcttcacaagactagggatatgggaaatccaccaccaccaccacctgaccaaatgtgcctgcaagaagccggggaatgtgctccacggtcaatgaccagttctagctgaacacactaagatgtcaaaatctcacagcctctatggactgaattggaattttgagctatatggtgacctttgtagatatattaggaaggagtaaagattggagtgcccagcagttggacataccgatgaagttttacgtttctgcaaaagaaagaatgaactgtatgaaggcatcggaatcttgtgaagacatgagattcaaactagctacctaactttggtaaatagcttgttatgccattttaaaacgatcatgatgctcaagaggcagggcgaattaggcttctctatactttttgtgataattaaaccctagttacaaatttaactttacccgagtgtccaatatatgtacaaaagctttaaaccttaatttcaactgtac

SEQ ID NO: 50299 - DNA, 689 bp, Zea Mays
gatttttgaagatggaaaaaatatggctctggactcgttcaacacggctgtggtttctcctgtatactacgtgatgttcaccattcttaccattgttgcaaacatgatcatgtacaaggactgggcctcgcagactgcaacgcagatcgcaacacagctatgtgggtttgtgaccattgtcgcggggacttttctgcttcacaagactagggatatgggaaatccaccaccaccaccacctgaccaaatgtgcctgcaagaagccggggaatgtgctccacggtcaatgaccagttctagctgaacacactaagatgtcaaaatctcacagcctctatggactgaattggaattttgagctatatggtgacctttgtagatatattaggaaggagtaaagattggagtgcccagcagttggacataccgatgaagttttacgtttctgcaaaagaaagaatgaactgtatgaaggcatcggaatcttgtgaagacatgagattcaaactagctacctaactttggtaaatagcttgttatgccattttaaaacgatcatgatgctcaagaggcagggcgaattaggcttctctatactttttgtgataattaaaccctagttacaaatttaactttacccgagtgtccaatatatgtacaaaagctttaaaccttaatttcaactgtac

SEQ ID NO: 50300 - DNA, 1765 bp, Zea Mays
caaaagttctctaaataggttgtagttttgttttgtatttattcaagtccaaaaaacaagtcacaaatgtcatcaattactttcattatctatataatgcagccaacatttttgtttaaggagttgctaaatggttgtcaaatgtagagaggaaatgaggttagatgagaagttgctaaatttaggaagttcatttagagaactgttggagataagtttttatgtcaactaactaaattattgatttagaaagccttttagagaactactggagttgctcttagggcctgtagctattccctaaagggctccttgtaccttttctttcgtgtgtcttaatcctcttcagttgtacattacagtttactccacagctgataagataaatgcattttttcccttattacttcaggcaaggaaatcaagtgcagaaaacggcatagaagaaagcagtatgtggatcaagagccatgcattatgaggggggtttatttcaaaaatatgaaatggcaggctgccataaaagttgacagaaacagattcacttgggtactgttgggacacaggacgaagcagcccggctttatgatagggctgcttttatgtgtggaagggagccaaacttcgtgctttctgaggaagagaagcaggagctacggaggtacacctgggaggacttcttagcagtgactcgcaacacgataaccagcaaaaaacaaaggaaagtcggatcactaaggcgtagcaaggcagacctgttcatgggacagagtgacggcgacaccgagatggccaatggtggcggttcatcgaattccgacaatggcgacgcggggacgtcggcgtcatagatcgctcccaggggttctgccgttgtggcaactcaaagtggagtcctccagcacattcatcccggtcatgcatgatacgagctccgtctaggattttgttctctcaataattaatttccatgtgcataaggccccgttggtctaatcaaatcaaaggttagggaaaccatgccatctcagacgagaattagaggtggtccattgttagaaaacagttcatctgaatagtaatgtataccggttctgaaaactgtgtatatctaccgataggttcaccttacattttgcccagtgtaattagtttaccttataatttaccaaaaaggaataatttttccctttccgttaataccatctctatactagtgggaagaaaatctgcctggaactctgagagtcgtcttttcagtttacaagtttcgaattgatgctgtatcttttttgagtgtattgacccagcttgaggtatgcttgaagttggaaagaagaaacgcacaataaaaggtcatgcagtgtaccagaaattcagttgactacagaatccaccatacacacgagatgccatacacgtccttgtctgagtagggatggcaatttgatttatggatttcgatatccatctgttatccaacctgacggatatgggcatggatatatttttttgactcatggggtagttccatgtcatacccgaagtcggacgggcacggattcagacattacttcccacctgtgagttgcccgttcgatatcccaaattgatccataactttatttaagactctcactggttatattacacttacacatcaaagagcataccctagtccctaagcgtgtcagacttgagactcccaccggccaccacccatcgctcctaggctagccaccacccctcccctagtttgagctta

SEQ ID NO: 50301 - DNA, 821 bp, Zea Mays
aggcaaggaaatcaagtgcagaaaacggcatagaagaaagcagtatgtggatcaagagccatgcattatgaggggggtttatttcaaaaatatgaaatggcaggctgccataaaagttgacagaaacagattcacttgggtactgttgggacacaggacgaagcagcccggctttatgatagagggctgcttttatgtgtggaagggagccaaacttcgtgctttctgaggaagagaagcaggagctacggaggtacacctgggaggacttcttagcagtgactcgcaacacgataaccagcaaaaaacaaaggaaagtcggatcactaaggcgtagcaaggcagacctgttcatgggacagagtgacggcgacaccgagatggccaatggtggcggttcatcgaattccgacaatggcgacgcggggacgtcggcgtcatagatcgctcccaggggttctgccgttgtggcaactcaaagtggagtcctccagcacattcatcccggtcatgcatgatacgagctccgtctaggattttgttctctcaataattaatttccatgtgcataaggccccgttggtctaatcaaatcaaaggttagggaaaccatgccatctcagacgagaattagaggtggtccattgttagaaaacagttcatctgaatagtaatgtataccggttctgaaaactgtgtatatctaccgataggttcaccttacattttgcccagtgtaattagtttaccttataatttaccaaaaaggaataatttttccctttccgttaataccatctctatactagtgggaagaaaat

SEQ ID NO: 50302 - DNA, 1258 bp, Zea Mays
gtgagaaataagaaaataaaatgaaaacaattaaaaatgggttaaaatactattttaaaggatatgttcacttgtaagtactattatagagaagataaaattgtaagtactaaaagagagcagcctgataaaaggaatactataatagcaaaaagctcctcccagcagtgcacgcgtgaagctcggcggcggccggcacggtgcatcctccgctcttgcctcacctcccggtccatcctcgctgctcacgcgtgcctcacctcgacagcagccttccctcgcgacagggataaggacttaaggaggcgtcgctcggtgcaaagaatccatggcatggggaggtctgttcttgtgcatgggccgccccacgcaggagcaacagaagtcctgccttgcagccgctggtggcttcaactacgacacagctctccaaggcgccacacgcccaaagtcagtgtctaccttgacctctgacgaagctggtggcgaaataggtgacaaggatcttaccgagcgtggattctttgtgaaccgatcgcgtgttctggtcggctcaggttctgacgcctttgtccatgccaaatctgccctcctctcatggaggcacttggctttagggtgggcgaacgtggaaccggacaccccggtgaagatagcgtatgtgaccgacgtcgattcagacacgtccaaagggtgctcccggtccaagatgtttgccttcggcagcggcactctacagggccatctgctggccggagaggagcggttctcggtacaggtggacgaggaggagagggtgtggtacgaggtgctttctttctcgaagccggcgcacgtcctggcgacgctgtgctacccgtatatgcactgcacagagaatgctgtatgtattccccctttgaattctattccgacatggcctggtttggcggcgctggggcctgggtgggatgatatatgttcgggcattccgagtggagtttgcccatcccatattttaatttcttcatgatggtggtggatctgttgcagctgaatgaattaagacaggaagatatataaaattcatgcgcacacagaatgaacacgagatgagaatcgagaaggtgcagtgaatgatttatccattatttatgaagtgattaatttagtaattaatttaatcttcaaagtgcgtagttatctaacaaattattagaaaacatgggtctttccgatacttatcaaaaatatgtataacgagatttttaaatcgttt

SEQ ID NO: 50303 - DNA, 1282 bp, Zea Mays
caaaaagctcctcccagcagtgcacgcgtgaagctcggcggcggccggcacggtgcatcctccgctcttgcctcacctcccggtccatcctcgctgctcacgcgtgcctcacctcgacagcagccttccctcgcgacagggataaggacttaaggaggcgtcgctcggtgcaaagaatccatggcatggggaggtctgttcttgtgcatgggccgccccacgcaggagcaacagaagtcctgccttgcagccgctggtggcttcaactacgacacagctctccaaggcgccacacgcccaaagtcagtgtctaccttgacctctgacgaagctggtggcgaaataggtgacaaggatcttaccgagcgtggattctttgtgaaccgatcgcgtgttctggtcggctcaggttctgacgcctttgtccatgccaaatctgccctcctctcatggaggcacttggctttagggtgggcgaacgtggaaccggacaccccggtgaaggtaggtacaaggttctgcatctgctacaaggagttgatcccctgggtgacgctgccgcttcagatagcgtatgtgaccgacgtcgattcagacacgtccaaagggtgctcccggtccaagatgtttgccttcggcagcggcactctacagggccatctgctggttggccggagaggagcggttctcggtacaggtggacgaggaggagagggtgtggtacgaggtgctttctttctcgaagccggcgcacgtcctggcgacgctgtgctacccgtatgtgcagctgaggcagaagcatttcgcgcagcagtcgggacaggcgctcgtcaggcatgtgtccacctgctcttccaagcagaagcagtagtagagctttgtggagatgcactgcacagagaatgctgtatgtattccccctttgaattctattccgacatggcctggtttggcggcgctggggcctgggtgggatgatatatgttcgggcattccgagtggagtttgcccatcccatattttaatttcttcatgatggtggtggatctgttgcagctgaatgaattaagacaggaagatatataaaattcatgcgcacacagaatgaacacgagatgagaatcgagaaggtgcagtgaatgatttatccattatttatgaagtgattaatttagtaattaatttaatcttcaaagtgcgtagttatctaacaaattattagaaaacatgggtctttccgatacttatcaaaaatatgtataacgagatttttaaatcgttt

SEQ ID NO: 50304 - DNA, 1288 bp, Zea Mays
ctcctcccagcagtgcacgcgtgaagctcggcggcggccggcacggtgcatcctccgctcttgcctcacctcccggtccatcctcgctgctcacgcgtgcctcacctcgacagcagccttccctcgcgacagggataaggacttaaggaggcgtcgctcggtgcaaagaatccatggcatggggaggtctgttcttgtgcatgggccgccccacgcaggagcaacagaagtcctgccttgcagccgctggtggcttcaactacgacacagctctccaaggcgccacacgcccaaagtcagtgtctaccttgacctctgacgaagctggtggcgaaataggtgacaaggatcttaccgagcgtggattctttgtgaaccgatcgcgtgttctggtcggctcaggttctgacgcctttgtccatgccaaatctgccctcctctcatggaggaactggtggttttcaggcacttggctttagggtgggcgaacgtggaaccggacaccccggtgaaggtaggtacaaggttctgcatctgctacaaggagttgatcccctgggtgacgctgccgcttcagatagcgtatgtgaccgacgtcgattcagacacgtccaaagggtgctcccggtccaagatgtttgccttcggcagcggcactctacagggccatctgctggccggagaggagcggttctcggtacaggtggacgaggaggagagggtgtggtacgaggtgctttctttctcgaagccggcgcacgtcctggcgacgctgtgctacccgtatgtgcagctgaggcagaagcatttcgcgcagcagtcgggacaggcgctcgtcaggcatgtgtccacctgctcttccaagcagaagcagtagtagagctttgtggagatgcactgcacagagaatgctgtatgtattccccctttgaattctattccgacatggcctggtttggcggcgctggggcctgggtgggatgatatatgttcgggcattccgagtggagtttgcccatcccatattttaatttcttcatgatggtggtggatctgttgcagctgaatgaattaagacaggaagatatataaaattcatgcgcacacagaatgaacacgagatgagaatcgagaaggtgcagtgaatgatttatccattatttatgaagtgattaatttagtaattaatttaatcttcaaagtgcgtagttatctaacaaattattagaaaacatgggtctttccgatacttatcaaaaatatgtataacgagatttttaaatcgttt

SEQ ID NO: 50305 - DNA, 1260 bp, Zea Mays
gcacgcgtgaagctcggcggcggccggcacggtgcatcctccgctcttgcctcacctcccggtccatcctcgctgctcacgcgtgcctcacctcgacagcagccttccctcgcgacaggcaggataaggacttaaggaggcgtcgctcggtgcaaagaatccatggcatggggaggtctgttcttgtgcatgggccgccccacgcaggagcaacagaagtcctgccttgcagccgctggtggcttcaactacgacacagctctccaaggcgccacacgcccaaagtcagtgtctaccttgacctctgacgaagctggtggcgaaataggtgacaaggatcttaccgagcgtggattctttgtgaaccgatcgcgtgttctggtcggctcaggttctgacgcctttgtccatgccaaatctgccctcctctcatggaggcacttggctttagggtgggcgaacgtggaaccggacaccccggtgaaggtaggtacaaggttctgcatctgctacaaggagttgatcccctgggtgacgctgccgcttcagatagcgtatgtgaccgacgtcgattcagacacgtccaaagggtgctcccggtccaagatgtttgccttcggcagcggcactctacagggccatctgctggccggagaggagcggttctcggtacaggtggacgaggaggagagggtgtggtacgaggtgctttctttctcgaagccggcgcacgtcctggcgacgctgtgctacccgtatgtgcagctgaggcagaagcatttcgcgcagcagtcgggacaggcgctcgtcaggcatgtgtccacctgctcttccaagcagaagcagtagtagagctttgtggagatgcactgcacagagaatgctgtatgtattccccctttgaattctattccgacatggcctggtttggcggcgctggggcctgggtgggatgatatatgttcgggcattccgagtggagtttgcccatcccatattttaatttcttcatgatggtggtggatctgttgcagctgaatgaattaagacaggaagatatataaaattcatgcgcacacagaatgaacacgagatgagaatcgagaaggtgcagtgaatgatttatccattatttatgaagtgattaatttagtaattaatttaatcttcaaagtgcgtagttatctaacaaattattagaaaacatgggtctttccgatacttatcaaaaatatgtataacgagatttttaaatcgttt

SEQ ID NO: 50306 - DNA, 1295 bp, Zea Mays
gatctaatcagacaagcgaacgaggacgggaacgggcacgggggtgccgcgccccgcgatatccgtcgtccccggcgaggcggcgacactgctgctgtaggtgcgagccgtagctactggcctgccgtagctactgtaggcggcgacactgctgtaggataaggacttaaggaggcgtcgctcggtgcaaagaatccatggcatggggaggtctgttcttgtgcatgggccgccccacgcaggagcaacagaagtcctgccttgcagccgctggtggcttcaactacgacacagctctccaaggcgccacacgcccaaagtcagtgtctaccttgacctctgacgaagctggtggcgaaataggtgacaaggatcttaccgagcgtggattctttgtgaaccgatcgcgtgttctggtcggctcaggttctgacgcctttgtccatgccaaatctgccctcctctcatggaggcacttggctttagggtgggcgaacgtggaaccggacaccccggtgaaggtaggtacaaggttctgcatctgctacaaggagttgatcccctgggtgacgctgccgcttcagatagcgtatgtgaccgacgtcgattcagacacgtccaaagggtgctcccggtccaagatgtttgccttcggcagcggcactctacagggccatctgctggccggagaggagcggttctcggtacaggtggacgaggaggagagggtgtggtacgaggtgctttctttctcgaagccggcgcacgtcctggcgacgctgtgctacccgtatgtgcagctgaggcagaagcatttcgcgcagcagtcgggacaggcgctcgtcaggcatgtgtccacctgctcttccaagcagaagcagtagtagagctttgtggagatgcactgcacagagaatgctgtatgtattccccctttgaattctattccgacatggcctggtttggcggcgctggggcctgggtgggatgatatatgttcgggcattccgagtggagtttgcccatcccatattttaatttcttcatgatggtggtggatctgttgcagctgaatgaattaagacaggaagatatataaaattcatgcgcacacagaatgaacacgagatgagaatcgagaaggtgcagtgaatgatttatccattatttatgaagtgattaatttagtaattaatttaatcttcaaagtgcgtagttatctaacaaattattagaaaacatgggtctttccgatacttatcaaaaatatgtataacgagatttttaaatcgttt

SEQ ID NO: 50307 - DNA, 1158 bp, Zea Mays
tatgggaggcttatgtggcggataaggacttaaggaggcgtcgctcggtgcaaagaatccatggcatggggaggtctgttcttgtgcatgggccgccccacgcaggagcaacagaagtcctgccttgcagccgctggtggcttcaactacgacacagctctccaaggcgccacacgcccaaagtcagtgtctaccttgacctctgacgaagctggtggcgaaataggtgacaaggatcttaccgagcgtggattctttgtgaaccgatcgcgtgttctggtcggctcaggttctgacgcctttgtccatgccaaatctgccctcctctcatggaggcacttggctttagggtgggcgaacgtggaaccggacaccccggtgaaggtaggtacaaggttctgcatctgctacaaggagttgatcccctgggtgacgctgccgcttcagatagcgtatgtgaccgacgtcgattcagacacgtccaaagggtgctcccggtccaagatgtttgccttcggcagcggcactctacagggccatctgctggccggagaggagcggttctcggtacaggtggacgaggaggagagggtgtggtacgaggtgctttctttctcgaagccggcgcacgtcctggcgacgctgtgctacccgtatgtgcagctgaggcagaagcatttcgcgcagcagtcgggacaggcgctcgtcaggcatgtgtccacctgctcttccaagcagaagcagtagtagagctttgtggagatgcactgcacagagaatgctgtatgtattccccctttgaattctattccgacatggcctggtttggcggcgctggggcctgggtgggatgatatatgttcgggcattccgagtggagtttgcccatcccatattttaatttcttcatgatggtggtggatctgttgcagctgaatgaattaagacaggaagatatataaaattcatgcgcacacagaatgaacacgagatgagaatcgagaaggtgcagtgaatgatttatccattatttatgaagtgattaatttagtaattaatttaatcttcaaagtgcgtagttatctaacaaattattagaaaacatgggtctttccgatacttatcaaaaatatgtataacgagatttttaaatcgttt

SEQ ID NO: 50308 - DNA, 492 bp, Zea Mays
acgcaattcagcctagggttttgtctccgctacaccctcctccactcttatataagcctccgccgccgctaacattcctcttcccctcgcgcaccgctcctgagtcctgtccaccctgccaccgccgacgccgcgccgccgcagcaattgtcaccgtcgctatggcccgtatcaaggtgcacgagctccgggggaagagcaagacggacctgcaggcgcagctcaaggagctgaagtctgagctctccctcctccgcgtagccaaggtcaccggcggcgcacccaacaagctctccaagatgtggtgcgcacctcgatcgcgcgcgtgctcacagtgatctcgcagaagcagaagtcggcgttgcgggaggcgtacaagaagaagaacctgctccccctcgacctccgccctaagaagacccgtgccatccgccgccgtctgaccaagcaccagcccaggtttaggttttaggattataaggtgtatgcaag

SEQ ID NO: 50309 - DNA, 1243 bp, Zea Mays
acgcaattcagcctagggttttgtctccgctacaccctcctccactcttatataagcctccgccgccgctaacattcctcttcccctcgcgcaccgctcctgagtcctgtccaccctgccaccgccgacgccgcgccgccgcagcaattgtcaccgtcgctatggccgtatcaaggtgcacgagctccgggggaagagcaagacggacctgcaggcgcagctcaaggagctgaagtctgagctctccctcctccgcgtagccaaggtcaccggcggcgcacccaacaagctctccaagatcaaggtggtgcgcacctcgatcgcgcgcgtgctcacagtgatctcgcagaagcagaagtcggcgttgcgggaggcgtacaagaagaagaacctgctccccctcgacctccgccctaagaagacccgtgccatccgccgccgtctgaccaagcaccagctctctctgaagaccgagagggaaaagaagcgtgagaagtacttccccatgaggaagtatgctatcaaggcctaggtcagaactgtgagatgctgcgcttagcatatcatcggctgtgttttaatttttggtttgtatggacatttgctgtgggtcggaagtacgatgtattcctccatttccataaatggctaaattggtttgactggcaattcgtattggcgttcatatttggtggcaacttttctttgtattcttctaaactagatgtttgctgttcattatatttgtgtgaccgttgctcatggtatgtactccgtcccagaaacagaagttgagccgaggctcgacagtactggagtgtttggtttgaggaatgatgtagtccatcatcttctccctcattttttgtttggtttgtagaatggagtgagttaatccatcaccacctcattcttcatagttagttgtttagtactaatatgtggaatggagttatcccaccaaatttaaggaataaatccatgatataccgtttcattttgaattttgaatagagtgattcatcaaaccaaacactttataagactttataagggaaacggaaacgaagactcagggaaagagcgttccaataacatgtttggagcaatcggccaatcgcaaagaaattaagctaactatacgtgtgcaaatttctagtatcaactctcccttcgaaacaaactgtactataccacaaaccgctgcggacaaaagaaaccaccccttaaaaatgacactcaa

SEQ ID NO: 50310 - DNA, 576 bp, Zea Mays
acgcaattcagcctagggttttgtctccgctacaccctcctccactcttatataagcctccgccgccgctaacattcctcttcccctcgcgcaccgctcctgagtcctgtccaccctgccaccgccgacgccgcgccgccgcagcaattgtcaccgtcgctatggcccgtatcaaggtgcacgagctccgggggaagagcaagacggacctgcaggcgcagctcaaggagctgaagtctgagctctccctcctccgcgtagccaaggtcaccggcggcgcacccaacaagctctccaagatcaaggtggtgcgcacctcgatcgcgcgcgtgctcacagtgatctcgcagaagcagaagtcggcgttgcgggaggcgtacaagaagaagaacctgctccccctcgacctccgccctaagaagacccgtgccatccgccgccgtctgaccaagcaccagctctctctgaagaccgagagggaaaagaagcgtgagaagtacttccccatgaggaagtatgctatcaaggcctaggcattgcttgatgagcgcaaaaaaaaaaaaaaacaagaagaag

SEQ ID NO: 50311 - DNA, 1673 bp, Zea Mays
aagacatactaaacgttagtcgtagtcagataaccaaacaccccaaactgcctgttcaccattttcgccccaaatctgccgaggggattagccgatcgaagcgtcatcggcggctgcgacaatggcggggctgtcgctgcggtgcggcgactgcggcgcgcagctgcggagtgtggaggaggcgcaggcgcacgctgagtccaccaaccacgccaacttcgtcgagtccactgaggccgtcctcaaccttgtctgctccaactgcggcaagccatgccgctcccataccgaggtggacctgcacacgaagcgcacgggccatacggagttcgcggacaagaccgcggaggcggccaaacccatcgacctcgaggcgccgcttaagccggcctccgatgatgccacggacgtcgatgcgtcggcctcggcgactgaggagacacaagagacggttgtgccagaggtgaacaaggaggtgctcacggaccttgagggcatgggtttctcgacagcacgtgccactagggcgcttcacttctctggtaatagcaccattgaatgtgctattaactggctttctgagcaccaagaggacgcagatattgatgagatgcctctggtaccagctaactcaaaaacggaggttaacaagccaagcctgactcctgaagaaatgaagattaaagcacaggagctaagggagcgtgctcgtaagaagaaagaggaagaagagagaagaatggaaagagaaagggagaaggaaagagtacgaatcggaaaagaacttcttgaagccaaaagaattgaggaacaaaatgaaaggaaacgcatgatagaattgcgaagacttgagaaagaggaggagaaaagagctagagaaaaaatccgccagaaattagaagaagataaggctgaaaggagaaggaaactaggattgccaccagaagacccagcagctgccaaaccaagtgcaccacctcctgttgaagagaagaaggatgatgatgccaaagtgaagagggcattccaaacactgcttacttacattggaaacgttgctaaaaatcctgacgaggagaaatttagaaagatcaggctgacgaatgcaacatttcaggagagggttggaaatctgcatgggggcatagagttcctggagctctgcggatttgagaaacttgaaggcgacgaattcttgtttttggcaagggaaaaagtcgacagtgctatcctgaacacagctggagccgagctgaattctgccatcaccaatcctttcttcggagtcctttgaatcgtaaaaggctacaatgtatactcaaaactctcgggttctcctttgcttgacatcaattgggcgccaactgttgatttccaagtctgtggtcagtctcagattccatgaattattatcagatcggattccgtacattgctgaggcaatctttgaagcaacttgctgcgcatatatgcttgggatctttccgatctcatcgcttcgctgaccttgatgcattttacaatgttctagcaccaaaaataagtgatgtactctgatgtatgcgttttacaacgacttcacttgttaatgacaactcgatcatctttaattatagattactcctacgaaacatatagcatctgatgaagaagaggaagttgcttgcatatcc

SEQ ID NO: 50312 - DNA, 1820 bp, Zea Mays
aagacatactaaacgttagtcgtagtcagataaccaaacaccccaaactgcctgttcaccattttcgccccaaatctgccgaggggattagccgatcgaagcgtcatcggcggctgcgacaatggcggggctgtcgctgcggtgcggcgactgcggcgcgcagctgcggagtgtggaggaggcgcaggcgcacgctgagtccaccaaccacgccaacttcgtcgagtccactgaggccgtcctcaaccttgtctgctccaactgcggcaagccatgccgctcccataccgaggtggacctgcacacgaagcgcacgggccatacggagttcgcggacaagaccgcggaggcggccaaacccatcgacctcgaggcgccgcttaagccggcctccgatgatgccacggacgtcgatgcgtcggcctcggcgactgaggagacacaagagacggttgtgccagaggtgaacaaggaggtgctcacggaccttgagggcatgggtttctcgacagcacgtgccactagggcgcttcacttctctggtaatagcaccattgaatgtgctattaactggctttctgagcaccaagaggacgcagatattgatgagatgcctctggtaccagctaactcaaaaacggaggttaacaagccaagcctgactcctgaagaaatgaagattaaagcacaggagctaagggagcgtgctcgtaagaagaaagaggaagaagagagaagaatggaaagagaaagggagaaggaaagagtacgaatcggaaaagaacttcttgaagccaaaagaattgaggaacaaaatgaaaggaaacgcatgatagaattgcgaagacttgagaaagaggaggagaaaagagctagagaaaaaatccgccagaaattagaagaagataaggctgaaaggagaaggaaactaggattgccaccagaagacccagcagctgccaaaccaagtgcaccacctcctgttgaagagaagaagagtgcattacctgtcaggccagccacaaaggcagagaggatgagggactgtctaagaaatctgaagcaacagaataaggttgaagtaatagattgcaccggcgagatgcaagctgtgtagttgtaggtcctttgtgcctttcggcaggatgatgatgccaaagtgaagagggcattccaaacactgcttacttacattggaaacgttgctaaaaatcctgacgaggagaaatttagaaagatcaggctgacgaatgcaacatttcaggagagggttggaaatctgcatgggggcatagagttcctggagctctgcggatttgagaaacttgaaggcgacgaattcttgtttttggcaagggaaaaagtcgacagtgctatcctgaacacagctggagccgagctgaattctgccatcaccaatcctttcttcggagtcctttgaatcgtaaaaggctacaatgtatactcaaaactctcgggttctcctttgcttgacatcaattgggcgccaactgttgatttccaagtctgtggtcagtctcagattccatgaattattatcagatcggattccgtacattgctgaggcaatctttgaagcaacttgctgcgcatatatgcttgggatctttccgatctcatcgcttcgctgaccttgatgcattttacaatgttctagcaccaaaaataagtgatgtactctgatgtatgcgttttacaacgacttcacttgttaatgacaactcgatcatctttaattatagattactcctacgaaacatatagcatctgatgaagaagaggaagttgcttgcatatcc

SEQ ID NO: 50313 - DNA, 1594 bp, Zea Mays
aagacatactaaacgttagtcgtagtcagataaccaaacaccccaaactgcctgttcaccattttcgccccaaatctgccgaggggattagccgatcgaagcgtcatcggcggctgcgacaatggcggggctgtcgctgcggtgcggcgactgcggcgcgcagctgcggagtgtggaggaggcgcaggcgcacgctgagtccaccaaccacgccaacttcgtcgagtccactgaggccgtcctcaaccttgtctgctccaactgcggcaagccatgccgctcccataccgaggtggacctgcacacgaagcgcacgggccatacggagttcgcggacaagaccgcggaggcggccaaacccatcgacctcgaggcgccgcttaagccggcctccgatgatgccacggacgtcgatgcgtcggcctcggcgactgaggagacacaagagacggttgtgccagaggtgaacaaggaggtgctcacggaccttgagggcatgggtttctcgacagcacgtgccactagggcgcttcacttctctgggagcgtgctcgtaagaagaaagaggaagaagagagaagaatggaaagagaaagggagaaggaaagagtacgaatcggaaaagaacttcttgaagccaaaagaattgaggaacaaaatgaaaggaaacgcatgatagaattgcgaagacttgagaaagaggaggagaaaagagctagagaaaaaatccgccagaaattagaagaagataaggctgaaaggagaaggaaactaggattgccaccagaagacccagcagctgccaaaccaagtgcaccacctcctgttgaagagaagaagagtgcattacctgtcaggccagccacaaaggcagagaggatgagggactgtctaagaaatctgaagcaacagaataaggatgatgatgccaaagtgaagagggcattccaaacactgcttacttacattggaaacgttgctaaaaatcctgacgaggagaaatttagaaagatcaggctgacgaatgcaacatttcaggagagggttggaaatctgcatgggggcatagagttcctggagctctgcggatttgagaaacttgaaggcgacgaattcttgtttttggcaagggaaaaagtcgacagtgctatcctgaacacagctggagccgagctgaattctgccatcaccaatcctttcttcggagtcctttgaatcgtaaaaggctacaatgtatactcaaaactctcgggttctcctttgcttgacatcaattgggcgccaactgttgatttccaagtctgtggtcagtctcagattccatgaattattatcagatcggattccgtacattgctgaggcaatctttgaagcaacttgctgcgcatatatgcttgggatctttccgatctcatcgcttcgctgaccttgatgcattttacaatgttctagcaccaaaaataagtgatgtactctgatgtatgcgttttacaacgacttcacttgttaatgacaactcgatcatctttaattatagattactcctacgaaacatatagcatctgatgaagaagaggaagttgcttgcatatcc

SEQ ID NO: 50314 - DNA, 1531 bp, Zea Mays
cttctctatcttcctctccctgattttcccgtcggattttggtgctttgtccctcgtagattcactccggaggtggacctgcacacgaagcgcacgggccatacggagttcgcggacaagaccgcggaggcggccaaacccatcgacctcgaggcgccgcttaagccggcctccgatgatgccacggacgtcgatgcgtcggcctcggcgactgaggagacacaagagacggttgtgccagaggtgaacaaggaggtgctcacggaccttgagggcatgggtttctcgacagcacgtgccactagggcgcttcacttctctggtaatagcaccattgaatgtgctattaactggctttctgagcaccaagaggacgcagatattgatgagatgcctctggtaccagctaactcaaaaacggaggttaacaagccaagcctgactcctgaagaaatgaagattaaagcacaggagctaagggagcgtgctcgtaagaagaaagaggaagaagagagaagaatggaaagagaaagggagaaggaaagagtacgaatcggaaaagaacttcttgaagccaaaagaattgaggaacaaaatgaaaggaaacgcatgatagaattgcgaagacttgagaaagaggaggagaaaagagctagagaaaaaatccgccagaaattagaagaagataaggctgaaaggagaaggaaactaggattgccaccagaagacccagcagctgccaaaccaagtgcaccacctcctgttgaagagaagaagagtgcattacctgtcaggccagccacaaaggcagagaggatgagggactgtctaagaaatctgaagcaacagaataaggatgatgatgccaaagtgaagagggcattccaaacactgcttacttacattggaaacgttgctaaaaatcctgacgaggagaaatttagaaagatcaggctgacgaatgcaacatttcaggagagggttggaaatctgcatgggggcatagagttcctggagctctgcggatttgagaaacttgaaggcgacgaattcttgtttttggcaagggaaaaagtcgacagtgctatcctgaacacagctggagccgagctgaattctgccatcaccaatcctttcttcggagtcctttgaatcgtaaaaggctacaatgtatactcaaaactctcgggttctcctttgcttgacatcaattgggcgccaactgttgatttccaagtctgtggtcagtctcagattccatgaattattatcagatcggattccgtacattgctgaggcaatctttgaagcaacttgctgcgcatatatgcttgggatctttccgatctcatcgcttcgctgaccttgatgcattttacaatgttctagcaccaaaaataagtgatgtactctgatgtatgcgttttacaacgacttcacttgttaatgacaactcgatcatctttaattatagattactcctacgaaacatatagcatctgatgaagaagaggaagttgcttgcatatcc

SEQ ID NO: 50315 - DNA, 1530 bp, Zea Mays
cttctctatcttcctctccctgattttcccgtcggattttggtgctttgtccctcgtagattcactccggaggtggacctgcacacgaagcgcacgggccatacggagttcgcggacaagaccgcggaggcggccaaacccatcgacctcgaggcgccgcttaagccggcctccgatgatgccacggacgtcgatgcgtcggcctcggcgactgaggagacacaagagacggttgtgccagaggtgaacaaggaggtgctcacggaccttgagggcatgggtttctcgacagcacgtgccactagggcgcttcacttctctggtaatagcaccattgaatgtgctattaactggctttctgagcaccaagaggacgcagatattgatgagatgcctctggtaccagctaactcaaaaacggaggttaacaagccaagcctgactcctgaagaaatgaagattaaagcacaggagctaagggagcgtgctcgtaagaagaaagaggaagaagagagaagaatggaaagagaaagggagaaggaaagagtacgaatcggaaaagaacttcttgaagccaaaagaattgaggaacaaaatgaaaggaaacgcatgatagaattgcgaagacttgagaaagaggaggagaaaagagctagagaaaaaatccgccagaaattagaagaagataaggctgaaaggagaaggaaactaggattgccaccagaagacccagcagctgccaaaccaagtgcaccacctcctgttgaagagaagaaggtgcattacctgtcaggccagccacaaaggcagagaggatgagggactgtctaagaaatctgaagcaacagaataaggatgatgatgccaaagtgaagagggcattccaaacactgcttacttacattggaaacgttgctaaaaatcctgacgaggagaaatttagaaagatcaggctgacgaatgcaacatttcaggagagggttggaaatctgcatgggggcatagagttcctggagctctgcggatttgagaaacttgaaggcgacgaattcttgtttttggcaagggaaaaagtcgacagtgctatcctgaacacagctggagccgagctgaattctgccatcaccaatcctttcttcggagtcctttgaatcgtaaaaggctacaatgtatactcaaaactctcgggttctcctttgcttgacatcaattgggcgccaactgttgatttccaagtctgtggtcagtctcagattccatgaattattatcagatcggattccgtacattgctgaggcaatctttgaagcaacttgctgcgcatatatgcttgggatctttccgatctcatcgcttcgctgaccttgatgcattttacaatgttctagcaccaaaaataagtgatgtactctgatgtatgcgttttacaacgacttcacttgttaatgacaactcgatcatctttaattatagattactcctacgaaacatatagcatctgatgaagaagaggaagttgcttgcatatcc

SEQ ID NO: 50316 - DNA, 1492 bp, Zea Mays
cggattttggtgctttgtccctcgtagattcactccggaggtggacctgcacacgaagcgcacgggccatacggagttcgcggacaagaccgcggaggcggccaaacccatcgacctcgaggcgccgcttaagccggcctccgatgatgccacggacgtcgatgcgtcggcctcggcgactgaggagacacaagagacggttgtgccagaggtgaacaaggaggtgctcacggaccttgagggcatgggtttctcgacagcacgtgccactagggcgcttcacttctctggtaatagcaccattgaatgtgctattaactggctttctgagcaccaagaggacgcagatattgatgagatgcctctgctaactcaaaaacggaggttaacaagccaagcctgactcctgaagaaatgaagattaaagcacaggagctaagggagcgtgctcgtaagaagaaagaggaagaagagagaagaatggaaagagaaagggagaaggaaagagtacgaatcggaaaagaacttcttgaagccaaaagaattgaggaacaaaatgaaaggaaacgcatgatagaattgcgaagacttgagaaagaggaggagaaaagagctagagaaaaaatccgccagaaattagaagaagataaggctgaaaggagaaggaaactaggattgccaccagaagacccagcagctgccaaaccaagtgcaccacctcctgttgaagagaagaagagtgcattacctgtcaggccagccacaaaggcagagaggatgagggactgtctaagaaatctgaagcaacagaataaggatgatgatgccaaagtgaagagggcattccaaacactgcttacttacattggaaacgttgctaaaaatcctgacgaggagaaatttagaaagatcaggctgacgaatgcaacatttcaggagagggttggaaatctgcatgggggcatagagttcctggagctctgcggatttgagaaacttgaaggcgacgaattcttgtttttggcaagggaaaaagtcgacagtgctatcctgaacacagctggagccgagctgaattctgccatcaccaatcctttcttcggagtcctttgaatcgtaaaaggctacaatgtatactcaaaactctcgggttctcctttgcttgacatcaattgggcgccaactgttgatttccaagtctgtggtcagtctcagattccatgaattattatcagatcggattccgtacattgctgaggcaatctttgaagcaacttgctgcgcatatatgcttgggatctttccgatctcatcgcttcgctgaccttgatgcattttacaatgttctagcaccaaaaataagtgatgtactctgatgtatgcgttttacaacgacttcacttgttaatgacaactcgatcatctttaattatagattactcctacgaaacatatagcatctgatgaagaagaggaagttgcttgcatatcc

SEQ ID NO: 50317 - DNA, 1156 bp, Zea Mays
ctcgtacaacctccatatcactaggtaccagctaactcaaaaacggaggttaacaagccaagcctgactcctgaagaaatgaagattaaagcacaggagctaagggagcgtgctcgtaagaagaaagaggaagaagagagaagaatggaaagagaaagggagaaggaaagagtacgaatcggaaaagaacttcttgaagccaaaagaattgaggaacaaaatgaaaggaaacgcatgatagaattgcgaagacttgagaaagaggaggagaaaagagctagagaaaaaatccgccagaaattagaagaagataaggctgaaaggagaaggaaactaggattgccaccagaagacccagcagctgccaaaccaagtgcaccacctcctgttgaagagaagaagagtgcattacctgtcaggccagccacaaaggcagagaggatgagggactgtctaagaaatctgaagcaacagaataaggatgatgatgccaaagtgaagagggcattccaaacactgcttacttacattggaaacgttgctaaaaatcctgacgaggagaaatttagaaagatcaggctgacgaatgcaacatttcaggagagggttggaaatctgcatgggggcatagagttcctggagctctgcggatttgagaaacttgaaggcgacgaattcttgtttttggcaagggaaaaagtcgacagtgctatcctgaacacagctggagccgagctgaattctgccatcaccaatcctttcttcggagtcctttgaatcgtaaaaggctacaatgtatactcaaaactctcgggttctcctttgcttgacatcaattgggcgccaactgttgatttccaagtctgtggtcagtctcagattccatgaattattatcagatcggattccgtacattgctgaggcaatctttgaagcaacttgctgcgcatatatgcttgggatctttccgatctcatcgcttcgctgaccttgatgcattttacaatgttctagcaccaaaaataagtgatgtactctgatgtatgcgttttacaacgacttcacttgttaatgacaactcgatcatctttaattatagattactcctacgaaacatatagcatctgatgaagaagaggaagttgcttgcatatcc

SEQ ID NO: 50318 - DNA, 1088 bp, Zea Mays
aagcctcaaaaatggcggcggcggacaccgagcgaagcgctgctttccactgtgttccgtactccgccgttgtcttgctccctctcctcctctcggctacttcgatctcccttccatctcctcgctctccaccgcatcgtcgatcctcgccttcgccacatgcttcccgaacgcgcttgactctgtcggctcctgcgattgggaccctttcatctccgtcctcgaggccttcgcctcctgggacgccgctgggctgggcctgagctaccgacaccaggcagcggaaccaacaccacgaaggaccatgcagcgacatccgtcaccggcgtttctgcttagcgacaggctgtgaggtgggaggacatggcgatgcacaacacccgtcggtcgaccagcgcactgccatggatcggcaacggtggtgcgattcggataatgatatggaagtttctcaccagtatgtttctagggggatgcataccaaaagtagcagtggcaatagcctgcagagttcattccataagccatctaaagcaaatcaagccgttgtgggatcatccgcatctggagcaagccggatgccgtcgatgacacacacattgcattttacttaactgcaatctatttgtgctccccagacactcatgcattgctgcgagctacaaattctgttgaaaacaggtatgctttctcaaatatatacaatgtagtattattctttacatattataactttttccgaaattcttcaacaaactacacatcaccattttttgtaaatgtatcccttaactacattatcaaagtgacttttctgcctacatacttactacccatgttgcaaataaagcacaaatttgatctactccttactttttgttgccatgatccctcactatttgcaatcattggaagatcattgtcgttggctgcaacttctgttgaaaatggttatgctttctccagtgaacacaacctagtgttattctttagaaattgtaccttttcccgaaattcttcaacaaactacaacatcaccatttttagtaaatgtatcccttaactacatgaatgaaaggaacttttct

SEQ ID NO: 50319 - DNA, 4544 bp, Zea Mays
aagcctcaaaaatggcggcggcggacaccgagcgaagcgctgctttccactgtgttccgtactccgccgttgtcttgctccctctcctcctctcggctacttcgatctcccttccatctcctcgctctccaccgcatcgtcgatcctcgccttcgccacatgcttcccgaacgcgcttgactctgtcggctcctgcgattgggaccctttcatctccgtcctcgaggccttcgcctcctgggacgccgctgggctgggcctgagctaccgacaccaggcagcggaaccaacaccacgaaggaccatgcagcgacatccgtcaccggcgtttctgcttagcgacaggctgtgaggtgggaggacatggcgatgcacaacacccgtcggtcgaccagcgcactgccatggatcggcaacggtggtgcgattcggataatgatatggaagtttctcaccagtatgtttctagggggatgcataccaaaagtagcagtggcaatagcctgcagagttcattccataagccatctaaagcaaatcaagccgttgtgggatcatccgcatctggagcaagccggatgccgtcgatgacacacacattgcattttacttaactgcaatctatttgtgctccccagacactcatggtaataacttagtcgataaagaacatatttaatgtacttccatttcttgctataattagagaaggaatactgaaaatggtcctatggtttagcaccaagtagggtcatttttagataacaaaccaaattaaagatagaatgtattgatttatgatgttacatcaatgttttcgagcagattttatttaaaaggaatttacaccgctttaacttcaaaagacatatctcacttaattgtgttgatggaatgatagaccaatatgtgcccctttgatgccatgtgcatatatttagacaagtgtctgcaatagttgactctaaattaatctgaagcgtgcacacatgtggcttgtgcaaagcatgtggcttcccagtggaccctttaaagaagagagagtaactacgtaacttacaatagaatgctcatttagataagccaaattgatcctgacaaattctcctttttttgccatattcctgccacacacccagaaactgaggattgtgattgatctagattggaacattagaggtctttgcattcaagagcccaatagcttcagtttaatcatcattcattccaggcaaggatgctgctggccaccagttgtcatcttttttgatgcttcagatgtactctggtattttagaagtggcacactcagtagtcagtattgttttagtcatttgtttattggcatgccacactcctatctataatggttggcatgcgtgtgtggattggtatagccatcggtgacagaaacaggcacttctacaaactctaatatttttgcttttctttttgggaaaataattgccgcgagtctgaatgagtacattgcaggttgttagggctcataaagatttgccaaatccaaaaaccggtaggctaattttagtcacaattagtttgccaagtttggacgacgaacttacagccagtagcttgagctcagcaattttgtcccaatagtatatgggctgattagaaaacagcttatgcatgtacacacacattgcaatttacttaactctaatccatttgtgctcccaaacactcatggtaataagggacgcaggcagcctagcagcatcagagtggatagatggttgcgcactgatcatgcgatgtgtattcctgcgacctttgaacaacatgttcttactgtaaggtgcagtagaagtgattattattcacaaattacagtagatgtcacatgaactcatctgattgccagcctaaattcctggttgcgctcgaaacatatctaactatatttattttccaaacacactgttagcttccctttgatcataccttttctcaatctaaagaacacatatttgatttactccttacttttttgggcatgatcctttactatttgcaatcattggaaaagcattgctgcgagctacaaattctgttgaaaacaggtccgtaagaatcttacgtatccaccaattaccaatccagagaggatgatattgatgaataaatcacgaagtttgcaatagtgcctaatgagaaaggggtccaacagatacaattgaatcaccacccaaaggattacattctcaagcataatctcacaatctcttatacatttacacatgtaccctcttttttgtgcctttgtgcctaattttttaaaagatacggtttcattttccagttcaattgaactgaattaacaagattcttctttctcatgtgtccacatgttgcagagcattctatgttatatttaagatcatctttagtttaatgccatgcaattttattctcaacattgatacattcttcagacatttcaccacattacacacctctacaaacatttctatctttctgaaacaacattgaccctctttttttgtagttacattttttagagatatagttccatgttcctgttcaattgaactgggttcatgcagctatgggcataatttagttcaatgcagtaattaaatatgtgaaaaattaagcagtaagctattattattgttttcatatagctacatggcctctacatactttctgagaacgtgttccgataacaattatgaacatcattttatagcttttaatcattttctttttccccagcacattactaaagaactctatactgaaactactttaactgcatactaaaattgtttacctatagtttccgtcaaagttgtggataccacaacctggaagagttggtggtagatttttcatcaagtatgaaatgtctgtgatgctgagctgggtgcttggtggcaacaggtgcataccaaaactattaattactagcatgtgttcctgtttcaagcacatatgcaatagtaataggtttccattagtttaaatgtccatgcaaaaaagtaaacaccacctagactttattcttagtcttccattatcacatccgtactcatcatgcacatgaaactttccattttgtatagctcaaaaggtagaaggaagacctttaagttgcccactttctgacaaggtatgttatcatagtaactgtgaaattgatataggaccaatatttgatatttgctggcatctagcatcactctaaaggcacatgacgagatttatcgatgatgagtcgttggaagaagcaataagtggatagtacattctttgtttcttatttatgtataaattaagatcacataaacggatttaacaccgcgcgcagggcgtgcggcaatacactagtattttaaatgtttggaagggtccttggctatctagggatttctcaggatatatttggcagcaaagaaaaaaaactcgacctgcgaaaagtaagacagcccccgagcattatattaagaagaagaccttctcacacatgtcgagaaaaccactgaacccctgcctcacccatacacagcggcatcgaaagcccatgtgacaacgaccatgactggggctgagctttagacctgtgctttgacatgggacagacgaggggattttttaaccacagcctgaaattcgctcccacggagagtcgaacccaggacctgaggagtgctactcagaccacctaaccaactcagctagaggccctttcgcagcaaagaaaataaagaggattagagggctaaaattgacttactatttaattttaaataaaaacaattttagtctctccaatttcattgaatcatcttactcacaaacaagctctcaatgggtccaatcccaccatgaggtaccagctcggttgcacatgtatttgagctcatagatcctatctctggaggctgggattatgaactggtggaagagattttttttatcaaatcgtaagtcgattcttgccttaccggtgagagaagggagacgtgagcaagacatataatcatggtttttatttcttttcctttttcgatagagatatattgtctgcatctaccgtgtaactgtcgacataaaaagagagcaaatccaccacgcaagacataaagtattatcctatactgaaagcccggacatgcatatgttatcttgtgtattataatctaatgaacaaacattggtgatttttttgtctttaaaactctactggtatagtacccgtacgttgacgacacataaatatttgataaaatattagccaagcaatatatattttatcatcgaccttaatatctcacaaactatttaccaataaccaatataaaaataaacttggaatccagatcgccttataaaactaaactatgaatccgaatcgcctcctctcctatctctcggctgttcaaccatgcatcgccagcgacgacgccttctcctcccctcggttgttcttgccccaccgtttgaagaggcccagggcgatggagatttgcggcagcggttcgaagcgcttgtcg

SEQ ID NO: 50320 - DNA, 4425 bp, Zea Mays
tggcagtgccgactgccgaggaatagatggagtcacacaaatggcactgacacacacttgacctcccggtgacgcagcgccgaccgcgcacacactccccagactccgcagggacccaacgcagcggtcaaacaaaggcagcggcagccggccggcagcggcaacggcgtaactcccaagtcacctccgcctcgggctccaaaaatccccacccgacctcgagactgagcggaccgacggtgatgtcgtcgtcggtgcccccgccaccgccccagcaggagctggagtcgccctccgccggcggcgacaaggtcctggccgcagcgcagcacatcgtcaagtccctcgccacctccaagaacgccgctgacgacatgatccgcatactctccggcttcgacaaccgcctctcctccatcaccaacgaccacctcttcccctcccccgaccttaccgccgcctccgcctccgagatctccgccgccgccgcctccttcgacgccgccgaccagctcatccagctctgggacgccaccccggacgcgctcgtcttcgaggcccccgaggacgacatcgcgcagtacctcgcggccgtggacgtcgccatcgaccacctcgcgcgcggcggccccggcggcgcgcgggccggcgtcgccgtccagctcgccatggtgcgcctcgaggaggagctgcgccacctcatggtccgccacgccgtccccatcgaccccacgggcctcttcttctcgctccgccgcctctcgctcgagtccatggacgacctcgacgcctgccccgacttcgacgccgccacgccgcacagcctcgacgccacccccgccggcccggagaccgcgcgcggcgcctccctcggatctaacccctttgaggaccaggtgttcgatcccgtgcgccccgaggccgtcgaagacctgcgcgccatcgcccaccggatggcgcgcgcgggatacgcccgcgagctcgccgacgcctactgtggcatccgccgcgacctgctcgacgagtacctctccgtgcttggcgtcgagcgcctcagcatcgacgatgtgcaacgcatcgagtggaagctgctcaacgacaagatgaagaagtgggtgcacggggtcaagacggtcgtgcgcgtgctgctggctggtgagcgtcgcctctgtgaccaggtgctcgatgcgtctgatgaacttatggatgcgtgcttccttgagtccaccaaaggatgcattatgcagattcttagctttgggggtgccgtggcggtgtgcccccgctcgccagagaaggtccctcggatccttgacatgtatgaggcacttgcagaggtgatccctgaaatgaaggacttgtgcataggaagttctggggatggcgtgatcagtgacgtgcaagccattcttgataggcttggggatgccgtgaggggtaacctgtttgagtttgggaagatgttacagcaggagacctcaaggagggcgatggcagctggagagatccacccaatgacacgctatgtcatgaactatttgaggttgctggttgtttacagtgagacacttgatgcactcttggccgatgacagcagtgatcatgatactttcagaagttctgatgatcaggatcaggaacacttggagagaatgaccccttttggaaggcgtcttctgaagctgatatcttacctggaggccaatttggaggaaaaatctaagctctatgacgatgctgccctggagtgcatatttgccatgaacaatttgctctatattgttcagaaggtaaaggattcagagctggggaaggttttgggtgatcactggataaagaggcggagtggcaagattcgacagtattcaaagagctacctaagggtttcgtggacgaagcctttgtcttatttcaaggaagatggacatggcagtgggagtgggagtggcagtggcagtggcagcggcagtgggcattcaagttcgaggatgtccatcaaggaaaggttcaaaaacttcaacatggcctttgaggaaatttacaggaaccagacactctggaaagttccagatcctcagctccgggaagaactgaagatatcaatatctgaaaacgtgattccagcttatcgtgcttttctgggcagatatggcaatcaagtggacgggggaagaaatccaggaaagtatataaagtacacaccggaagatttggagagccagctatccgatttatttgagggatcaccagtgtctgccaatcactctaggagaagagcatagttcgtggttggccggatccatgttgcagccaggaccgcatgctgagtgagtccgccgctgggcggtgggctggccaggggagtctccaccgccgccaggatccgcaagcgccgcgccgcgccgtggccgccgtcggaggaggtgggcgaagcggagcgcgcgcctgatcggccggagggtcggcgtcgaatcgcgtcgccgtgatcgagcagcaggaggatgacgtgggagccgtcctggaataaccggcgccaccaccgccacgccgacttcgacgccgacgtcgacgcgcggtccgcggcgtcggccaggaatctcgccagcgccttcgaggaggacctggaggaggaaggggacgttgggtgggacgcggccgccaagcgccggagctgctcggatcaccggtgcagcgcgtcggtcgagttgtccaagctgtcgaggagaaagaccagggctttcaaggacggtgatgggggcaggagctggcacaacggccgtgcgcatggccactgcttctcagatgcgagtgcgatcaccagtggcggtggtggctctgtgggtggtcgcactccagcacgccagggtgacaacagaacggagcagatgcaggagctgtacaacagcctgaccgcttccaacgagctggtcagggtcctggccaacgtcctgggccccgcgggcgcgctcaacccgacggcggcgtccgtgctcgcggcgctgcgctccgagctggacgccgcgcgccagctcgtgaagcagcagcgcaggcgcggcgtggacggcgaggagcgcctgctgcggaggcagctcgcggaggaggtgcgcgcgtggaagtgcaggcacagggagaaggcggcggcggccgcgcgcctcgtcgcctcggagctcgacggcgagcggcgggcgcggaggcgggcggagagggtggggacgaagctggcggaggcgctggcgggcgcggaggcgtcgctgcgggcggccacgcgggagcttgggctggagcgggcggcgagggcgcgcctggagaaggtgtgcgacgagctcgcctccagagacgttggcggcggcacggaggcggaggcggaggacgacgacggcctcaggcgggaggccgccgccaccgcgctggaggagttggaacgggagagggagatgctgcaggtcgccgacgagctgcgcgaggagcgggtccggatgaagctggcggaggcgaggctacacttcgaggagaagaacgccgccgtcgaccgcctgcgccaggagctcgaggccttcttgggcaacgaacgtcgagaacaaacgcctgcccaccatgaaatggccaaggaggaggaggaggaggatcaccagctgcagatcgtccttgcctccgaattcggtgtccacggcatcgatcctctggtcacagagaagagcggacaggaagaaaatgccgaagctggtgacgacgacgacgactcggaaggcagcgacatcgagctgaacatggacggcaacagctggagctacaccaccacctccaggtccagggacacgacggccaagaacgcaacgtcggcgcacggctcactttcggacagagcaacggaatgtggcgccgacgccggcgccttcgatcgtagatctgaagcgacgagagatgcgccggagcaggactgggcggctgacggatgcagcgacggcgggaccaccggcagggacgaggacgaggacgccgagaggtacgaggcgatcaagaacctcagggagcagatgctgaccggccacgccttcctcttcctgtccaagggcgaggcagacgatgacagcgatcggcgtcgccgtggtttcgcttctcattttgaagaagatggggacctctggtgagccaaattgcttggtgttcaaccgttgacagtaaaagcaccaatcctttgttcgaaatttgtgcatagttttggttttggtgctccatttgcacagcacagttatagagttctttatctctgggatttggattcatactcagttttggtgttttggcactggcattttgcgtttgatgtcacaataaaaaaaattaccaatgcattatttctgtatacagaactataaacttacaattgtaaagttacacgcttattgtaaacttcattgtatctat

SEQ ID NO: 50321 - DNA, 3892 bp, Zea Mays
tggcagtgccgactgccgaggaatagatggagtcacacaaatggcactgacacacacttgacctcccggtgacgcagcgccgaccgcgcacacactccccagactccgcagggacccaacgcagcggtcaaacaaaggcagcggcagccggccggcagcggcaacggcgtaactcccaagtcacctccgcctcgggctccaaaaatccccacccgacctcgagactgagcggaccgacggtgatgtcgtcgtcggtgcccccgccaccgccccagcaggagctggagtcgccctccgccggcggcgacaaggtcctggccgcagcgcagcacatcgtcaagtccctcgccacctccaagaacgccgctgacgacatgatccgcatactctccggcttcgacaaccgcctctcctccatcaccaacgaccacctcttcccctcccccgaccttaccgccgcctccgcctccgagatctccgccgccgccgcctccttcgacgccgccgaccagctcatccagctctgggacgccaccccggacgcgctcgtcttcgaggcccccgaggacgacatcgcgcagtacctcgcggccgtggacgtcgccatcgaccacctcgcgcgcggcggccccggcggcgcgcgggccggcgtcgccgtccagctcgccatggtgcgcctcgaggaggagctgcgccacctcatggtccgccacgccgtccccatcgaccccacgggcctcttcttctcgctccgccgcctctcgctcgagtccatggacgacctcgacgcctgccccgacttcgacgccgccacgccgcacagcctcgacgccacccccgccggcccggagaccgcgcgcggcgcctccctcggatctaacccctttgaggaccaggtgttcgatcccgtgcgccccgaggccgtcgaagacctgcgcgccatcgcccaccggatggcgcgcgcgggatacgcccgcgagctcgccgacgcctactgtggcatccgccgcgacctgctcgacgagtacctctccgtgcttggcgtcgagcgcctcagcatcgacgatgtgcaacgcatcgagtggaagctgctcaacgacaagatgaagaagtgggtgcacggggtcaagacggtcgtgcgcgtgctgctggctggtgagcgtcgcctctgtgaccaggtgctcgatgcgtctgatgaacttatggatgcgtgcttccttgagtccaccaaaggatgcattatgcagattcttagctttgggggtgccgtggcggtgtgcccccgctcgccagagaaggtccctcggatccttgacatgtatgaggcacttgcagaggtgatccctgaaatgaaggacttgtgcataggaagttctggggatggcgtgatcagtgacgtgcaagccattcttgataggcttggggatgccgtgaggggtaacctgtttgagtttgggaagatgttacagcaggagacctcaaggagggcgatggcagctggagagatccacccaatgacacgctatgtcatgaactatttgaggttgctggttgtttacagtgagacacttgatgcactcttggccgatgacagcagtgatcatgatactttcagaagttctgatgatcaggatcaggaacacttggagagaatgaccccttttggaaggcgtcttctgaagctgatatcttacctggaggccaatttggaggaaaaatctaagctctatgacgatgctgccctggagtgcatatttgccatgaacaatttgctctatattgttcagaaggtaaaggattcagagctggggaaggttttgggtgatcactggataaagaggcggagtggcaagattcgacagtattcaaagagctacctaagggtttcgtggacgaagcctttgtcttatttcaaggaagatggacatggcagtgggagtgggagtggcagtggcagtggcagcggcagtgggcattcaagttcgaggatgtccatcaaggaaaggttcaaaaacttcaacatggcctttgaggaaatttacaggaaccagacactctggaaagttccagatcctcagctccgggaagaactgaagatatcaatatctgaaaacgtgattccagcttatcgtgcttttctgggcagatatggcaatcaagtggacgggggaagaaatccaggaaagtatataaagtacacaccggaagatttggagagccagctatccgatttatttgagggatcaccagtgtctgccaatcactctaggagaagagcatagttcgtggttggccggatccatgttgcagggtcgcactccagcacgccagggtgacaacagaacggagcagatgcaggagctgtacaacagcctgaccgcttccaacgagctggtcagggtcctggccaacgtcctgggccccgcgggcgcgctcaacccgacggcggcgtccgtgctcgcggcgctgcgctccgagctggacgccgcgcgccagctcgtgaagcagcagcgcaggcgcggcgtggacggcgaggagcgcctgctgcggaggcagctcgcggaggaggtgcgcgcgtggaagtgcaggcacagggagaaggcggcggcggccgcgcgcctcgtcgcctcggagctcgacggcgagcggcgggcgcggaggcgggcggagagggtggggacgaagctggcggaggcgctggcgggcgcggaggcgtcgctgcgggcggccacgcgggagcttgggctggagcgggcggcgagggcgcgcctggagaaggtgtgcgacgagctcgcctccagagacgttggcggcggcacggaggcggaggcggaggacgacgacggcctcaggcgggaggccgccgccaccgcgctggaggagttggaacgggagagggagatgctgcaggtcgccgacgagctgcgcgaggagcgggtccggatgaagctggcggaggcgaggctacacttcgaggagaagaacgccgccgtcgaccgcctgcgccaggagctcgaggccttcttgggcaacgaacgtcgagaacaaacgcctgcccaccatgaaatggccaaggaggaggaggaggaggatcaccagctgcagatcgtccttgcctccgaattcggtgtccacggcatcgatcctctggtcacagagaagagcggacaggaagaaaatgccgaagctggtgacgacgacgacgactcggaaggcagcgacatcgagctgaacatggacggcaacagctggagctacaccaccacctccaggtccagggacacgacggccaagaacgcaacgtcggcgcacggctcactttcggacagagcaacggaatgtggcgccgacgccggcgccttcgatcgtagatctgaagcgacgagagatgcgccggagcaggactgggcggctgacggatgcagcgacggcgggaccaccggcagggacgaggacgaggacgccgagaggtacgaggcgatcaagaacctcagggagcagatgctgaccggccacgccttcctcttcctgtccaagggcgaggcagacgatgacagcgatcggcgtcgccgtggtttcgcttctcattttgaagaagatggggacctctggtgagccaaattgcttggtgttcaaccgttgacagtaaaagcaccaatcctttgttcgaaatttgtgcatagttttggttttggtgctccatttgcacagcacagttatagagttctttatctctgggatttggattcatactcagttttggtgttttggcactggcattttgcgtttgatgtcacaataaaaaaaattaccaatgcattatttctgtatacagaactataaacttacaattgtaaagttacacgcttattgtaaacttcattgtatctat

SEQ ID NO: 50322 - DNA, 5089 bp, Zea Mays
tacaaaaactgatgccgaatagcaggggggaaaatggacagaaagccagccggtaaaaatagcttcaggcaacaggagaagcagaaaaaaaatgagaggttggactggaatgacctggtcctggctgggccttttgtccttcattcacattcccaaactgctccatcactttataccgccgtctcatctcgtgctcgtggtgtccgtgttcctcctcttggcggggccggccagaaaagcttgctggacggttggctccggaaaccggatgcgtctcaggtcaggcgcctgatttttacttgggttcccatggttcgtttccacagcgcaaaccacctcccagcttttagtcagtatagtctgctggagcccatggaggtgcagctggcgacggagcaaccgggggacccgttcctgccgctgcggtgggagagcacgggcgaccagtggtggtacgccacgcccatcgactgggcggcggccaacggccactacgacctcgtccgggagctcctgcgcctggaccccaacctcctcgtcaagctcacctcgctccgccgcatccgccgcctcgagtccgtctgggacgacgacgcgcgcctcgacgccgccgccaggaaccgcgccgccgtcgcccgccgcctgctgctcgactgcgagcccgataacgacaagcagcccccatcccgcggaggcggaggcgacgccgccaaccgcctcctccgcgccggctacggcggatggctcctctacacggcggccgcggccggggacgagaggttcgcgcgggagctgctcgcggcgcagccgctgctcgtcttcggcgagggggagtacggcgtcaccgacatcctgtacgccggcgcgaggagcggacgccccgaggtgttccgcctcctgttcgacgcggtgctgtccgcggcgccggcgtgcccggtcgggggtgacgacggcgagtttaggcgcgagatgatgaaccgcgccgtgcacgccgcggcgaggggaggcagccttgccgtgctcagggacctcctgcgcggctgctccgacgccgcggcatacagggacgcgcagggatcaacgatcttgcacgccgcggctgcaaagggccaagttgaggtatgtcttgcagtttttttccttgtcagctttattctttcaagatggatggacgtcgtcatccgcagcaccatgcaatgtatgtcccgtctgtttaacattttcagtgcttgatttgaaattatccgtacggtttgatctatatagactagtaattctgtacaaacatatgttgcctttcacttgcttctacttgcaatatgactgaacattttagccaggttgtcagcttgttagaaaagttctattttgcatagtttaattgagtgaacaaaacatgttgagcattaaagttgattcaagccaatactgcttctctgatctataatctaagaattgttcatccctgttttgtttgactttattcccactttggcccttagagttgattcggtgcacatgcttgcttgccattgccaggttgttagttgatcatgcgaatatggattaaacttgtggaatgactcgattaatctaatggttgtacctgttgttgttggcattcacatattatcttttaacaccggattggagcttcataaaatgttgtctgccatcaaaatttcacagcaaaagggtacttaaggtttgcttggtagcacgtgaattaaattgatgcctttggcgatggaaatttccattgacatccctagtcattagtacatttatgttgctgtcatggaaccatttgtagtttgttatgttcactgattgaaggatgatcattcgagatggctctttattatgattagaagggttaaaagtattttccttcattctgtatttctgttgctccaaagttagaccttgggatgggtcctgtgctcaattttctatgtacacacagtttacaaagtactactaaactaaatttatgaacaaaaaaaatactgtacgctgcaggttgtgaaggatctgattgcatctttcgatatagcgaactgtgtagatgaccaagggaacacggcgctgcatatagcagccttccgaggccatgtccaagtggtcgaggctctcatcaccgcatctccgtctcttatatcagcaacaaacgaagccggcgacacgttccttcacatggcactgactggcttcgggactcccgagttccaaaggcttgatcgccagacggagctcattaggcaattagcgagtggagcaatcgtggatatcagcagcagcactattatcaacgcgcagaatgacgacgggaagacagctcttcacttggccgtggtttgcaacctgcattcggacgtcgttaagctcctgatgagcgtgccttgtattgacctcaacatctgcgacaaggacggcatgactcctctggatctactcaggaagcagccacggacgacggcgtcagagatactgatcaaacaactgatcctggccggtgggttcacaagctcaagggaccacgagactaggtcggctatcgcttctcagctgaagatgcactccattgtaggaagcccggggacatcgttcaagataccagacggcgagatcttctttctccacgctgctggagtcgacgtgtcgggcggcatcggcgaaggaggagcagcagtaccgttttcctccgttattgctagggctgacgtcctgcatggacccaaactgaagaggctcaactctttccaagacgcggcgaagcatatcaaggtcctattcagatggcctcgccgcggatggaacaagtcaggcagcggcggccgaaagggtctggacgacgacgatgcctcgtctgtggactctgccaagacctggagccacgaggagaccccgacaccgctgaggcagaggtattccaggatcggctcgctgttcaacaagcggacctacgcagcaggcagggcttcacctagcgaagcagtgaagaagggtggagtggtacagccagctggttctactctactttcgacatctctgtcgtcgtcgtcggcgtccttggttgacagtcatggctagagcttcatggaatatgaactatgagaaggttcttgttgacatcttgcacgagcacaatcatgtgaagtaccggggccagaatggttgggcaccagaaggttggcgttctatgacacaaatgttcaatgagaagtgcccgttggctaagtttacaaaggcacagatccaggaaaaagaaaaggaacttaaggcaaactataaggtgctgaaggaagcccgcaagcaaagtggtgttggatggaatgaggccatgggtatgatcattgctgaaccaccaatatgggcaaatataattgttagtaatccaaaggtcaagaaatttcagtcaaggccattccctttgtataatcagttgtcagcactctatgatggcagttgtgccaccggtgatctcaattttacatcaactcagcaacatacatcatcccgacaacaattacatattcaagctgaagttgaagctgaagctatgagctctttcaggattgatgatgacctcggggttaaccctgatttgaaccaaatctcttcaaatttgcatgggttgggatcttcaagtacccgtgttgagattggtggacatgaccgcaccccggcatcttcagaacagcgagcggagagtcatggaaggaagcgtaagcaaagtcagattgctggggttcttgaggaatatttggattacaaaaggcaacataatgataagttgcttgatgtggtaaatcagattgatcaacaagctgagggatgtaacaagaaggaagaatattgtattggaaagtgtgttcgtgtgttagagtcgatggaagatataactgaagaggagatggcagcggcaatgggtgtgtttaagtgcgaggagaacagagaaatatttctgaacagccagaggccacgtgtccgattgttgtggcttagaaacgagatccacaagcaggtagttatataaagcactcaatttctacaattttttttgcttcatggtcacatttactaatttctgcaatattttcagatgtccaccaatctcaatattttcagatgtccaccaagcctttagtttcctgggaggcaatggatggagctctgcgacaataaatacaagatgttcaaaagaacgttattgttgtgttaacattttgggcataccaagtacttttttttgttatgagtctgtcaaacatatgttaaatttgtcactaatttcttatgagctatttctgtggtcaaagaaagttgtttatttaagtggcatgaatcaaaaaatcttaggagacttctgtttgattttgtttatttttaaaagaaagttgcttcagcgtacaaattttgaggggcatattgttgtttttgcgtacaaatttctgtttgattttgttgatttttattttttctattttacttgtgatttgatgatgatcacacttctagcagctgccgatgtgtggctccagagggcagcagggcagctgacccatggggcaccaaaggatgtcagggcagcgcagccccgctgggcaatgcccacccagggaattcgtatgacaggaatttgccccctccggtgctagctcccctgtgttttattggccccggtcaccaaaggatgtcttaggtgccgtggaagcccctgaacctgaactgtccgtcggcgtcgaggcggccccgcgcgtcggacatccactcgctcctgaggtcgatgagcctctggccggcgtcgttgacggtgccgtcggcgttgacgagcgcggcgtcctgcctccacatgtggccctgcatgaacccccagagcacgacgccctgcaccgccgggtgcgcgaacgcctcgcgcaggaccacctcgaggtcgtcggcgcggagcgcgtcgtcgggctcgcagacgtcgacctccgtgaaccagacgggcaggccggtggcggcgtagaccgtgtcgagcgcgtcgcagatgacctcgccgacggggtgggtgacgtggccctgcatcccgacgccgccgacc

SEQ ID NO: 50323 - DNA, 2794 bp, Zea Mays
atggacagaaagccagccggtaaaaatagcttcaggcaacaggagaagcagaaaaaaaatgagaggttggactggaatgacctggtcctggctgggccttttgtccttcattcacattcccaaactgctccatcactttataccgccgtctcatctcgtgctcgtggtgtccgtgttcctcctcttggcggggccggccagaaaagcttgctggacggttggctccggaaaccggatgcgtctcaggtcaggcgcctgatttttacttgggttcccatggttcgtttccacagcgcaaaccacctcccagcttttagtcagtatagtctgctggagcccatggaggtgcagctggcgacggagcaaccgggggacccgttcctgccgctgcggtgggagagcacgggcgaccagtggtggtacgccacgcccatcgactgggcggcggccaacggccactacgacctcgtccgggagctcctgcgcctggaccccaacctcctcgtcaagctcacctcgctccgccgcatccgccgcctcgagtccgtctgggacgacgacgcgcgcctcgacgccgccgccaggaaccgcgccgccgtcgcccgccgcctgctgctcgactgcgagcccgataacgacaagcagcccccatcccgcggaggcggaggcgacgccgccaaccgcctcctccgcgccggctacggcggatggctcctctacacggcggccgcggccggggacgagaggttcgcgcgggagctgctcgcggcgcagccgctgctcgtcttcggcgagggggagtacggcgtcaccgacatcctgtacgccggcgcgaggagcggacgccccgaggtgttccgcctcctgttcgacgcggtgctgtccgcggcgccggcgtgcccggtcgggggtgacgacggcgagtttaggcgcgagatgatgaaccgcgccgtgcacgccgcggcgaggggaggcagccttgccgtgctcagggacctcctgcgcggctgctccgacgccgcggcatacagggacgcgcagggatcaacgatcttgcacgccgcggctgcaaagggccaagttgagatgaccaagggaacacggcgctgcatatagcagccttccgaggccatgtccaagtggtcgaggctctcatcaccgcatctccgtctcttatatcagcaacaaacgaagccggcgacacgttccttcacatggcactgactggcttcgggactcccgagttccaaaggcttgatcgccagacggagctcattaggcaattagcgagtggagcaatcgtggatatcagcagcagcactattatcaacgcgcagaatgacgacgggaagacagctcttcacttggccgtggtttgcaacctgcattcggacgtcgttaagctcctgatgagcgtgccttgtattgacctcaacatctgcgacaaggacggcatgactcctctggatctactcaggaagcagccacggacgacggcgtcagagatactgatcaaacaactgatcctggccggtgggttcacaagctcaagggaccacgagactaggtcggctatcgcttctcagctgaagatgcactccattgtaggaagcccggggacatcgttcaagataccagacggcgagatcttctttctccacgctgctggagtcgacgtgtcgggcggcatcggcgaaggaggagcagcagtaccgttttcctccgttattgctagggctgacgtcctgcatggacccaaactgaagaggctcaactctttccaagacgcggcgaagcatatcaaggtcctattcagatggcctcgccgcggatggaacaagtcaggcagcggcggccgaaagggtctggacgacgacgatgcctcgtctgtggactctgccaagacctggagccacgaggagaccccgacaccgctgaggcagaggtattccaggatcggctcgctgttcaacaagcggacctacgcagcaggcagggcttcacctagcgaagcagtgaagaagggtggagtggtacagccagctggttctactctactttcgacatctctgtcgtcgtcgtcggcgtccttggttgacaggttcgaatctgttcatcaggacaacgatcagtctccttatgtcagtaggttgatcaggcacacacctaagaaatctggatctctcaacagtagacttatgaaccagtccttgcgcctcagggcctaagataggcagcaacatcgacaaggcttcttgcttccctcactagctagctggttacattttacagcttcactggtagcagacacagataattctaaatatctagccgccctgccacagcagcaggtttgtatctctgtggttgccggagagtgggtttgagcttacttagggcttgttcggttagctctcaatccatgtggattgagcgggattggatgggtttgaatcccaaacagctcaaacttcttcacaattttttccaatcccatccaattcatgtgtattgagaataaccaaacaagcccttagtgtttgtgttatctcaaaatgcgagtaatgcgatcttgcaatgcgatcttgggatattcatgtacatgatatctcaaaatgctagcaatgcgatcttgcaaaaagaatttcagcatagcggggaaaccatacatagaaagataagcgagttctttggtataatccctactctaactcaaagatttgtgaagctcccaagtgtaaaccatccacatgtgaagattacatccaatcctcggttttggccttactttcag

SEQ ID NO: 50324 - DNA, 4426 bp, Zea Mays
atggacagaaagccagccggtaaaaatagcttcaggcaacaggagaagcagaaaaaaaatgagaggttggactggaatgacctggtcctggctgggccttttgtccttcattcacattcccaaactgctccatcactttataccgccgtctcatctcgtgctcgtggtgtccgtgttcctcctcttggcggggccggccagaaaagcttgctggacggttggctccggaaaccggatgcgtctcaggtcaggcgcctgatttttacttgggttcccatggttcgtttccacagcgcaaaccacctcccagcttttagtcagtatagtctgctggagcccatggaggtgcagctggcgacggagcaaccgggggacccgttcctgccgctgcggtgggagagcacgggcgaccagtggtggtacgccacgcccatcgactgggcggcggccaacggccactacgacctcgtccgggagctcctgcgcctggaccccaacctcctcgtcaagctcacctcgctccgccgcatccgccgcctcgagtccgtctgggacgacgacgcgcgcctcgacgccgccgccaggaaccgcgccgccgtcgcccgccgcctgctgctcgactgcgagcccgataacgacaagcagcccccatcccgcggaggcggaggcgacgccgccaaccgcctcctccgcgccggctacggcggatggctcctctacacggcggccgcggccggggacgagaggttcgcgcgggagctgctcgcggcgcagccgctgctcgtcttcggcgagggggagtacggcgtcaccgacatcctgtacgccggcgcgaggagcggacgccccgaggtgttccgcctcctgttcgacgcggtgctgtccgcggcgccggcgtgcccggtcgggggtgacgacggcgagtttaggcgcgagatgatgaaccgcgccgtgcacgccgcggcgaggggaggcagccttgccgtgctcagggacctcctgcgcggctgctccgacgccgcggcatacagggacgcgcagggatcaacgatcttgcacgccgcggctgcaaagggccaagttgaggttgtgaaggatctgattgcatctttcgatatagcgaactgtgtagatgaccaagggaacacggcgctgcatatagcagccttccgaggccatgtccaagtggtcgaggctctcatcaccgcatctccgtctcttatatcagcaacaaacgaagccggcgacacgttccttcacatggcactgactggcttcgggactcccgagttccaaaggcttgatcgccagacggagctcattaggcaattagcgagtggagcaatcgtggatatcagcagcagcactattatcaacgcgcagaatgacgacgggaagacagctcttcacttggccgtggtttgcaacctgcattcggacgtcgttaagctcctgatgagcgtgccttgtattgacctcaacatctgcgacaaggacggcatgactcctctggatctactcaggaagcagccacggacgacggcgtcagagatactgatcaaacaactgatcctggccggtgggttcacaagctcaagggaccacgagactaggtcggctatcgcttctcagctgaagatgcactccattgtaggaagcccggggacatcgttcaagataccagacggcgagatcttctttctccacgctgctggagtcgacgtgtcgggcggcatcggcgaaggaggagcagcagtaccgttttcctccgttattgctagggctgacgtcctgcatggacccaaactgaagaggctcaactctttccaagacgcggcgaagcatatcaaggtcctattcagatggcctcgccgcggatggaacaagtcaggcagcggcggccgaaagggtctggacgacgacgatgcctcgtctgtggactctgccaagacctggagccacgaggagaccccgacaccgctgaggcagagtcatggctagagcttcatggaatatgaactatgagaaggttcttgttgacatcttgcacgagcacaatcatgtgaagtaccggggccagaatggttgggcaccagaaggttggcgttctatgacacaaatgttcaatgagaagtgcccgttggctaagtttacaaaggcacagatccaggaaaaagaaaaggaacttaaggcaaactataaggtgctgaaggaagcccgcaagcaaagtggtgttggatggaatgaggccatgggtatgatcattgctgaaccaccaatatgggcaaatataattgttagtaatccaaaggtcaagaaatttcagtcaaggccattccctttgtataatcagttgtcagcactctatgatggcagttgtgccaccggtgatctcaattttacatcaactcagcaacatacatcatcccgacaacaattacatattcaagctgaagttgaagctgaagctatgagctctttcaggattgatgatgacctcggggttaaccctgatttgaaccaaatctcttcaaatttgcatgggttgggatcttcaagtacccgtgttgagattggtggacatgaccgcaccccggcatcttcagaacagcgagcggagagtcatggaaggaagcgtaagcaaagtcagattgctggggttcttgaggaatatttggattacaaaaggcaacataatgataagttgcttgatgtggtaaatcagattgatcaacaagctgagggatgtaacaagaaggaagaatattgtattggaaagtgtgttcgtgtgttagagtcgatggaagatataactgaagaggagatggcagcggcaatgggtgtgtttaagtgcgaggagaacagagaaatatttctgaacagccagaggccacgtgtccgattgttgtggcttagaaacgagatccacaagcagatgtccaccaatctcaatattttcagatgtccaccaagcctttagtttcctggtaagcaaaaaaataattcaataatattctttcagccaatagcatattgaaaaatagccttcagttgtatggtcacatttactatttctaaatgcttgtttggtgctgacagcttgttgttgctgctggccttacttattctatgcatttctggaattctgtctggctggtagcctccaagatctcttcgatctcgctgaaaaacgtcacttccttttgacaatttgttattggccagtaccttaacaaaccaattatcactgggcttgcgagctctagatccttttctataaactgtgtcacacagtaggtcaaccgcttatttccttatcccacttttcttgtttcttcttgtttattctacactgcactacaaccatctataatttccttatcccacttttcttgtttcttcttgcctaatttctcactcaagttactactgcccgcagattcttgcttaatttctgatttggttaatagtatatatttcttctgttgttgcagggaggcaatggatggagctctgcgacaataaatacaagatgttcaaaagaacgttattgttgtgttaacattttgggcataccaagtacttttttttgttatgagtctgtcaaacatatgttaaatttgtcactaatttcttatgagctatttctgtggtcaaagaaagttgtttatttaagtggcatgaatcaaaaaatcttaggagacttctgtttgattttgtttatttttaaaagaaagttgcttcagcgtacaaattttgaggggcatattgttgtttttgcgtacaaatttctgtttgattttgttgatttttattttttctattttacttgtgatttgatgatgatcacacttctagcagctgccgatgtgtggctccagagggcagcagggcagctgacccatggggcaccaaaggatgtcagggcagcgcagccccgctgggcaatgcccacccagggaattcgtatgacaggaatttgccccctccggtgctagctcccctgtgttttattggccccggtcaccaaaggatgtcttaggtgccgtggaagcccctgaacctgaactgtccgtcggcgtcgaggcggccccgcgcgtcggacatccactcgctcctgaggtcgatgagcctctggccggcgtcgttgacggtgccgtcggcgttgacgagcgcggcgtcctgcctccacatgtggccctgcatgaacccccagagcacgacgccctgcaccgccgggtgcgcgaacgcctcgcgcaggaccacctcgaggtcgtcggcgcggagcgcgtcgtcgggctcgcagacgtcgacctccgtgaaccagacgggcaggccggtggcggcgtagaccgtgtcgagcgcgtcgcagatgacctcgccgacggggtgggtgacgtggccctgcatcccgacgccgccgacc

SEQ ID NO: 50325 - DNA, 4075 bp, Zea Mays
atggacagaaagccagccggtaaaaatagcttcaggcaacaggagaagcagaaaaaaaatgagaggttggactggaatgacctggtcctggctgggccttttgtccttcattcacattcccaaactgctccatcactttataccgccgtctcatctcgtgctcgtggtgtccgtgttcctcctcttggcggggccggccagaaaagcttgctggacggttggctccggaaaccggatgcgtctcaggtcaggcgcctgatttttacttgggttcccatggttcgtttccacagcgcaaaccacctcccagcttttagtcagtatagtctgctggagcccatggaggtgcagctggcgacggagcaaccgggggacccgttcctgccgctgcggtgggagagcacgggcgaccagtggtggtacgccacgcccatcgactgggcggcggccaacggccactacgacctcgtccgggagctcctgcgcctggaccccaacctcctcgtcaagctcacctcgctccgccgcatccgccgcctcgagtccgtctgggacgacgacgcgcgcctcgacgccgccgccaggaaccgcgccgccgtcgcccgccgcctgctgctcgactgcgagcccgataacgacaagcagcccccatcccgcggaggcggaggcgacgccgccaaccgcctcctccgcgccggctacggcggatggctcctctacacggcggccgcggccggggacgagaggttcgcgcgggagctgctcgcggcgcagccgctgctcgtcttcggcgagggggagtacggcgtcaccgacatcctgtacgccggcgcgaggagcggacgccccgaggtgttccgcctcctgttcgacgcggtgctgtccgcggcgccggcgtgcccggtcgggggtgacgacggcgagtttaggcgcgagatgatgaaccgcgccgtgcacgccgcggcgaggggaggcagccttgccgtgctcagggacctcctgcgcggctgctccgacgccgcggcatacagggacgcgcagggatcaacgatcttgcacgccgcggctgcaaagggccaagttgaggttgtgaaggatctgattgcatctttcgatatagcgaactgtgtagatgaccaagggaacacggcgctgcatatagcagccttccgaggccatgtccaagtggtcgaggctctcatcaccgcatctccgtctcttatatcagcaacaaacgaagccggcgacacgttccttcacatggcactgactggcttcgggactcccgagttccaaaggcttgatcgccagacggagctcattaggcaattagcgagtggagcaatcgtggatatcagcagcagcactattatcaacgcgcagaatgacgacgggaagacagctcttcacttggccgtggtttgcaacctgcattcggacgtcgttaagctcctgatgagcgtgccttgtattgacctcaacatctgcgacaaggacggcatgactcctctggatctactcaggaagcagccacggacgacggcgtcagagatactgatcaaacaactgatcctggccggtgggttcacaagctcaagggaccacgagactaggtcggctatcgcttctcagctgaagatgcactccattgtaggaagcccggggacatcgttcaagataccagacggcgagatcttctttctccacgctgctggagtcgacgtgtcgggcggcatcggcgaaggaggagcagcagtaccgttttcctccgttattgctagggctgacgtcctgcatggacccaaactgaagaggctcaactctttccaagacgcggcgaagcatatcaaggtcctattcagatggcctcgccgcggatggaacaagtcaggcagcggcggccgaaagggtctggacgacgacgatgcctcgtctgtggactctgccaagacctggagccacgaggagaccccgacaccgctgaggcagaggtattccaggatcggctcgctgttcaacaagcggacctacgcagcaggcagggcttcacctagcgaagcagtgaagaagggtggagtggtacagccagctggttctactctactttcgacatctctgtcgtcgtcgtcggcgtccttggttgacagtcatggctagagcttcatggaatatgaactatgagaaggttcttgttgacatcttgcacgagcacaatcatgtgaagtaccggggccagaatggttgggcaccagaaggttggcgttctatgacacaaatgttcaatgagaagtgcccgttggctaagtttacaaaggcacagatccaggaaaaagaaaaggaacttaaggcaaactataaggtgctgaaggaagcccgcaagcaaagtggtgttggatggaatgaggccatgggtatgatcattgctgaaccaccaatatgggcaaatataattgttagtaatccaaaggtcaagaaatttcagtcaaggccattccctttgtataatcagttgtcagcactctatgatggcagttgtgccaccggtgatctcaattttacatcaactcagcaacatacatcatcccgacaacaattacatattcaagctgaagttgaagctgaagctatgagctctttcaggattgatgatgacctcggggttaaccctgatttgaaccaaatctcttcaaatttgcatgggttgggatcttcaagtacccgtgttgagattggtggacatgaccgcaccccggcatcttcagaacagcgagcggagagtcatggaaggaagcgtaagcaaagtcagattgctggggttcttgaggaatatttggattacaaaaggcaacataatgataagttgcttgatgtggtaaatcagattgatcaacaagctgagggatgtaacaagaaggaagaatattgtattggaaagtgtgttcgtgtgttagagtcgatggaagatataactgaagaggagatggcagcggcaatgggtgtgtttaagtgcgaggagaacagagaaatatttctgaacagccagaggccacgtgtccgattgttgtggcttagaaacgagatccacaagcagatgtccaccaatctcaatattttcagatgtccaccaagcctttagtttcctgggaggcaatggatggagctctgcgacaataaatacaagatgttcaaaagaacgttattgttgtgttaacattttgggcataccaagtacttttttttgttatgagtctgtcaaacatatgttaaatttgtcactaatttcttatgagctatttctgtggtcaaagaaagttgtttatttaagtggcatgaatcaaaaaatcttaggagacttctgtttgattttgtttatttttaaaagaaagttgcttcagcgtacaaattttgaggggcatattgttgtttttgcgtacaaatttctgtttgattttgttgatttttattttttctattttacttgtgatttgatgatgatcacacttctagcagctgccgatgtgtggctccagagggcagcagggcagctgacccatggggcaccaaaggatgtcagggcagcgcagccccgctgggcaatgcccacccagggaattcgtatgacaggaatttgccccctccggtgctagctcccctgtgttttattggccccggtcaccaaaggatgtcttaggtgccgtggaagcccctgaacctgaactgtccgtcggcgtcgaggcggccccgcgcgtcggacatccactcgctcctgaggtcgatgagcctctggccggcgtcgttgacggtgccgtcggcgttgacgagcgcggcgtcctgcctccacatgtggccctgcatgaacccccagagcacgacgccctgcaccgccgggtgcgcgaacgcctcgcgcaggaccacctcgaggtcgtcggcgcggagcgcgtcgtcgggctcgcagacgtcgacctccgtgaaccagacgggcaggccggtggcggcgtagaccgtgtcgagcgcgtcgcagatgacctcgccgacggggtgggtgacgtggccctgcatcccgacgccgccgacc

SEQ ID NO: 50326 - DNA, 4403 bp, Zea Mays
atggacagaaagccagccggtaaaaatagcttcaggcaacaggagaagcagaaaaaaaatgagaggttggactggaatgacctggtcctggctgggccttttgtccttcattcacattcccaaactgctccatcactttataccgccgtctcatctcgtgctcgtggtgtccgtgttcctcctcttggcggggccggccagaaaagcttgctggacggttggctccggaaaccggatgcgtctcaggtcaggcgcctgatttttacttgggttcccatggttcgtttccacagcgcaaaccacctcccagcttttagtcagtatagtctgctggagcccatggaggtgcagctggcgacggagcaaccgggggacccgttcctgccgctgcggtgggagagcacgggcgaccagtggtggtacgccacgcccatcgactgggcggcggccaacggccactacgacctcgtccgggagctcctgcgcctggaccccaacctcctcgtcaagctcacctcgctccgccgcatccgccgcctcgagtccgtctgggacgacgacgcgcgcctcgacgccgccgccaggaaccgcgccgccgtcgcccgccgcctgctgctcgactgcgagcccgataacgacaagcagcccccatcccgcggaggcggaggcgacgccgccaaccgcctcctccgcgccggctacggcggatggctcctctacacggcggccgcggccggggacgagaggttcgcgcgggagctgctcgcggcgcagccgctgctcgtcttcggcgagggggagtacggcgtcaccgacatcctgtacgccggcgcgaggagcggacgccccgaggtgttccgcctcctgttcgacgcggtgctgtccgcggcgccggcgtgcccggtcgggggtgacgacggcgagtttaggcgcgagatgatgaaccgcgccgtgcacgccgcggcgaggggaggcagccttgccgtgctcagggacctcctgcgcggctgctccgacgccgcggcatacagggacgcgcagggatcaacgatcttgcacgccgcggctgcaaagggccaagttgaggttgtgaaggatctgattgcatctttcgatatagcgaactgtgtagatgaccaagggaacacggcgctgcatatagcagccttccgaggccatgtccaagtggtcgaggctctcatcaccgcatctccgtctcttatatcagcaacaaacgaagccggcgacacgttccttcacatggcactgactggcttcgggactcccgagttccaaaggcttgatcgccagacggagctcattaggcaattagcgagtggagcaatcgtggatatcagcagcagcactattatcaacgcgcagaatgacgacgggaagacagctcttcacttggccgtggtttgcaacctgcattcggacgtcgttaagctcctgatgagcgtgccttgtattgacctcaacatctgcgacaaggacggcatgactcctctggatctactcaggaagcagccacggacgacggcgtcagagatactgatcaaacaactgatcctggccggtgggttcacaagctcaagggaccacgagactaggtcggctatcgcttctcagctgaagatgcactccattgtaggaagcccggggacatcgttcaagataccagacggcgagatcttctttctccacgctgctggagtcgacgtgtcgggcggcatcggcgaaggaggagcagcagtaccgttttcctccgttattgctagggctgacgtcctgcatggacccaaactgaagaggctcaactctttccaagacgcggcgaagcatatcaaggtcctattcagatggcctcgccgcggatggaacaagtcaggcagcggcggccgaaagggtctggacgacgacgatgcctcgtctgtggactctgccaagacctggagccacgaggagaccccgacaccgctgaggcagaggtattccaggatcggctcgctgttcaacaagcggacctacgcagcaggcagggcttcacctagcgaagcagtgaagaagggtggagtggtacagccagctggttctactctactttcgacatctctgtcgtcgtcgtcggcgtccttggttgacaggttcgaatctgttcatcaggacaacgatcagtctccttatgtcagtaggttgatcaggcacacacctaagaaatctggatctctcaacagtagacttatgaaccagtccttgcgcctcagggcctaagataggcagcaacatcgacaaggcttcttgcttccctcactagctagctggttacattttacagcttcactggtagcagacacagataattctaaatatctagccgccctgccacagcagcagtcatggctagagcttcatggaatatgaactatgagaaggttcttgttgacatcttgcacgagcacaatcatgtgaagtaccggggccagaatggttgggcaccagaaggttggcgttctatgacacaaatgttcaatgagaagtgcccgttggctaagtttacaaaggcacagatccaggaaaaagaaaaggaacttaaggcaaactataaggtgctgaaggaagcccgcaagcaaagtggtgttggatggaatgaggccatgggtatgatcattgctgaaccaccaatatgggcaaatataattgttagtaatccaaaggtcaagaaatttcagtcaaggccattccctttgtataatcagttgtcagcactctatgatggcagttgtgccaccggtgatctcaattttacatcaactcagcaacatacatcatcccgacaacaattacatattcaagctgaagttgaagctgaagctatgagctctttcaggattgatgatgacctcggggttaaccctgatttgaaccaaatctcttcaaatttgcatgggttgggatcttcaagtacccgtgttgagattggtggacatgaccgcaccccggcatcttcagaacagcgagcggagagtcatggaaggaagcgtaagcaaagtcagattgctggggttcttgaggaatatttggattacaaaaggcaacataatgataagttgcttgatgtggtaaatcagattgatcaacaagctgagggatgtaacaagaaggaagaatattgtattggaaagtgtgttcgtgtgttagagtcgatggaagatataactgaagaggagatggcagcggcaatgggtgtgtttaagtgcgaggagaacagagaaatatttctgaacagccagaggccacgtgtccgattgttgtggcttagaaacgagatccacaagcaggtagttatataaagcactcaatttctacaattttttttgcttcatggtcacatttactaatttctgcaatattttcagatgtccaccaatctcaatattttcagatgtccaccaagcctttagtttcctgggaggcaatggatggagctctgcgacaataaatacaagatgttcaaaagaacgttattgttgtgttaacattttgggcataccaagtacttttttttgttatgagtctgtcaaacatatgttaaatttgtcactaatttcttatgagctatttctgtggtcaaagaaagttgtttatttaagtggcatgaatcaaaaaatcttaggagacttctgtttgattttgtttatttttaaaagaaagttgcttcagcgtacaaattttgaggggcatattgttgtttttgcgtacaaatttctgtttgattttgttgatttttattttttctattttacttgtgatttgatgatgatcacacttctagcagctgccgatgtgtggctccagagggcagcagggcagctgacccatggggcaccaaaggatgtcagggcagcgcagccccgctgggcaatgcccacccagggaattcgtatgacaggaatttgccccctccggtgctagctcccctgtgttttattggccccggtcaccaaaggatgtcttaggtgccgtggaagcccctgaacctgaactgtccgtcggcgtcgaggcggccccgcgcgtcggacatccactcgctcctgaggtcgatgagcctctggccggcgtcgttgacggtgccgtcggcgttgacgagcgcggcgtcctgcctccacatgtggccctgcatgaacccccagagcacgacgccctgcaccgccgggtgcgcgaacgcctcgcgcaggaccacctcgaggtcgtcggcgcggagcgcgtcgtcgggctcgcagacgtcgacctccgtgaaccagacgggcaggccggtggcggcgtagaccgtgtcgagcgcgtcgcagatgacctcgccgacggggtgggtgacgtggccctgcatcccgacgccgccgacc

SEQ ID NO: 50327 - DNA, 4369 bp, Zea Mays
atggacagaaagccagccggtaaaaatagcttcaggcaacaggagaagcagaaaaaaaatgagaggttggactggaatgacctggtcctggctgggccttttgtccttcattcacattcccaaactgctccatcactttataccgccgtctcatctcgtgctcgtggtgtccgtgttcctcctcttggcggggccggccagaaaagcttgctggacggttggctccggaaaccggatgcgtctcaggtcaggcgcctgatttttacttgggttcccatggttcgtttccacagcgcaaaccacctcccagcttttagtcagtatagtctgctggagcccatggaggtgcagctggcgacggagcaaccgggggacccgttcctgccgctgcggtgggagagcacgggcgaccagtggtggtacgccacgcccatcgactgggcggcggccaacggccactacgacctcgtccgggagctcctgcgcctggaccccaacctcctcgtcaagctcacctcgctccgccgcatccgccgcctcgagtccgtctgggacgacgacgcgcgcctcgacgccgccgccaggaaccgcgccgccgtcgcccgccgcctgctgctcgactgcgagcccgataacgacaagcagcccccatcccgcggaggcggaggcgacgccgccaaccgcctcctccgcgccggctacggcggatggctcctctacacggcggccgcggccggggacgagaggttcgcgcgggagctgctcgcggcgcagccgctgctcgtcttcggcgagggggagtacggcgtcaccgacatcctgtacgccggcgcgaggagcggacgccccgaggtgttccgcctcctgttcgacgcggtgctgtccgcggcgccggcgtgcccggtcgggggtgacgacggcgagtttaggcgcgagatgatgaaccgcgccgtgcacgccgcggcgaggggaggcagccttgccgtgctcagggacctcctgcgcggctgctccgacgccgcggcatacagggacgcgcagggatcaacgatcttgcacgccgcggctgcaaagggccaagttgagcgaactgtgtagatgaccaagggaacacggcgctgcatatagcagccttccgaggccatgtccaagtggtcgaggctctcatcaccgcatctccgtctcttatatcagcaacaaacgaagccggcgacacgttccttcacatggcactgactggcttcgggactcccgagttccaaaggcttgatcgccagacggagctcattaggcaattagcgagtggagcaatcgtggatatcagcagcagcactattatcaacgcgcagaatgacgacgggaagacagctcttcacttggccgtggtttgcaacctgcattcggacgtcgttaagctcctgatgagcgtgccttgtattgacctcaacatctgcgacaaggacggcatgactcctctggatctactcaggaagcagccacggacgacggcgtcagagatactgatcaaacaactgatcctggccggtgggttcacaagctcaagggaccacgagactaggtcggctatcgcttctcagctgaagatgcactccattgtaggaagcccggggacatcgttcaagataccagacggcgagatcttctttctccacgctgctggagtcgacgtgtcgggcggcatcggcgaaggaggagcagcagtaccgttttcctccgttattgctagggctgacgtcctgcatggacccaaactgaagaggctcaactctttccaagacgcggcgaagcatatcaaggtcctattcagatggcctcgccgcggatggaacaagtcaggcagcggcggccgaaagggtctggacgacgacgatgcctcgtctgtggactctgccaagacctggagccacgaggagaccccgacaccgctgaggcagaggtattccaggatcggctcgctgttcaacaagcggacctacgcagcaggcagggcttcacctagcgaagcagtgaagaagggtggagtggtacagccagctggttctactctactttcgacatctctgtcgtcgtcgtcggcgtccttggttgacaggttcgaatctgttcatcaggacaacgatcagtctccttatgtcagtaggttgatcaggcacacacctaagaaatctggatctctcaacagtagacttatgaaccagtccttgcgcctcagggcctaagataggcagcaacatcgacaaggcttcttgcttccctcactagctagctggttacattttacagcttcactggtagcagacacagataattctaaatatctagccgccctgccacagcagcagtcatggctagagcttcatggaatatgaactatgagaaggttcttgttgacatcttgcacgagcacaatcatgtgaagtaccggggccagaatggttgggcaccagaaggttggcgttctatgacacaaatgttcaatgagaagtgcccgttggctaagtttacaaaggcacagatccaggaaaaagaaaaggaacttaaggcaaactataaggtgctgaaggaagcccgcaagcaaagtggtgttggatggaatgaggccatgggtatgatcattgctgaaccaccaatatgggcaaatataattgttagtaatccaaaggtcaagaaatttcagtcaaggccattccctttgtataatcagttgtcagcactctatgatggcagttgtgccaccggtgatctcaattttacatcaactcagcaacatacatcatcccgacaacaattacatattcaagctgaagttgaagctgaagctatgagctctttcaggattgatgatgacctcggggttaaccctgatttgaaccaaatctcttcaaatttgcatgggttgggatcttcaagtacccgtgttgagattggtggacatgaccgcaccccggcatcttcagaacagcgagcggagagtcatggaaggaagcgtaagcaaagtcagattgctggggttcttgaggaatatttggattacaaaaggcaacataatgataagttgcttgatgtggtaaatcagattgatcaacaagctgagggatgtaacaagaaggaagaatattgtattggaaagtgtgttcgtgtgttagagtcgatggaagatataactgaagaggagatggcagcggcaatgggtgtgtttaagtgcgaggagaacagagaaatatttctgaacagccagaggccacgtgtccgattgttgtggcttagaaacgagatccacaagcaggtagttatataaagcactcaatttctacaattttttttgcttcatggtcacatttactaatttctgcaatattttcagatgtccaccaatctcaatattttcagatgtccaccaagcctttagtttcctgggaggcaatggatggagctctgcgacaataaatacaagatgttcaaaagaacgttattgttgtgttaacattttgggcataccaagtacttttttttgttatgagtctgtcaaacatatgttaaatttgtcactaatttcttatgagctatttctgtggtcaaagaaagttgtttatttaagtggcatgaatcaaaaaatcttaggagacttctgtttgattttgtttatttttaaaagaaagttgcttcagcgtacaaattttgaggggcatattgttgtttttgcgtacaaatttctgtttgattttgttgatttttattttttctattttacttgtgatttgatgatgatcacacttctagcagctgccgatgtgtggctccagagggcagcagggcagctgacccatggggcaccaaaggatgtcagggcagcgcagccccgctgggcaatgcccacccagggaattcgtatgacaggaatttgccccctccggtgctagctcccctgtgttttattggccccggtcaccaaaggatgtcttaggtgccgtggaagcccctgaacctgaactgtccgtcggcgtcgaggcggccccgcgcgtcggacatccactcgctcctgaggtcgatgagcctctggccggcgtcgttgacggtgccgtcggcgttgacgagcgcggcgtcctgcctccacatgtggccctgcatgaacccccagagcacgacgccctgcaccgccgggtgcgcgaacgcctcgcgcaggaccacctcgaggtcgtcggcgcggagcgcgtcgtcgggctcgcagacgtcgacctccgtgaaccagacgggcaggccggtggcggcgtagaccgtgtcgagcgcgtcgcagatgacctcgccgacggggtgggtgacgtggccctgcatcccgacgccgccgacc

SEQ ID NO: 50328 - DNA, 4104 bp, Zea Mays
ttcaagatggatggacgtcgtcatccgcagcaccatgcaatgtatgtcccgtctgtttaacattttcagtgcttgatttgaaattatccgtacggtttgatctatatagactagtaattctgtacaaacatatgttgcctttcacttgcttctacttgcaatatgactgaacattttagccaggttgtcagcttgttagaaaagttctattttgcatagtttaattgagtgaacaaaacatgttgagcattaaagttgattcaagccaatactgcttctctgatctataatctaagaattgttcatccctgttttgtttgactttattcccactttggcccttagagttgattcggtgcacatgcttgcttgccattgccaggttgttagttgatcatgcgaatatggattaaacttgtggaatgactcgattaatctaatggttgtacctgttgttgttggcattcacatattatcttttaacaccggattggagcttcataaaatgttgtctgccatcaaaatttcacagcaaaagggtacttaaggtttgcttggtagcacgtgaattaaattgatgcctttggcgatggaaatttccattgacatccctagtcattagtacatttatgttgctgtcatggaaccatttgtagtttgttatgttcactgattgaaggatgatcattcgagatggctctttattatgattagaagggttaaaagtattttccttcattctgtatttctgttgctccaaagttagaccttgggatgggtcctgtgctcaattttctatgtacacacagtttacaaagtactactaaactaaatttatgaacaaaaaaaatactgtacgctgcaggttgtgaaggatctgattgcatctttcgatatagcgaactgtgtagatgaccaagggaacacggcgctgcatatagcagccttccgaggccatgtccaagtggtcgaggctctcatcaccgcatctccgtctcttatatcagcaacaaacgaagccggcgacacgttccttcacatggcactgactggcttcgggactcccgagttccaaaggcttgatcgccagacggagctcattaggcaattagcgagtggagcaatcgtggatatcagcagcagcactattatcaacgcgcagaatgacgacgggaagacagctcttcacttggccgtggtttgcaacctgcattcggacgtcgttaagctcctgatgagcgtgccttgtattgacctcaacatctgcgacaaggacggcatgactcctctggatctactcaggaagcagccacggacgacggcgtcagagatactgatcaaacaactgatcctggccggtgggttcacaagctcaagggaccacgagactaggtcggctatcgcttctcagctgaagatgcactccattgtaggaagcccggggacatcgttcaagataccagacggcgagatcttctttctccacgctgctggagtcgacgtgtcgggcggcatcggcgaaggaggagcagcagtaccgttttcctccgttattgctagggctgacgtcctgcatggacccaaactgaagaggctcaactctttccaagacgcggcgaagcatatcaaggtcctattcagatggcctcgccgcggatggaacaagtcaggcagcggcggccgaaagggtctggacgacgacgatgcctcgtctgtggactctgccaagacctggagccacgaggagaccccgacaccgctgaggcagaggtattccaggatcggctcgctgttcaacaagcggacctacgcagcaggcagggcttcacctagcgaagcagtgaagaagggtggagtggtacagccagctggttctactctactttcgacatctctgtcgtcgtcgtcggcgtccttggttgacaggttcgaatctgttcatcaggacaacgatcagtctccttatgtcagtaggttgatcaggcacacacctaagaaatctggatctctcaacagtagacttatgaaccagtccttgcgcctcagggcctaagataggcagcaacatcgacaaggcttcttgcttccctcactagctagctggttacattttacagcttcactggtagcagacacagataattctaaatatctagccgccctgccacagcagcagtcatggctagagcttcatggaatatgaactatgagaaggttcttgttgacatcttgcacgagcacaatcatgtgaagtaccggggccagaatggttgggcaccagaaggttggcgttctatgacacaaatgttcaatgagaagtgcccgttggctaagtttacaaaggcacagatccaggaaaaagaaaaggaacttaaggcaaactataaggtgctgaaggaagcccgcaagcaaagtggtgttggatggaatgaggccatgggtatgatcattgctgaaccaccaatatgggcaaatataattgttagtaatccaaaggtcaagaaatttcagtcaaggccattccctttgtataatcagttgtcagcactctatgatggcagttgtgccaccggtgatctcaattttacatcaactcagcaacatacatcatcccgacaacaattacatattcaagctgaagttgaagctgaagctatgagctctttcaggattgatgatgacctcggggttaaccctgatttgaaccaaatctcttcaaatttgcatgggttgggatcttcaagtacccgtgttgagattggtggacatgaccgcaccccggcatcttcagaacagcgagcggagagtcatggaaggaagcgtaagcaaagtcagattgctggggttcttgaggaatatttggattacaaaaggcaacataatgataagttgcttgatgtggtaaatcagattgatcaacaagctgagggatgtaacaagaaggaagaatattgtattggaaagtgtgttcgtgtgttagagtcgatggaagatataactgaagaggagatggcagcggcaatgggtgtgtttaagtgcgaggagaacagagaaatatttctgaacagccagaggccacgtgtccgattgttgtggcttagaaacgagatccacaagcagatgtccaccaatctcaatattttcagatgtccaccaagcctttagtttcctgggaggcaatggatggagctctgcgacaataaatacaagatgttcaaaagaacgttattgttgtgttaacattttgggcataccaagtacttttttttgttatgagtctgtcaaacatatgttaaatttgtcactaatttcttatgagctatttctgtggtcaaagaaagttgtttatttaagtggcatgaatcaaaaaatcttaggagacttctgtttgattttgtttatttttaaaagaaagttgcttcagcgtacaaattttgaggggcatattgttgtttttgcgtacaaatttctgtttgattttgttgatttttattttttctattttacttgtgatttgatgatgatcacacttctagcagctgccgatgtgtggctccagagggcagcagggcagctgacccatggggcaccaaaggatgtcagggcagcgcagccccgctgggcaatgcccacccagggaattcgtatgacaggaatttgccccctccggtgctagctcccctgtgttttattggccccggtcaccaaaggatgtcttaggtgccgtggaagcccctgaacctgaactgtccgtcggcgtcgaggcggccccgcgcgtcggacatccactcgctcctgaggtcgatgagcctctggccggcgtcgttgacggtgccgtcggcgttgacgagcgcggcgtcctgcctccacatgtggccctgcatgaacccccagagcacgacgccctgcaccgccgggtgcgcgaacgcctcgcgcaggaccacctcgaggtcgtcggcgcggagcgcgtcgtcgggctcgcagacgtcgacctccgtgaaccagacgggcaggccggtggcggcgtagaccgtgtcgagcgcgtcgcagatgacctcgccgacggggtgggtgacgtggccctgcatcccgacgccgccgacc

SEQ ID NO: 50329 - DNA, 464 bp, Zea Mays
atgccccagagcaccaccctgtgaccgaaaaaaatcaaagaaaaagatgcggcaggatgacgttgtagacatcgtctgcgcagggagggggcgcggtagcttacatcgacgatcagcgacatcacgacgccgttggagaggggccgcaggtatcgcgctcggtgagtagcatcgcgggcgggggcgtagtgggtgtggacgccctccttacattgatggggtgggcgcggtaatggggagaggagtaatggggagaggagatctgggaccttccattgacggtggccaaggaggaggtggcagatccgagtagagagcggcgaaccttccataaaatcggcggacgcggaccttccattgacggcagatgatgaggaggtggtggatccacgtagatagcgacgaaccttccaaaaaatcggcggacgtggaccttccattgacggcgactgaggaggaggtgg

SEQ ID NO: 50330 - DNA, 1714 bp, Zea Mays
tgagtgtgtgacactgacacctgagaccagctctcctgcttcgcggctgtctctttcatcggccacccacggcggcggagcatagcactgatagcagtaagcaagcagcggagacgccggagagcggtgaagaagcatggagatggagcagctctgctcgctgctccgcgacctcgacgcgctcaagcagcatcccgacgacctcacttccaccatcgatcggatgcgggagcggctagtggcgatgatgaatccggcagccggtgccgcttctcgatccaagattaaggacatgagtgcagaagtggtggacaacaatccctacagcagacttatggcgttgcaacggatgggcgtagtggagaattatgagcgcatcagggactactccgttgccatcgttggcataggtggcgttggtagtgttgctgcggagatgctcactagatgtggaattggacgactgttgttgtatgattacgacacggtcgagttggctaacatgaataggttgttctttcgcccagaacaggttggaatgaccaaaacagatgccgctgtacagacactttctggaataaatcctgatgttgtgttggagagctactcattgaatattactacagtcaaaggtttcgaaacatttttggcaagtttaaaagcacaaagttctcatgagcgtagcactggagttaatcttgtcttgagttgcgtcgataactatgaagctcgtatggttgtaaatcaggcatgcaatgagcttggtcagacgtggatggagtctggtgtctcagaagatgctgtttctggtcatatacaactgctggttcctggtgaaactgcatgttttgcatgtgctcctccattggttgtagcatctggagtggatgagcgtacacttaagagagaaggtgtttgtgctgcctctttgccaactacaatgggtgttgttgcgggtctcctggtccagaatgctctgaaatatttgttgaactttggacaagtttcccgttacttgggatataactcacttaaggattatttccctgcaatggaaatgaggccaaatccacaatgctcgaatccagcatgtgttctcagacagaaagaatatatggaatccaaacctgctagagatgcagcagcgaagactaagatggaagctgaagcatccacagaaaatgaatgtcctgtccacctagacaatgagtggaatattagtgttgttgatgatgaaactgagacatcaagcattcgaaacactccagaaggtcttgtccgtgagcttccagacgctgattcatacgcaggaccagctgctccagtgagttccagcgctattgatgatgatgatgatctcgaggagctccagcgtcaacttgatgccctaaacgcatcttagccttaataagtaggctagttcatctgcgccttaattggcttctccccaatcccaacttggatggggaagatgatttacatactgtttttcggagttggtaaattcatagcaccgtggtaaaagaaaaaggagaaaatgatagctatactggttttgggagttttgacttacagttttggttgagatctgagaacatgtgcatgtctgagccagacagctcgtcggtaatggtactaatgtctgaatttttgttgctgttgatattcaaaggttttatctggaaccgtcatttcttattgagaggttccacta

SEQ ID NO: 50331 - DNA, 892 bp, Zea Mays
tgaaatagagaaatgttttatagctattttctaaatcggtgtagctagctattaaactattgcttggaggtgtacaaaattttcattccagtactatgaagtactccgatcccttccattttttaaacgtgttacgtttattaggcgaagttaattagtaaaaaccgaactataattaggttgaactagatctggcagatatatagtcttgaaacttccgtgcaagaacacagaaagtggtagatatattctctctcggcatgtgactgttgtcttcttaatctgtttattttctaataaagcgcattttttagatcttcttctaggaacaaacgtgcaaataagcagttgccggccggcagatggcacgagtgatgagcatgggcagggagcaggaaagtatgggttggatagaattggctagaggttgtgtggacaggaagagctcgagagccgagccacaggtttccaagaaaaagatccaatgcaatcgccagtagcctcggccaaggggtagcacggctcaccaatgtgcagatgcacacatggcgtagttttttttttaagatcctcaagcttgtggcctacgcacggtggctgaccttgctcggcagcgcgctgacgctggtgcgtcactgccagtgccactttgctccaccgaaaatgaggagattcttggtttctagaagttcagcgtcggaaccacaaggtggtgcacaaccaacacaaccaaatccaccataaactcaatctagagggggcggcgagatcaatatgcactaccccagaatcgctcaaaggtggcatgactgtcttgtgacactagctaaaaacacgtcactaacaaaattatctttatgatgtctgttgtaaaaacacgtcattagcaaaa

SEQ ID NO: 50332 - DNA, 1845 bp, Zea Mays
gtggcacgccaattccggaagcttctcccaccgccaccggagccccacacgcccctcgtcctcggatcccatcccgtcgcggtcgccgcactagttcgacgtacagaagcgaaggtctcgacgaatccgtgacgccgacgtgggtttgcctctgtacttctggaatcggaaagaggtgtgtcgtgcggtgcgtgtccaattctaaccccttcctatcgaccatcattctcccctctgcctgcgtcgtcctcgccgccatggaccttgcggacgggcgagacgacgccctcaatggaggcgtcggcgtcggcgtcggcgtggaggagacaaggaggaggaggaaggtggagctggtgcaggaggccatccgtggcttcctggaggagaagaggagcgatggccagggaggaggagaggagcgcttgacggccaggctcagggaggaggagcaggagctcctgttgtcgttgctctccaagttgggcgagctaaaaaccgaccccgatccagacatcttggaagaaccgagctcctcccgcccggaccacggccaccagcctgcaggaggaggcgaacgcagcaaggaggtggagccagctgacatcgccaaggacctgagcaagatcaagaggcagaacacgatcacccacctcctcctcggcgccgtcatcgtcctgaccgccgtgtggcaggtcaacgaggtgtcgttcctcctctggctgcagagcaagctgagcaaccccttcaagtccctcggggacatggtcaaggcctccctcctcaagcttagagggaggaggccggtgctcgagtcgtcgccgctgccgctggccggcgtccccgacgtcagccgggctgatctgccgacgtttgtcatcggcggcaccgagcacgtaggtaaatgagctagctgtgtggtgatccgaggattgattaaaatgtccagcatctgtttgttgcgaataatttatgaactgggattgattcttgaattatgaactgacacaccaacatttccgggaggcatataatgcctgggagccaagtatttctagattctcttatactggctcgtaagattcaaacagtttgtgaagtgtcaaccgtacgatagtatcgatgctatgattttgaggtggcgagtgatcgcttcagtttggcgatctttgaacaagagggccacatcatcttatggatgattagtgctcataccacgccatatttagctcggcgtaatgtgtaattgcagaacagtaacttgatcattctaggccagagaagcataattgtcctggttccatctccaacacgaaatgcatcgtgttcatcagtgcacctgtgcacgatacattccataccgtttgaaggcggtgttggtgaccaaaatttgtccaacaaaactgcagtgtgcccccccccccccccccaccaaaaaaaatcgggtaagctaaaggccgcactcaaagtagaaccagcagctgcatacaacaaggccgggccgatgcttcagggcaacatcgaggatccagcaatgacaatgacctgcagtgattttgcagttagccacatattggtaatctcgtattgaatcacaaaataattgagatacagacatttcagtagtagacaacggcaccttatcagtatcactaaaggcccaattattaccagatatcttgatggccatggcgatgtaactcatttctcttctctttttcccttttgcaattcttttgccagatgaacataataatgataacaaaaaagtacaatatattaaagtctctcataaacgaccaagttttgccagaccggcgctaaagcctgttcgctgcggctttaatc

SEQ ID NO: 50333 - DNA, 1479 bp, Zea Mays
ccggcggcctgacccactaacccgccgcaccgtcgtccccgctaggcgctggcctctggccccttgcggcgcgcggtgcgttacaacttacaagtagcgtcagtgagttacagccagccaaaagttacctacagctcactcccaacggaagcaagaaccaccgctcactcactcgccattcggcagaggcgtgactgactgaaactgagcactagggctttgagagtgcagcagaggagggcgaaccatgggcgaggagaagaagaacgaggccccgtctcttccaccgccgccgccggaggaggtggtcatgcgggtcttcatgcactgcgagggttgtgcgcgcaaggtcaagaagattctcaagggatttgatggtgttgaagatgttattgcagatacgaaggcacacaaggtggtcgttaaggggaaaaaggcagctgctgacccaatgaaggtggtggaacgggtgcagaagaagacaggccgcaaggtagagcttctctcaccaatgccaccaccgaaagaagagaagaaggaagaggagaaaaaggaagaacctgagccaccaaaaaccgagaagaaagaggaggcaacggtgctcgctgtggtgctcaaggtgcatatgcattgtgaggcttgcacacaagtgatcaagaagagaatcctcaagatgaaaggcgtgcaatctgtagaggcagacctcaaggcttctcaagtcactgtgaagggtgtgttcgaggaggccaagctgtctgattatgtgtataggcgcactggcaagcacgctgctatcgtcaagtctgagccggttgcagctgagaatgttgatgatggaaatgccaaggatgacaagaaggcagccgaaggtggggaggagaagaaggatgatggcaaggaggaaaagaaagatgaagacaagaaagaagcggataatcagaaggatgatggcaatgctggtgatgaagggaaagacaaagaccctggcgccgttgctaacatgtatatgcactacccgaggtccaatcatctgagcgaatacggatatgcctaccagtaccctcctcagctcttcagcgacgagaacccgaatgcctgttctctgatgtaagaaagccagaaccaagtgaccttaagcgcgaaaataagaggggattgagttatcccctgattttggaggttcaggaagtttagaacttttctcttctatttctaaggttgaactttctgtctggtacaaagtaaactctgggctggtttgtggacttttcatattgtgtatgctactggttagtaggattttgtgttgcacctttcacctttggcttttatttctgtacaaagatgtattatatatgctagttttgaaatagcttgctgctagtactctgtagtctgttgtccggaatagacggagctttctcagttaacattgccagtgatgtcggaaaaatccatattcttggtgtccttttctaa

SEQ ID NO: 50334 - DNA, 6952 bp, Zea Mays
ccccaaccgccttcaacttttggcgcgcctttctccccttgccaaaacccaaatctagggttcactcttccccttccccggcgtgcaacggcagtccaaactatccaagcggccactgggccagcgcgtcttccattcccgctcaacggagcgcacctgccagcatgagcgggcggcggggtccagctgccacaggaggcggacggggaggcggaggcggaggcggcgggaactggcggcggagcgggtcggcgaaggcgaaggagcagcggctgcgcctgggcgcggaggagctcctcgagagccggctaggattcgcgccatacactgatggggagcggcgcctcggatggcttctcaccttttcaccgtcatcatgggaagacgaggacaccggaaaaatctacagctgtgttgacttatactttgtatcacaggatgggtctacgtttaaagtgaaatacaagtttcggccttacttttatgctgcgaccaaggacaagatggagttggaagttgaggcatatattaggcgacgttatgaaggggaaatttctgacatagaaataattgagaaagaggatttagatctgaaaaatcatctttctggcttgaagagaaaatacctgaagcttcagtttgacaccgtacaacaattaatgcgtgtaaggaatgaccttttacatgttgttgaaaagaacgaagaaaaaatagatgctgtggaggcatttgaatcaattcatggtgtaaaaagggtagaaaggccacaagattacataaattacatcattgatttgcgtgagtatgatgttccatatcatgttcgttttgctatagataatgatgtcagaagtggacagtggtacaatgttaatgtatctggttctgatgttttgcttcagagaagggaagacctgcttcagcgtgcagaagttcatgtctgtgcatttgatattgagaccacaaaactgcccctgaagtttccagatgctgaatacgacaacgtaatgatgatttcatacatgattgatgggcaaggatacctgataatcaacagagagtgcgttggagaagacattgatgatttggagtacacacctaaacccgaatttgaggggtattttagagttaagaatgttcaaactgagttggatctacttaaagcatggttttctcacatgcaagaggttaagcctggcatttatgttacatacaacggtgacttttttgactggccatttttagagaagagggctgcacaccatggaataaaaatgaatgaggagattggtttccaatgtgacaataaccagggcgagtgtcgggctaaattttcttgccatcttgactgttttgcttgggtgaagcgagacagttaccttccacaaggaagccaaggtctaaaggctgttacaaaagccaagctaggttacgatcctctggaggttaatccagaagatatggttcgctttgcaatggagcagccacagacaatggcttcgtattctgtatcagatgctgttgcaacatactatctatacatgacttatgtccatcctttcatcttttctcttgcaaccataatacctatgtcacctgatgaggtactgcggaaaggaagtgggacactttgtgaaatgctgctaatggttcaggcattcaaggctagtgtcatttgtcctaacaagcaccaagctgatcttgagaagttctacaataaccgtttattggaaagtgaaacctacattggtggtcacgttgagtgtcttgaaactggcgtctttagatctgatctccctacaaagttccaacttgaaccattagcatatgagcaactcattggaaatcttgatcgtgatctgcattatgtcattgctgtagaaggaaagttggatattgattctgtcacaaattatgatgaagtcaaggatgccatagagcaaaagcttgttgcattgcgtgatcacccaattcgcgaagaacgccctctaatctatcatctggatgttgctgctatgtatccaaatattattttaaccaatagactccagccaccatccatagttacagatgtggactgcacagcatgtgatttcaatcgtcctggaaaaaattgcctcagaaagcttgaatgggtctggcgaggagagacctacatggcaaaaaagaatgactattatcacataaagaggcaaattgaatcagagctgattcaatctggtggcattgcatcgtcaaagccttttcttgacctctcaaaaccagaacatttacttaaattgaaggatcgtttgaagaaatactgccaaaaggcgcacaaaagagttgttgataaaccaattactgaagtcagagaagcgggaatatgcatgcgtgaaaattctttctatgtagacacagtgcgtagctttcgtgatagaagatatgaatacaaaggtcttaacaaaacatggaaaggaaaactcgcagaagcgaaagccagtggaaattctatgaaaattcaggaagcgcaggatatggttgttctatatgattctttgcaacttgctcacaaagctgggaagaagctaactatatcttatccctgtgtcatgcttaatgctgacgttgcaaggaacaacactaatgatcaatatcaaacattgaaagacccagtaaacaagacatatacaacacacagtgagtgttccattgagtttgaggttgatggaccttacaaggccatgatcttacctgcctctaaagaggaagggattctgataaagaagagatatgctgtcttcaatgaagatggcactttggcagaacttaaaggttttgaaatcaagcgtagaggtgagctgaagctcataaaagtttttcaggcggaggtatttgacaaatttcttcatggttcaactttggaggaatgctattctgctgttgcctctgttgctaaccggtggttggacctactggataatcaaggaattgatattgctgacagtgaattgcttgatttcatatcggagtcgagcacaatgagtaaatctttagttgactacggagagcagaagtcttgtgctgtaactacagcaaaaagacttgccgaatttcttggagattcgatggttaaagacaaaggactacattgccaatatattgttgctcgggagccacaaggcactccagtgagcgagcgtgctgttccggtagctatattcgagacagatcctgagatcgcaaagcattatttaaggaaatggtttagattctcctctgatgcaaacattcgatctattgttgattggtcttactacaagcaacgcttaagttcagctattcagaaaatcattacaattcctgcagcaatgcaaaagatctcaaatcctgttcctcgagttcttcatccagattggttacacaaaaaggtcagggagaaagatgatcgatttcggcagcgtaaactgcgtgatatcttcagtcccttggctaaagaagaggggctgcataacttgaataggactggagatatggaagatttattaatttcaaacaaggatttgaggaaaaatccttctcatggtttagacattgacaaagaaaacaatccaaatggagcatcagtgggatctggtttgaatattagtaaaaaacaacaaaactgtatgactgggttaaatgttccttgcacttcacaaatccaaaatgctgcttcttatgaaacagttgataagggtactgactatcaaggatggcttgatgctaagaaaagaaaatggaaatatgtccgtgaacaaaaaaaacgtcgaaggttgggtgctgccgccacttttgacgatcctaacgctttgctctcggccagacatgccaatcagctacctgtcaacagtcggaatagatctacatttttccagaaacaagaattggccctctttagatcacattggcagataatccagcttgcttcaagtacagtgcctggtcacttttttgcgtgggttgttgctgaagggattatgttcaagattcctattaatgtgcctagaactttttacctaaactcaaaggctcctgtcacagaagagtttccaggaaggcgtgtcaaaaagattctcccacatggtagaccttgtttcaaccttattgaggttgtaacaactgaagaacagttcagggctgaaggcaaaaaacttgcagctcatctagcagagccagatgttgagggaatatacgagacaaaaattccaccagagctcaatgctgttctccaaatcggatgtgtctgcaaagtggacaagtctgcaaaaagacgaagtatacaagatggatgggatctagccgagttgcaaatgaaaacaaccgccgagtgctcatatctggaacagacattttcatttttctatttataccacagcttgagtgaaggaagggctgtatatgtattttacttccccacgtctttccgaatacatgcagtgattgtcaatcctttccgtaacaaagaaatatctccgtcatttcttgaaaagcaatttggagatgcttgccaagcccttggttctgtccctgagaatctgtctttccatgtggactaccaaacatcaattgatgctggaagcaaatacgcacaaagaatgttacttgagtacaggcaacaacattctggacctgtcgtaggcatcatagagtgccctaagctccaagctataaaggtagctatacgagcacttgatgatttgccatgtgtaaccattcctagcaatgcacgtgacaacaactatcaggctcttggctggcaagcaacagctggccgaacaagtatgcagcgttgtgctgcatcaacccaatggttcaatgaacggatttcactcgctaaatatgcacatgtgccactgggtaattttgaactagactggcttctttttactgccgatgtattcttttcaagggcattgcgtgatcaacagcaggtactatggatatctgatgatggcattcctgatttaggaggcacttatgaaggagagacatgttttgctgatgaagtcattcagcctgcacttacttatcctggtgcatatagaagagtttctgttgagcttaagatccaccatttggcggttaatgctctcctaaagagtagtcaagtggacgaaatggaaggaggatcaatcggtgctaaagcaacttattcaaagatgcatttcagatgcagtgtcgtctggaaatgtatttgctgatgcaatattgcaacatctctaccgctggctttgcagcccacgatcgaaacttcatgatccagctctccatcgtcttcttcataatgtgatgaagaaagtctttgctctattgttggccgagttacgaaagctgggggctaatgttatttttgcaaacttttctaagataatcatagatactggaaaagtagatttgtcatctgcacatgcatattgtgacagcttattaaggaccttgcagacgagggacctcttcgagtggatagaattggaaccattgcacttttggcattccttactgttcatggatcagtataactatggcggaattcaagctaaaacacaaaacgtagactcttcagatggtgataatgatattgatattgtctcaagctggaacatggcagaagatttgcccaaagatacacaggatcattttgtcttaatcgtatcagaattcctatatattccgtggaaattcatgaaggaacaagtagctgctcaagctaccataagggatgatacctcatgcactccatctgtaacaatcatggctgctgagaatcttgagggccaggtgatagaacacctccgtgacaagattagcaattactttgcagacaagcttctaagaactgcgatgctgcattggagttcattaagcatatctgtgcagttcttgctcttgatcaaaatgttcagcatgatattttgagaatgaggaagaacctgttaaagttagttcgtgtaaaggagtttgctccagaagcacaattccaagacccatgcgcctcattcactctgccaaatgtgatctgcagctattgcaacgattgccgggacctggatctctgccgcgactcggcactccagggccaggagtggagatgcgcggtgccgcagtgcgggcagccgtaccaccgcgagcagatggagaacgcgcttctgcaggtggtccggcagcgagagaggctgtaccacctgcaggacctggtgtgcgtgcgctgcaggcaggtgaaggccgcccatctgtcggagcagtgttcctgcgggggctccttccggtgcaaggaggagccttcgtatttcctcagcaaaatgcgggtgttcctgaaggtggcggtgagccaaaagttcccgctcctgcaggactgcgtgcagtggattcttgaagccagatgacgcgggctgctacttcaacatagttcattagttcacctgatcgctaggttgtacaacgtgcacaggctgtagctccgaagagtgtataaacgggtgtatagcgctgccacagttcattgtagctctgccctgcttgcaaaaggttgttgttgtattgtagatattcaaaggtggatggcgagaaacgatagtaaccttggtatcgaaacatctggataactagccctctcgtatgtgattgctgggcatagactattctaagttatgatgtgggcatgtggttgcataagcggtttcgatgacgtgaatagaaatacacgcgtcggaccgtatgctgccagcctgccagtacactgaccttggccacgtcatactagttgtctgtttctgttgccaatcctacactgtattatctgcacaaaggaaaatgaaacggaggacgttgtgctttcgaggggccaggactcgttgggtggatgaagcacgcgtgcccggtgacctcagcctttaggcccccggtacgaattattgcatgagtaccatttgat

SEQ ID NO: 50335 - DNA, 7318 bp, Zea Mays
ccccaaccgccttcaacttttggcgcgcctttctccccttgccaaaacccaaatctagggttcactcttccccttccccggcgtgcaacggcagtccaaactatccaagcggccactgggccagcgcgtcttccattcccgctcaacggagcgcacctgccagcatgagcgggcggcggggtccagctgccacaggaggcggacggggaggcggaggcggaggcggcgggaactggcggcggagcgggtcggcgaaggcgaaggagcagcggctgcgcctgggcgcggaggagctcctcgagagccggctaggattcgcgccatacactgatggggagcggcgcctcggatggcttctcaccttttcaccgtcatcatgggaagacgaggacaccggaaaaatctacagctgtgttgacttatactttgtatcacaggatgggtctacgtttaaagtgaaatacaagtttcggccttacttttatgctgcgaccaaggacaagatggagttggaagttgaggcatatattaggcgacgttatgaaggggaaatttctgacatagaaataattgagaaagaggatttagatctgaaaaatcatctttctggcttgaagagaaaatacctgaagcttcagtttgacaccgtacaacaattaatgcgtgtaaggaatgaccttttacatgttgttgaaaagaacgaagaaaaaatagatgctgtggaggcatttgaatcaattcatggtgtaaaaagggtagaaaggccacaagattacataaattacatcattgatttgcgtgagtatgatgttccatatcatgttcgttttgctatagataatgatgtcagaagtggacagtggtacaatgttaatgtatctggttctgatgttttgcttcagagaagggaagacctgcttcagcgtgcagaagttcatgtctgtgcatttgatattgagaccacaaaactgcccctgaagtttccagatgctgaatacgacaacgtaatgatgatttcatacatgattgatgggcaaggatacctgataatcaacagagagtgcgttggagaagacattgatgatttggagtacacacctaaacccgaatttgaggggtattttagattggatctacttaaagcatggttttctcacatgcaagaggttaagcctggcatttatgttacatacaacggtgacttttttgactggccatttttagagaagagggctgcacaccatggaataaaaatgaatgaggagattggtttccaatgtgacaataaccagggcgagtgtcgggctaaattttcttgccatcttgactgttttgcttgggtgaagcgagacagttaccttccacaaggaagccaaggtctaaaggctgttacaaaagccaagctaggttacgatcctctggaggttaatccagaagatatggttcgctttgcaatggagcagccacagacaatggcttcgtattctgtatcagatgctgttgcaacatactatctatacatgacttatgtccatcctttcatcttttctcttgcaaccataatacctatgtcacctgatgaggtactgcggaaaggaagtgggacactttgtgaaatgctgctaatggttcaggcattcaaggctagtgtcatttgtcctaacaagcaccaagctgatcttgagaagttctacaataaccgtttattggaaagtgaaacctacattggtggtcacgttgagtgtcttgaaactggcgtctttagatctgatctccctacaaagttccaacttgaaccattagcatatgagcaactcattggaaatcttgatcgtgatctgcattatgtcattgctgtagaaggaaagttggatattgattctgtcacaaattatgatgaagtcaaggatgccatagagcaaaagcttgttgcattgcgtgatcacccaattcgcgaagaacgccctctaatctatcatctggatgttgctgctatgtatccaaatattattttaaccaatagactccagccaccatccatagttacagatgtggactgcacagcatgtgatttcaatcgtcctggaaaaaattgcctcagaaagcttgaatgggtctggcgaggagagacctacatggcaaaaaagaatgactattatcacataaagaggcaaattgaatcagagctgattcaatctggtggcattgcatcgtcaaagccttttcttgacctctcaaaaccagaacatttacttaaattgaaggatcgtttgaagaaatactgccaaaaggcgcacaaaagagttgttgataaaccaattactgaagtcagagaagcgggaatatgcatgcgtgaaaattctttctatgtagacacagtgcgtagctttcgtgatagaagatatgaatacaaaggtcttaacaaaacatggaaaggaaaactcgcagaagcgaaagccagtggaaattctatgaaaattcaggaagcgcaggatatggttgttctatatgattctttgcaacttgctcacaagtgcatattgaattctttttatggatatgttatgcgcaagggagcaagatggtactctatggaaatggctggtgttgtaacatatactggtgcaaagattatccaaaatgctcgattacttgtagaaaaaattggaaggccactggaactggatacagatggcatttggtgtgttttgcctggctcttttccagaaaactttactttcaagacaaaagctgggaagaagctaactatatcttatccctgtgtcatgcttaatgctgacgttgcaaggaacaacactaatgatcaatatcaaacattgaaagacccagtaaacaagacatatacaacacacagtgagtgttccattgagtttgaggttgatggaccttacaaggccatgatcttacctgcctctaaagaggaagggattctgataaagaagagatatgctgtcttcaatgaagatggcactttggcagaacttaaaggttttgaaatcaagcgtagaggtgagctgaagctcataaaagtttttcaggcggaggtatttgacaaatttcttcatggttcaactttggaggaatgctattctgctgttgcctctgttgctaaccggtggttggacctactggataatcaaggaattgatattgctgacagtgaattgcttgatttcatatcggagtcgagcacaatgagtaaatctttagttgactacggagagcagaagtcttgtgctgtaactacagcaaaaagacttgccgaatttcttggagattcgatggttaaagacaaaggactacattgccaatatattgttgctcgggagccacaaggcactccagtgagcgagcgtgctgttccggtagctatattcgagacagatcctgagatcgcaaagcattatttaaggaaatggtttagattctcctctgatgcaaacattcgatctattgttgattggtcttactacaagcaacgcttaagttcagctattcagaaaatcattacaattcctgcagcaatgcaaaagatctcaaatcctgttcctcgagttcttcatccagattggttacacaaaaaggtcagggagaaagatgatcgatttcggcagcgtaaactgcgtgatatcttcagtcccttggctaaagaagaggggctgcataacttgaataggactggagatatggaagatttattaatttcaaacaaggatttgaggaaaaatccttctcatggtttagacattgacaaagaaaacaatccaaatggagcatcagtgggatctggtttgaatattagtaaaaaacaacaaaactgtatgactgggttaaatgttccttgcacttcacaaatccaaaatgctgcttcttatgaaacagttgataagggtactgactatcaaggatggcttgatgctaagaaaagaaaatggaaatatgtccgtgaacaaaaaaaacgtcgaaggttgggtgctgccgccacttttgacgatcctaacgctttgctctcggccagacatgccaatcagctacctgtcaacagtcggaatagatctacatttttccagaaacaagaattggccctctttagatcacattggcagataatccagcttgcttcaagtacagtgcctggtcacttttttgcgtgggttgttgctgaagggattatgttcaagattcctattaatgtgcctagaactttttacctaaactcaaaggctcctgtcacagaagagtttccaggaaggcgtgtcaaaaagattctcccacatggtagaccttgtttcaaccttattgaggttgtaacaactgaagaacagttcagggctgaaggcaaaaaacttgcagctcatctagcagagccagatgttgagggaatatacgagacaaaaattccaccagagctcaatgctgttctccaaatcggatgtgtctgcaaagtggacaagtctgcaaaaagacgaagtatacaagatggatgggatctagccgagttgcaaatgaaaacaaccgccgagtgctcatatctggaacagacattttcatttttctatttataccacagcttgagtgaaggaagggctgtatatgtattttacttccccacgtctttccgaatacatgcagtgattgtcaatcctttccgtaacaaagaaatatctccgtcatttcttgaaaagcaatttggagatgcttgccaagcccttggttctgtccctgagaatctgtctttccatgtggactaccaaacatcaattgatgctggaagcaaatacgcacaaagaatgttacttgagtacaggcaacaacattctggacctgtcgtaggcatcatagagtgccctaagctccaagctataaaggtagctatacgagcacttgatgatttgccatgtgtaaccattcctagcaatgcacgtgacaacaactatcaggctcttggctggcaagcaacagctggccgaacaagtatgcagcgttgtgctgcatcaacccaatggttcaatgaacggatttcactcgctaaatatgcacatgtgccactgggtaattttgaactagactggcttctttttactgccgatgtattcttttcaagggcattgcgtgatcaacagcaggtactatggatatctgatgatggcattcctgatttaggaggcacttatgaaggagagacatgttttgctgatgaagtcattcagcctgcacttacttatcctggtgcatatagaagagtttctgttgagcttaagatccaccatttggcggttaatgctctcctaaagagtagtcaagtggacgaaatggaaggaggatcaatcggtagctttggaaacgacgtgcctccgggttcaaatgccactgaaactgactttgatgatgctagcttatgtatacctgctttccaggtgctaaagcaacttattcaaagatgcatttcagatgcagtgtcgtctggaaatgtatttgctgatgcaatattgcaacatctctaccgctggctttgcagcccacgatcgaaacttcatgatccagctctccatcgtcttcttcataatgtgatgaagaaagtctttgctctattgttggccgagttacgaaagctgggggctaatgttatttttgcaaacttttctaagataatcatagatactggaaaagtagatttgtcatctgcacatgcatattgtgacagcttattaaggaccttgcagacgagggacctcttcgagtggatagaattggaaccattgcacttttggcattccttactgttcatggatcagtataactatggcggaattcaagctaaaacacaaaacgtagactcttcagatggtgataatgatattgatattgtctcaagctggaacatggcagaagatttgcccaaagatacacaggatcattttgtcttaatcgtatcagaattcctatatattccgtggaaattcatgaaggaacaagtagctgctcaagctaccataagggatgatacctcatgcactccatctgtaacaatcatggctgctgagaatcttgagggccaggtgatagaacacctccgtgacaagattagcaattactttgcagacaagcttctaagaactgtaagtgatatacttcaccatttcaaagggaaaagcaaacatgagtcagatgaacctgcaaaatctgatcctcacacgcataaaggcgatgctgcattggagttcattaagcatatctgtgcagttcttgctcttgatcaaaatgttcagcatgatattttgagaatgaggaagaacctgttaaagttagttcgtgtaaaggagtttgctccagaagcacaattccaagacccatgcgcctcattcactctgccaaatgtgatctgcagctattgcaacgattgccgggacctggatctctgccgcgactcggcactccagggccaggagtggagatgcgcggtgccgcagtgcgggcagccgtaccaccgcgagcagatggagaacgcgcttctgcaggtggtccggcagcgagagaggctgtaccacctgcaggacctggtgtgcgtgcgctgcaggcaggtgaaggccgcccatctgtcggagcagtgttcctgcgggggctccttccggtgcaaggaggagccttcgtatttcctcagcaaaatgcgggtgttcctgaaggtggcggtgagccaaaagttcccgctcctgcaggactgcgtgcagtggattcttgaagccagatgacgcgggctgctacttcaacatagttcattagttcacctgatcgctaggttgtacaacgtgcacaggctgtagctccgaagagtgtataaacgggtgtatagcgctgccacagttcattgtagctctgccctgcttgcaaaaggttgttgttgtattgtagatattcaaaggtggatggcgagaaacgatagtaaccttggtatcgaaacatctggataactagccctctcgtatgtgattgctgggcatagactattctaagttatgatgtgggcatgtggttgcataagcggtttcgatgacgtgaatagaaatacacgcgtcggaccgtatgctgccagcctgccagtacactgaccttggccacgtcatactagttgtctgtttctgttgccaatcctacactgtattatctgcacaaaggaaaatgaaacggaggacgttgtgctttcgaggggccaggactcgttgggtggatgaagcacgcgtgcccggtgacctcagcctttaggcccccggtacgaattattgcatgagtaccatttgat

SEQ ID NO: 50336 - DNA, 7026 bp, Zea Mays
ccccaaccgccttcaacttttggcgcgcctttctccccttgccaaaacccaaatctagggttcactcttccccttccccggcgtgcaacggcagtccaaactatccaagcggccactgggccagcgcgtcttccattcccgctcaacggagcgcacctgccagcatgagcgggcggcggggtccagctgccacaggaggcggacggggaggcggaggcggaggcggcgggaactggcggcggagcgggtcggcgaaggcgaaggagcagcggctgcgcctgggcgcggaggagctcctcgagagccggctaggattcgcgccatacactgatggggagcggcgcctcggatggcttctcaccttttcaccgtcatcatgggaagacgaggacaccggaaaaatctacagctgtgttgacttatactttgtatcacaggatgggtctacgtttaaagtgaaatacaagtttcggccttacttttatgctgcgaccaaggacaagatggagttggaagttgaggcatatattaggcgacgttatgaaggggaaatttctgacatagaaataattgagaaagaggatttagatctgaaaaatcatctttctggcttgaagagaaaatacctgaagcttcagtttgacaccgtacaacaattaatgcgtgtaaggaatgaccttttacatgttgttgaaaagaacgaagaaaaaatagatgctgtggaggcatttgaatcaattcatggtgtaaaaagggtagaaaggccacaagattacataaattacatcattgatttgcgtgagtatgatgttccatatcatgttcgttttgctatagataatgatgtcagaagtggacagtggtacaatgttaatgtatctggttctgatgttttgcttcagagaagggaagacctgcttcagcgtgcagaagttcatgtctgtgcatttgatattgagaccacaaaactgcccctgaagtttccagatgctgaatacgacaacgtaatgatgatttcatacatgattgatgggcaaggatacctgataatcaacagagagtgcgttggagaagacattgatgatttggagtacacacctaaacccgaatttgaggggtattttagagttaagaatgttcaaactgagagaagagggctgcacaccatggaataaaaatgaatgaggagattggtttccaatgtgacaataaccagggcgagtgtcgggctaaattttcttgccatcttgactgttttgcttgggtgaagcgagacagttaccttccacaaggaagccaaggtctaaaggctgttacaaaagccaagctaggttacgatcctctggaggttaatccagaagatatggttcgctttgcaatggagcagccacagacaatggcttcgtattctgtatcagatgctgttgcaacatactatctatacatgacttatgtccatcctttcatcttttctcttgcaaccataatacctatgtcacctgatgaggtactgcggaaaggaagtgggacactttgtgaaatgctgctaatggttcaggcattcaaggctagtgtcatttgtcctaacaagcaccaagctgatcttgagaagttctacaataaccgtttattggaaagtgaaacctacattggtggtcacgttgagtgtcttgaaactggcgtctttagatctgatctccctacaaagttccaacttgaaccattagcatatgagcaactcattggaaatcttgatcgtgatctgcattatgtcattgctgtagaaggaaagttggatattgattctgtcacaaattatgatgaagtcaaggatgccatagagcaaaagcttgttgcattgcgtgatcacccaattcgcgaagaacgccctctaatctatcatctggatgttgctgctatgtatccaaatattattttaaccaatagactccagccaccatccatagttacagatgtggactgcacagcatgtgatttcaatcgtcctggaaaaaattgcctcagaaagcttgaatgggtctggcgaggagagacctacatggcaaaaaagaatgactattatcacataaagaggcaaattgaatcagagctgattcaatctggtggcattgcatcgtcaaagccttttcttgacctctcaaaaccagaacatttacttaaattgaaggatcgtttgaagaaatactgccaaaaggcgcacaaaagagttgttgataaaccaattactgaagtcagagaagcgggaatatgcatgcgtgaaaattctttctatgtagacacagtgcgtagctttcgtgatagaagatatgaatacaaaggtcttaacaaaacatggaaaggaaaactcgcagaagcgaaagccagtggaaattctatgaaaattcaggaagcgcaggatatggttgttctatatgattctttgcaacttgctcacaaagctgggaagaagctaactatatcttatccctgtgtcatgcttaatgctgacgttgcaaggaacaacactaatgatcaatatcaaacattgaaagacccagtaaacaagacatatacaacacacagtgagtgttccattgagtttgaggttgatggaccttacaaggccatgatcttacctgcctctaaagaggaagggattctgataaagaagagatatgctgtcttcaatgaagatggcactttggcagaacttaaaggttttgaaatcaagcgtagaggtgagctgaagctcataaaagtttttcaggcggaggtatttgacaaatttcttcatggttcaactttggaggaatgctattctgctgttgcctctgttgctaaccggtggttggacctactggataatcaaggaattgatattgctgacagtgaattgcttgatttcatatcggagtcgagcacaatgagtaaatctttagttgactacggagagcagaagtcttgtgctgtaactacagcaaaaagacttgccgaatttcttggagattcgatggttaaagacaaaggactacattgccaatatattgttgctcgggagccacaaggcactccagtgagcgagcgtgctgttccggtagctatattcgagacagatcctgagatcgcaaagcattatttaaggaaatggtttagattctcctctgatgcaaacattcgatctattgttgattggtcttactacaagcaacgcttaagttcagctattcagaaaatcattacaattcctgcagcaatgcaaaagatctcaaatcctgttcctcgagttcttcatccagattggttacacaaaaaggtcagggagaaagatgatcgatttcggcagcgtaaactgcgtgatatcttcagtcccttggctaaagaagaggggctgcataacttgaataggactggagatatggaagatttattaatttcaaacaaggatttgaggaaaaatccttctcatggtttagacattgacaaagaaaacaatccaaatggagcatcagtgggatctggtttgaatattagtaaaaaacaacaaaactgtatgactgggttaaatgttccttgcacttcacaaatccaaaatgctgcttcttatgaaacagttgataagggtactgactatcaaggatggcttgatgctaagaaaagaaaatggaaatatgtccgtgaacaaaaaaaacgtcgaaggttgggtgctgccgccacttttgacgatcctaacgctttgctctcggccagacatgccaatcagctacctgtcaacagtcggaatagatctacatttttccagaaacaagaattggccctctttagatcacattggcagataatccagcttgcttcaagtacagtgcctggtcacttttttgcgtgggttgttgctgaagggattatgttcaagattcctattaatgtgcctagaactttttacctaaactcaaaggctcctgtcacagaagagtttccaggaaggcgtgtcaaaaagattctcccacatggtagaccttgtttcaaccttattgaggttgtaacaactgaagaacagttcagggctgaaggcaaaaaacttgcagctcatctagcagagccagatgttgagggaatatacgagacaaaaattccaccagagctcaatgctgttctccaaatcggatgtgtctgcaaagtggacaagtctgcaaaaagacgaagtatacaagatggatgggatctagccgagttgcaaatgaaaacaaccgccgagtgctcatatctggaacagacattttcatttttctatttataccacagcttgagtgaaggaagggctgtatatgtattttacttccccacgtctttccgaatacatgcagtgattgtcaatcctttccgtaacaaagaaatatctccgtcatttcttgaaaagcaatttggagatgcttgccaagcccttggttctgtccctgagaatctgtctttccatgtggactaccaaacatcaattgatgctggaagcaaatacgcacaaagaatgttacttgagtacaggcaacaacattctggacctgtcgtaggcatcatagagtgccctaagctccaagctataaaggtagctatacgagcacttgatgatttgccatgtgtaaccattcctagcaatgcacgtgacaacaactatcaggctcttggctggcaagcaacagctggccgaacaagtatgcagcgttgtgctgcatcaacccaatggttcaatgaacggatttcactcgctaaatatgcacatgtgccactgggtaattttgaactagactggcttctttttactgccgatgtattcttttcaagggcattgcgtgatcaacagcaggtactatggatatctgatgatggcattcctgatttaggaggcacttatgaaggagagacatgttttgctgatgaagtcattcagcctgcacttacttatcctggtgcatatagaagagtttctgttgagcttaagatccaccatttggcggttaatgctctcctaaagagtagtcaagtggacgaaatggaaggaggatcaatcggtagctttggaaacgacgtgcctccgggttcaaatgccactgaaactgactttgatgatgctagcttatgtatacctgctttccaggtgctaaagcaacttattcaaagatgcatttcagatgcagtgtcgtctggaaatgtatttgctgatgcaatattgcaacatctctaccgctggctttgcagcccacgatcgaaacttcatgatccagctctccatcgtcttcttcataatgtgatgaagaaagtctttgctctattgttggccgagttacgaaagctgggggctaatgttatttttgcaaacttttctaagataatcatagatactggaaaagtagatttgtcatctgcacatgcatattgtgacagcttattaaggaccttgcagacgagggacctcttcgagtggatagaattggaaccattgcacttttggcattccttactgttcatggatcagtataactatggcggaattcaagctaaaacacaaaacgtagactcttcagatggtgataatgatattgatattgtctcaagctggaacatggcagaagatttgcccaaagatacacaggatcattttgtcttaatcgtatcagaattcctatatattccgtggaaattcatgaaggaacaagtagctgctcaagctaccataagggatgatacctcatgcactccatctgtaacaatcatggctgctgagaatcttgagggccaggtgatagaacacctccgtgacaagattagcaattactttgcagacaagcttctaagaactgtaagtgatatacttcaccatttcaaagggaaaagcaaacatgagtcagatgaacctgcaaaatctgatcctcacacgcataaaggcgatgctgcattggagttcattaagcatatctgtgcagttcttgctcttgatcaaaatgttcagcatgatattttgagaatgaggaagaacctgttaaagttagttcgtgtaaaggagtttgctccagaagcacaattccaagacccatgcgcctcattcactctgccaaatgtgatctgcagctattgcaacgattgccgggacctggatctctgccgcgactcggcactccagggccaggagtggagatgcgcggtgccgcagtgcgggcagccgtaccaccgcgagcagatggagaacgcgcttctgcaggtggtccggcagcgagagaggctgtaccacctgcaggacctggtgtgcgtgcgctgcaggcaggtgaaggccgcccatctgtcggagcagtgttcctgcgggggctccttccggtgcaaggaggagccttcgtatttcctcagcaaaatgcgggtgttcctgaaggtggcggtgagccaaaagttcccgctcctgcaggactgcgtgcagtggattcttgaagccagatgacgcgggctgctacttcaacatagttcattagttcacctgatcgctaggttgtacaacgtgcacaggctgtagctccgaagagtgtataaacgggtgtatagcgctgccacagttcattgtagctctgccctgcttgcaaaaggttgttgttgtattgtagatattcaaaggtggatggcgagaaacgatagtaaccttggtatcgaaacatctggataactagccctctcgtatgtgattgctgggcatagactattctaagttatgatgtgggcatgtggttgcataagcggtttcgatgacgtgaatagaaatacacgcgtcggaccgtatgctgccagcctgccagtacactgaccttggccacgtcatactagttgtctgtttctgttgccaatcctacactgtattatctgcacaaaggaaaatgaaacggaggacgttgtgctttcgaggggccaggactcgttgggtggatgaagcacgcgtgcccggtgacctcagcctttaggcccccggtacgaattattgcatgagtaccatttgat

SEQ ID NO: 50337 - DNA, 7333 bp, Zea Mays
ccgccttcaacttttggcgcgcctttctccccttgccaaaacccaaatctagggttcactcttccccttccccggcgtgcaacggcagtccaaactatccaagcggccactgggccagcgcgtcttccattcccgctcaacggagcgcacctgccagcatgagcgggcggcggggtccagctgccacaggaggcggacggggaggcggaggcggaggcggcgggaactggcggcggagcgggtcggcgaaggcgaaggagcagcggctgcgcctgggcgcggaggagctcctcgagagccggctaggattcgcgccatacactgatggggagcggcgcctcggatggcttctcaccttttcaccgtcatcatgggaagacgaggacaccggaaaaatctacagctgtgttgacttatactttgtatcacaggatgggtctacgtttaaagtgaaatacaagtttcggccttacttttatgctgcgaccaaggacaagatggagttggaagttgaggcatatattaggcgacgttatgaaggggaaatttctgacatagaaataattgagaaagaggatttagatctgaaaaatcatctttctggcttgaagagaaaatacctgaagcttcagtttgacaccgtacaacaattaatgcgtgtaaggaatgaccttttacatgttgttgaaaagaacgaagaaaaaatagatgctgtggaggcatttgaatcaattcatggtgtaaaaagggtagaaaggccacaagattacataaattacatcattgatttgcgtgagtatgatgttccatatcatgttcgttttgctatagataatgatgtcagaagtggacagtggtacaatgttaatgtatctggttctgatgttttgcttcagagaagggaagacctgcttcagcgtgcagaagttcatgtctgtgcatttgatattgagaccacaaaactgcccctgaagtttccagatgctgaatacgacaacgtaatgatgatttcatacatgattgatgggcaaggatacctgataatcaacagagagtgcgttggagaagacattgatgatttggagtacacacctaaacccgaatttgaggggtattttagagttaagaatgttcaaactgagttggatctacttaaagcatggttttctcacatgcaagaggttaagcctggcatttatgttacatacaacggtgacttttttgactggccatttttagagaagagggctgcacaccatggaataaaaatgaatgaggagattggtttccaatgtgacaataaccagggcgagtgtcgggctaaattttcttgccatcttgactgttttgcttgggtgaagcgagacagttaccttccacaaggaagccaaggtctaaaggctgttacaaaagccaagctaggttacgatcctctggaggttaatccagaagatatggttcgctttgcaatggagcagccacagacaatggcttcgtattctgtatcagatgctgttgcaacatactatctatacatgacttatgtccatcctttcatcttttctcttgcaaccataatacctatgtcacctgatgaggtactgcggaaaggaagtgggacactttgtgaaatgctgctaatggttcaggcattcaaggctagtgtcatttgtcctaacaagcaccaagctgatcttgagaagttctacaataaccgtttattggaaagtgaaacctacattggtggtcacgttgagtgtcttgaaactggcgtctttagatctgatctccctacaaagttccaacttgaaccattagcatatgagcaactcattggaaatcttgatcgtgatctgcattatgtcattgctgtagaaggaaagttggatattgattctgtcacaaattatgatgaagtcaaggatgccatagagcaaaagcttgttgcattgcgtgatcacccaattcgcgaagaacgccctctaatctatcatctggatgttgctgctatgtatccaaatattattttaaccaatagactccagccaccatccatagttacagatgtggactgcacagcatgtgatttcaatcgtcctggaaaaaattgcctcagaaagcttgaatgggtctggcgaggagagacctacatggcaaaaaagaatgactattatcacataaagaggcaaattgaatcagagctgattcaatctggtggcattgcatcgtcaaagccttttcttgacctctcaaaaccagaacatttacttaaattgaaggatcgtttgaagaaatactgccaaaaggcgcacaaaagagttgttgataaaccaattactgaagtcagagaagcgggaatatgcatgcgtgaaaattctttctatgtagacacagtgcgtagctttcgtgatagaagatatgaatacaaaggtcttaacaaaacatggaaaggaaaactcgcagaagcgaaagccagtggaaattctatgaaaattcaggaagcgcaggatatggttgttctatatgattctttgcaacttgctcacaagtgcatattgaattctttttatggatatgttatgcgcaagggagcaagatggtactctatggaaatggctggtgttgtaacatatactggtgcaaagattatccaaaatgctcgattacttgtagaaaaaattggaaggccactggaactggatacagatggcatttggtgtgttttgcctggctcttttccagaaaactttactttcaagacaaaagctgggaagaagctaactatatcttatccctgtgtcatgcttaatgctgacgttgcaaggaacaacactaatgatcaatatcaaacattgaaagacccagtaaacaagacatatacaacacacagtgagtgttccattgagtttgaggttgatggaccttacaaggccatgatcttacctgcctctaaagaggaagggattctgataaagaagagatatgctgtcttcaatgaagatggcactttggcagaacttaaaggttttgaaatcaagcgtagaggtgagctgaagctcataaaagtttttcaggcggaggtatttgacaaatttcttcatggttcaactttggaggaatgctattctgctgttgcctctgttgctaaccggtggttggacctactggataatcaaggaattgatattgctgacagtgaattgcttgatttcatatcggagtcgagcacaatgagtaaatctttagttgactacggagagcagaagtcttgtgctgtaactacagcaaaaagacttgccgaatttcttggagattcgatggttaaagacaaaggactacattgccaatatattgttgctcgggagccacaaggcactccagtgagcgagcgtgctgttccggtagctatattcgagacagatcctgagatcgcaaagcattatttaaggaaatggtttagattctcctctgatgcaaacattcgatctattgttgattggtcttactacaagcaacgcttaagttcagctattcagaaaatcattacaattcctgcagcaatgcaaaagatctcaaatcctgttcctcgagttcttcatccagattggttacacaaaaaggtcagggagaaagatgatcgatttcggcagcgtaaactgcgtgatatcttcagtcccttggctaaagaagaggggctgcataacttgaataggactggagatatggaagatttattaatttcaaacaaggatttgaggaaaaatccttctcatggtttagacattgacaaagaaaacaatccaaatggagcatcagtgggatctggtttgaatattagtaaaaaacaacaaaactgtatgactgggttaaatgttccttgcacttcacaaatccaaaatgctgcttcttatgaaacagttgataagggtactgactatcaaggatggcttgatgctaagaaaagaaaatggaaatatgtccgtgaacaaaaaaaacgtcgaaggttgggtgctgccgccacttttgacgatcctaacgctttgctctcggccagacatgccaatcagctacctgtcaacagtcggaatagatctacatttttccagaaacaagaattggccctctttagatcacattggcagataatccagcttgcttcaagtacagtgcctggtcacttttttgcgtgggttgttgctgaagggattatgttcaagattcctattaatgtgcctagaactttttacctaaactcaaaggctcctgtcacagaagagtttccaggaaggcgtgtcaaaaagattctcccacatggtagaccttgtttcaaccttattgaggttgtaacaactgaagaacagttcagggctgaaggcaaaaaacttgcagctcatctagcagagccagatgttgagggaatatacgagacaaaaattccaccagagctcaatgctgttctccaaatcggatgtgtctgcaaagtggacaagtctgcaaaaagacgaagtatacaagatggatgggatctagccgagttgcaaatgaaaacaaccgccgagtgctcatatctggaacagacattttcatttttctatttataccacagcttgagtgaaggaagggctgtatatgtattttacttccccacgtctttccgaatacatgcagtgattgtcaatcctttccgtaacaaagaaatatctccgtcatttcttgaaaagcaatttggagatgcttgccaagcccttggttctgtccctgagaatctgtctttccatgtggactaccaaacatcaattgatgctggaagcaaatacgcacaaagaatgttacttgagtacaggcaacaacattctggacctgtcgtaggcatcatagagtgccctaagctccaagctataaaggtagctatacgagcacttgatgatttgccatgtgtaaccattcctagcaatgcacgtgacaacaactatcaggctcttggctggcaagcaacagctggccgaacaagtatgcagcgttgtgctgcatcaacccaatggttcaatgaacggatttcactcgctaaatatgcacatgtgccactgggtaattttgaactagactggcttctttttactgccgatgtattcttttcaagggcattgcgtgatcaacagcaggtactatggatatctgatgatggcattcctgatttaggaggcacttatgaaggagagacatgttttgctgatgaagtcattcagcctgcacttacttatcctggtgcatatagaagagtttctgttgagcttaagatccaccatttggcggttaatgctctcctaaagagtagtcaagtggacgaaatggaaggaggatcaatcggtagctttggaaacgacgtgcctccgggttcaaatgccactgaaactgactttgatgatgctagcttatgtatacctgctttccaggtgctaaagcaacttattcaaagatgcatttcagatgcagtgtcgtctggaaatgtatttgctgatgcaatattgcaacatctctaccgctggctttgcagcccacgatcgaaacttcatgatccagctctccatcgtcttcttcataatgtgatgaagaaagtctttgctctattgttggccgagttacgaaagctgggggctaatgttatttttgcaaacttttctaagataatcatagatactggaaaagtagatttgtcatctgcacatgcatattgtgacagcttattaaggaccttgcagacgagggacctcttcgagtggatagaattggaaccattgcacttttggcattccttactgttcatggatcagtataactatggcggaattcaagctaaaacacaaaacgtagactcttcagatggtgataatgatattgatattgtctcaagctggaacatggcagaagatttgcccaaagatacacaggatcattttgtcttaatcgtatcagaattcctatatattccgtggaaattcatgaaggaacaagtagctgctcaagctaccataagggatgatacctcatgcactccatctgtaacaatcatggctgctgagaatcttgagggccaggtgatagaacacctccgtgacaagattagcaattactttgcagacaagcttctaagaactgtaagtgatatacttcaccatttcaaagggaaaagcaaacatgagtcagatgaacctgcaaaatctgatcctcacacgcataaaggcgatgctgcattggagttcattaagcatatctgtgcagttcttgctcttgatcaaaatgttcagcatgatattttgagaatgaggaagaacctgttaaagttagttcgtgtaaaggagtttgctccagaagcacaattccaagacccatgcgcctcattcactctgccaaatgtgatctgcagctattgcaacgattgccgggacctggatctctgccgcgactcggcactccagggccaggagtggagatgcgcggtgccgcagtgcgggcagccgtaccaccgcgagcagatggagaacgcgcttctgcaggtggtccggcagcgagagaggctgtaccacctgcaggacctggtgtgcgtgcgctgcaggcaggtgaaggccgcccatctgtcggagcagtgttcctgcgggggctccttccggtgcaaggaggagccttcgtatttcctcagcaaaatgcgggtgttcctgaaggtggcggtgagccaaaagttcccgctcctgcaggactgcgtgcagtggattcttgaagccagatgacgcgggctgctacttcaacatagttcattagttcacctgatcgctaggttgtacaacgtgcacaggctgtagctccgaagagtgtataaacgggtgtatagcgctgccacagttcattgtagctctgccctgcttgcaaaaggttgttgttgtattgtagatattcaaaggtggatggcgagaaacgatagtaaccttggtatcgaaacatctggataactagccctctcgtatgtgattgctgggcatagactattctaagttatgatgtgggcatgtggttgcataagcggtttcgatgacgtgaatagaaatacacgcgtcggaccgtatgctgccagcctgccagtacactgaccttggccacgtcatactagttgtctgtttctgttgccaatcctacactgtattatctgcacaaaggaaaatgaaacggaggacgttgtgctttcgaggggccaggactcgttgggtggatgaagcacgcgtgcccggtgacctcagcctttaggcccccggtacgaattattgcatgagtaccatttgat

SEQ ID NO: 50338 - DNA, 7084 bp, Zea Mays
atgagcgggcggcggggtccagctgccacaggaggcggacggggaggcggaggcggaggcggcgggaactggcggcggagcgggtcggcgaaggcgaaggagcagcggctgcgcctgggcgcggaggagctcctcgagagccggctaggattcgcgccatacactgatggggagcggcgcctcggatggcttctcaccttttcaccgtcatcatgggaagacgaggacaccggaaaaatctacagctgtgttgacttatactttgtatcacaggatgggtctacgtttaaagtgaaatacaagtttcggccttacttttatgctgcgaccaaggacaagatggagttggaagttgaggcatatattaggcgacgttatgaaggggaaatttctgacatagaaataattgagaaagaggatttagatctgaaaaatcatctttctggcttgaagagaaaatacctgaagcttcagtttgacaccgtacaacaattaatgcgtgtaaggaatgaccttttacatgttgttgaaaagaacgaagaaaaaatagatgctgtggaggcatttgaatcaattcatggtgtaaaaagggtagaaaggccacaagattacataaattacatcattgatttgcgtgagtatgatgttccatatcatgttcgttttgctatagataatgatgtcagaagtggacagtggtacaatgttaatgtatctggttctgatgttttgcttcagagaagggaagacctgcttcagcgtgcagaagttcatgtctgtgcatttgatattgagaccacaaaactgcccctgaagtttccagatgctgaatacgacaacgtaatgatgatttcatacatgattgatgggcaaggatacctgataatcaacagagagtgcgttggagaagacattgatgatttggagtacacacctaaacccgaatttgaggggtattttagagttaagaatgttcaaactgagttggatctacttaaagcatggttttctcacatgcaagaggttaagcctggcatttatgttacatacaacggtgacttttttgactggccatttttagagaagagggctgcacaccatggaataaaaatgaatgaggagattggtttccaatgtgacaataaccagggcgagtgtcgggctaaattttcttgccatcttgactgttttgcttgggtgaagcgagacagttaccttccacaaggaagccaaggtctaaaggctgttacaaaagccaagctaggttacgatcctctggaggttaatccagaagatatggttcgctttgcaatggagcagccacagacaatggcttcgtattctgtatcagatgctgttgcaacatactatctatacatgacttatgtccatcctttcatcttttctcttgcaaccataatacctatgtcacctgatgaggtactgcggaaaggaagtgggacactttgtgaaatgctgctaatggttcaggcattcaaggctagtgtcatttgtcctaacaagcaccaagctgatcttgagaagttctacaataaccgtttattggaaagtgaaacctacattggtggtcacgttgagtgtcttgaaactggcgtctttagatctgatctccctacaaagttccaacttgaaccattagcatatgagcaactcattggaaatcttgatcgtgatctgcattatgtcattgctgtagaaggaaagttggatattgattctgtcacaaattatgatgaagtcaaggatgccatagagcaaaagcttgttgcattgcgtgatcacccaattcgcgaagaacgccctctaatctatcatctggatgttgctgctatgtatccaaatattattttaaccaatagactccagccaccatccatagttacagatgtggactgcacagcatgtgatttcaatcgtcctggaaaaaattgcctcagaaagcttgaatgggtctggcgaggagagacctacatggcaaaaaagaatgactattatcacataaagaggcaaattgaatcagagctgattcaatctggtggcattgcatcgtcaaagccttttcttgacctctcaaaaccagaacatttacttaaattgaaggatcgtttgaagaaatactgccaaaaggcgcacaaaagagttgttgataaaccaattactgaagtcagagaagcgggaatatgcatgcgtgaaaattctttctatgtagacacagtgcgtagctttcgtgatagaagatatgaatacaaaggtcttaacaaaacatggaaaggaaaactcgcagaagcgaaagccagtggaaattctatgaaaattcaggaagcgcaggatatggttgttctatatgattctttgcaacttgctcacaagtgcatattgaattctttttatggatatgttatgcgcaagggagcaagatggtactctatggaaatggctggtgttgtaacatatactggtgcaaagattatccaaaatgctcgattacttgtagaaaaaattggaaggccactggaactggatacagatggcatttggtgtgttttgcctggctcttttccagaaaactttactttcaagacaaaagctgggaagaagctaactatatcttatccctgtgtcatgcttaatgctgacgttgcaaggaacaacactaatgatcaatatcaaacattgaaagacccagtaaacaagacatatacaacacacagtgagtgttccattgagtttgaggttgatggaccttacaaggccatgatcttacctgcctctaaagaggaagggattctgataaagaagagatatgctgtcttcaatgaagatggcactttggcagaacttaaaggttttgaaatcaagcgtagaggtgagctgaagctcataaaagtttttcagtgatcaatgaacaaagacagcaagtcttttatgtttagagaagagatcgagtcttatatatggaggcataaactaactgaggcggaggtatttgacaaatttcttcatggttcaactttggaggaatgctattctgctgttgcctctgttgctaaccggtggttggacctactggataatcaaggaattgatattgctgacagtgaattgcttgatttcatatcggagtcgagcacaatgagtaaatctttagttgactacggagagcagaagtcttgtgctgtaactacagcaaaaagacttgccgaatttcttggagattcgatggttaaagacaaaggactacattgccaatatattgttgctcgggagccacaaggcactccagtgagcgagcgtgctgttccggtagctatattcgagacagatcctgagatcgcaaagcattatttaaggaaatggtttagattctcctctgatgcaaacattcgatctattgttgattggtcttactacaagcaacgcttaagttcagctattcagaaaatcattacaattcctgcagcaatgcaaaagatctcaaatcctgttcctcgagttcttcatccagattggttacacaaaaaggtcagggagaaagatgatcgatttcggcagcgtaaactgcgtgatatcttcagtcccttggctaaagaagaggggctgcataacttgaataggactggagatatggaagatttattaatttcaaacaaggatttgaggaaaaatccttctcatggtttagacattgacaaagaaaacaatccaaatggagcatcagtgggatctggtttgaatattagtaaaaaacaacaaaactgtatgactgggttaaatgttccttgcacttcacaaatccaaaatgctgcttcttatgaaacagttgataagggtactgactatcaaggatggcttgatgctaagaaaagaaaatggaaatatgtccgtgaacaaaaaaaacgtcgaaggttgggtgctgccgccacttttgacgatcctaacgctttgctctcggccagacatgccaatcagctacctgtcaacagtcggaatagatctacatttttccagaaacaagaattggccctctttagatcacattggcagataatccagcttgcttcaagtacagtgcctggtcacttttttgcgtgggttgttgctgaagggattatgttcaagattcctattaatgtgcctagaactttttacctaaactcaaaggctcctgtcacagaagagtttccaggaaggcgtgtcaaaaagattctcccacatggtagaccttgtttcaaccttattgaggttgtaacaactgaagaacagttcagggctgaaggcaaaaaacttgcagctcatctagcagagccagatgttgagggaatatacgagacaaaaattccaccagagctcaatgctgttctccaaatcggatgtgtctgcaaagtggacaagtctgcaaaaagacgaagtatacaagatggatgggatctagccgagttgcaaatgaaaacaaccgccgagtgctcatatctggaacagacattttcatttttctatttataccacaggtggactaccaaacatcaattgatgctggaagcaaatacgcacaaagaatgttacttgagtacaggcaacaacattctggacctgtcgtaggcatcatagagtgccctaagctccaagctataaaggtagctatacgagcacttgatgatttgccatgtgtaaccattcctagcaatgcacgtgacaacaactatcaggctcttggctggcaagcaacagctggccgaacaagtatgcagcgttgtgctgcatcaacccaatggttcaatgaacggatttcactcgctaaatatgcacatgtgccactgggtaattttgaactagactggcttctttttactgccgatgtattcttttcaagggcattgcgtgatcaacagcaggtactatggatatctgatgatggcattcctgatttaggaggcacttatgaaggagagacatgttttgctgatgaagtcattcagcctgcacttacttatcctggtgcatatagaagagtttctgttgagcttaagatccaccatttggcggttaatgctctcctaaagagtagtcaagtggacgaaatggaaggaggatcaatcggtagctttggaaacgacgtgcctccgggttcaaatgccactgaaactgactttgatgatgctagcttatgtatacctgctttccaggtgctaaagcaacttattcaaagatgcatttcagatgcagtgtcgtctggaaatgtatttgctgatgcaatattgcaacatctctaccgctggctttgcagcccacgatcgaaacttcatgatccagctctccatcgtcttcttcataatgtgatgaagaaagtctttgctctattgttggccgagttacgaaagctgggggctaatgttatttttgcaaacttttctaagataatcatagatactggaaaagtagatttgtcatctgcacatgcatattgtgacagcttattaaggaccttgcagacgagggacctcttcgagtggatagaattggaaccattgcacttttggcattccttactgttcatggatcagtataactatggcggaattcaagctaaaacacaaaacgtagactcttcagatggtgataatgatattgatattgtctcaagctggaacatggcagaagatttgcccaaagatacacaggatcattttgtcttaatcgtatcagaattcctatatattccgtggaaattcatgaaggaacaagtagctgctcaagctaccataagggatgatacctcatgcactccatctgtaacaatcatggctgctgagaatcttgagggccaggtgatagaacacctccgtgacaagattagcaattactttgcagacaagcttctaagaactgtaagtgatatacttcaccatttcaaagggaaaagcaaacatgagtcagatgaacctgcaaaatctgatcctcacacgcataaaggcgatgctgcattggagttcattaagcatatctgtgcagttcttgctcttgatcaaaatgttcagcatgatattttgagaatgaggaagaacctgttaaagttagttcgtgtaaaggagtttgctccagaagcacaattccaagacccatgcgcctcattcactctgccaaatgtgatctgcagctattgcaacgattgccgggacctggatctctgccgcgactcggcactccagggccaggagtggagatgcgcggtgccgcagtgcgggcagccgtaccaccgcgagcagatggagaacgcgcttctgcaggtggtccggcagcgagagaggctgtaccacctgcaggacctggtgtgcgtgcgctgcaggcaggtgaaggccgcccatctgtcggagcagtgttcctgcgggggctccttccggtgcaaggaggagccttcgtatttcctcagcaaaatgcgggtgttcctgaaggtggcggtgagccaaaagttcccgctcctgcaggactgcgtgcagtggattcttgaagccagatgacgcgggctgctacttcaacatagttcattagttcacctgatcgctaggttgtacaacgtgcacaggctgtagctccgaagagtgtataaacgggtgtatagcgctgccacagttcattgtagctctgccctgcttgcaaaaggttgttgttgtattgtagatattcaaaggtggatggcgagaaacgatagtaaccttggtatcgaaacatctggataactagccctctcgtatgtgattgctgggcatagactattctaagttatgatgtgggcatgtggttgcataagcggtttcgatgacgtgaatagaaatacacgcgtcggaccgtatgctgccagcctgccagtacactgaccttggccacgtcatactagttgtctgtttctgttgccaatcctacactgtattatctgcacaaaggaaaatgaaacggaggacgttgtgctttcgaggggccaggactcgttgggtggatgaagcacgcgtgcccggtgacctcagcctttaggcccccggtacgaattattgcatgagtaccatttgat

SEQ ID NO: 50339 - DNA, 5993 bp, Zea Mays
aactccttcatgacattctttctttatctcacttctagcggagtaacattctgctatgtttcttattgcgttggagaagacattgatgatttggagtacacacctaaacccgaatttgaggggtattttagagttaagaatgttcaaactgaggagattggtttccaatgtgacaataaccagggcgagtgtcgggctaaattttcttgccatcttgactgttttgcttgggtgaagcgagacagttaccttccacaaggaagccaaggtctaaaggctgttacaaaagccaagctaggttacgatcctctggaggttaatccagaagatatggttcgctttgcaatggagcagccacagacaatggcttcgtattctgtatcagatgctgttgcaacatactatctatacatgacttatgtccatcctttcatcttttctcttgcaaccataatacctatgtcacctgatgaggtactgcggaaaggaagtgggacactttgtgaaatgctgctaatggttcaggcattcaaggctagtgtcatttgtcctaacaagcaccaagctgatcttgagaagttctacaataaccgtttattggaaagtgaaacctacattggtggtcacgttgagtgtcttgaaactggcgtctttagatctgatctccctacaaagttccaacttgaaccattagcatatgagcaactcattggaaatcttgatcgtgatctgcattatgtcattgctgtagaaggaaagttggatattgattctgtcacaaattatgatgaagtcaaggatgccatagagcaaaagcttgttgcattgcgtgatcacccaattcgcgaagaacgccctctaatctatcatctggatgttgctgctatgtatccaaatattattttaaccaatagactccagccaccatccatagttacagatgtggactgcacagcatgtgatttcaatcgtcctggaaaaaattgcctcagaaagcttgaatgggtctggcgaggagagacctacatggcaaaaaagaatgactattatcacataaagaggcaaattgaatcagagctgattcaatctggtggcattgcatcgtcaaagccttttcttgacctctcaaaaccagaacatttacttaaattgaaggatcgtttgaagaaatactgccaaaaggcgcacaaaagagttgttgataaaccaattactgaagtcagagaagcgggaatatgcatgcgtgaaaattctttctatgtagacacagtgcgtagctttcgtgatagaagatatgaatacaaaggtcttaacaaaacatggaaaggaaaactcgcagaagcgaaagccagtggaaattctatgaaaattcaggaagcgcaggatatggttgttctatatgattctttgcaacttgctcacaaagctgggaagaagctaactatatcttatccctgtgtcatgcttaatgctgacgttgcaaggaacaacactaatgatcaatatcaaacattgaaagacccagtaaacaagacatatacaacacacagtgagtgttccattgagtttgaggttgatggaccttacaaggccatgatcttacctgcctctaaagaggaagggattctgataaagaagagatatgctgtcttcaatgaagatggcactttggcagaacttaaaggttttgaaatcaagcgtagaggtgagctgaagctcataaaagtttttcaggcggaggtatttgacaaatttcttcatggttcaactttggaggaatgctattctgctgttgcctctgttgctaaccggtggttggacctactggataatcaaggaattgatattgctgacagtgaattgcttgatttcatatcggagtcgagcacaatgagtaaatctttagttgactacggagagcagaagtcttgtgctgtaactacagcaaaaagacttgccgaatttcttggagattcgatggttaaagacaaaggactacattgccaatatattgttgctcgggagccacaaggcactccagtgagcgagcgtgctgttccggtagctatattcgagacagatcctgagatcgcaaagcattatttaaggaaatggtttagattctcctctgatgcaaacattcgatctattgttgattggtcttactacaagcaacgcttaagttcagctattcagaaaatcattacaattcctgcagcaatgcaaaagatctcaaatcctgttcctcgagttcttcatccagattggttacacaaaaaggtcagggagaaagatgatcgatttcggcagcgtaaactgcgtgatatcttcagtcccttggctaaagaagaggggctgcataacttgaataggactggagatatggaagatttattaatttcaaacaaggatttgaggaaaaatccttctcatggtttagacattgacaaagaaaacaatccaaatggagcatcagtgggatctggtttgaatattagtaaaaaacaacaaaactgtatgactgggttaaatgttccttgcacttcacaaatccaaaatgctgcttcttatgaaacagttgataagggtactgactatcaaggatggcttgatgctaagaaaagaaaatggaaatatgtccgtgaacaaaaaaaacgtcgaaggttgggtgctgccgccacttttgacgatcctaacgctttgctctcggccagacatgccaatcagctacctgtcaacagtcggaatagatctacatttttccagaaacaagaattggccctctttagatcacattggcagataatccagcttgcttcaagtacagtgcctggtcacttttttgcgtgggttgttgctgaagggattatgttcaagattcctattaatgtgcctagaactttttacctaaactcaaaggctcctgtcacagaagagtttccaggaaggcgtgtcaaaaagattctcccacatggtagaccttgtttcaaccttattgaggttgtaacaactgaagaacagttcagggctgaaggcaaaaaacttgcagctcatctagcagagccagatgttgagggaatatacgagacaaaaattccaccagagctcaatgctgttctccaaatcggatgtgtctgcaaagtggacaagtctgcaaaaagacgaagtatacaagatggatgggatctagccgagttgcaaatgaaaacaaccgccgagtgctcatatctggaacagacattttcatttttctatttataccacagcttgagtgaaggaagggctgtatatgtattttacttccccacgtctttccgaatacatgcagtgattgtcaatcctttccgtaacaaagaaatatctccgtcatttcttgaaaagcaatttggagatgcttgccaagcccttggttctgtccctgagaatctgtctttccatgtggactaccaaacatcaattgatgctggaagcaaatacgcacaaagaatgttacttgagtacaggcaacaacattctggacctgtcgtaggcatcatagagtgccctaagctccaagctataaaggtagctatacgagcacttgatgatttgccatgtgtaaccattcctagcaatgcacgtgacaacaactatcaggctcttggctggcaagcaacagctggccgaacaagtatgcagcgttgtgctgcatcaacccaatggttcaatgaacggatttcactcgctaaatatgcacatgtgccactgggtaattttgaactagactggcttctttttactgccgatgtattcttttcaagggcattgcgtgatcaacagcaggtactatggatatctgatgatggcattcctgatttaggaggcacttatgaaggagagacatgttttgctgatgaagtcattcagcctgcacttacttatcctggtgcatatagaagagtttctgttgagcttaagatccaccatttggcggttaatgctctcctaaagagtagtcaagtggacgaaatggaaggaggatcaatcggtagctttggaaacgacgtgcctccgggttcaaatgccactgaaactgactttgatgatgctagcttatgtatacctgctttccaggtgctaaagcaacttattcaaagatgcatttcagatgcagtgtcgtctggaaatgtatttgctgatgcaatattgcaacatctctaccgctggctttgcagcccacgatcgaaacttcatgatccagctctccatcgtcttcttcataatgtgatgaagaaagtctttgctctattgttggccgagttacgaaagctgggggctaatgttatttttgcaaacttttctaagataatcatagatactggaaaagtagatttgtcatctgcacatgcatattgtgacagcttattaaggaccttgcagacgagggacctcttcgagtggatagaattggaaccattgcacttttggcattccttactgttcatggatcagtataactatggcggaattcaagctaaaacacaaaacgtagactcttcagatggtgataatgatattgatattgtctcaagctggaacatggcagaagatttgcccaaagatacacaggatcattttgtcttaatcgtatcagaattcctatatattccgtggaaattcatgaaggaacaagtagctgctcaagctaccataagggatgatacctcatgcactccatctgtaacaatcatggctgctgagaatcttgagggccaggtgatagaacacctccgtgacaagattagcaattactttgcagacaagcttctaagaactgtaagtgatatacttcaccatttcaaagggaaaagcaaacatgagtcagatgaacctgcaaaatctgatcctcacacgcataaaggcgatgctgcattggagttcattaagcatatctgtgcagttcttgctcttgatcaaaatgttcagcatgatattttgagaatgaggaagaacctgttaaagttagttcgtgtaaaggagtttgctccagaagcacaattccaagacccatgcgcctcattcactctgccaaatgtgatctgcagctattgcaacgattgccgggacctggatctctgccgcgactcggcactccagggccaggagtggagatgcgcggtgccgcagtgcgggcagccgtaccaccgcgagcagatggagaacgcgcttctgcaggtggtccggcagcgagagaggctgtaccacctgcaggacctggtgtgcgtgcgctgcaggcaggtgaaggccgcccatctgtcggagcagtgttcctgcgggggctccttccggtgcaaggaggagccttcgtatttcctcagcaaaatgcgggtgttcctgaaggtggcggtgagccaaaagttcccgctcctgcaggactgcgtgcagtggattcttgaagccagatgacgcgggctgctacttcaacatagttcattagttcacctgatcgctaggttgtacaacgtgcacaggctgtagctccgaagagtgtataaacgggtgtatagcgctgccacagttcattgtagctctgccctgcttgcaaaaggttgttgttgtattgtagatattcaaaggtggatggcgagaaacgatagtaaccttggtatcgaaacatctggataactagccctctcgtatgtgattgctgggcatagactattctaagttatgatgtgggcatgtggttgcataagcggtttcgatgacgtgaatagaaatacacgcgtcggaccgtatgctgccagcctgccagtacactgaccttggccacgtcatactagttgtctgtttctgttgccaatcctacactgtattatctgcacaaaggaaaatgaaacggaggacgttgtgctttcgaggggccaggactcgttgggtggatgaagcacgcgtgcccggtgacctcagcctttaggcccccggtacgaattattgcatgagtaccatttgat

SEQ ID NO: 50340 - DNA, 928 bp, Zea Mays
acagtaaacacgatgtatatacatgcatacatacatcgttaattaaacgatttgaagacaacatgagagttacaaagacacaaaaacaaatctatggagtacacttgcgatgaaaaggcaaagagagtgaaacaaacgttaacagacggcaaagtaaagcaagcagcaagcacttgaacaaagttctgcgcgcgcccggatctctagtctacttatgatgacgccgaagaagaagaggaagaaaagagtgttcaagctcaagctcaaccataaccgacgatacgaccagaccattttagaccaccgtcgccggccgggcgtccaagcagctagcaatgcatgcaagcagcgtcttggacaggatgttcttcttctcgcctccttccttcattgatgttacgattacgaacgaacttacgacagtaattaaacggcgtagtaactgagccgcaaacaagctaagctagcacaactgcacaaggcaaacactatcaacccagtaggtttttctgttcaacaagctaacgaccacagcagatcaaaagactatcaacccggcctattagctagccgcggtcgtaggcctggtgcaggcgagacatgtccacggtggccttgggcgcgaggaggctgtgcttcttggtgctattgctggtgttattcatggctcttggaggacggctggaggcatattctgcggctacaggttcagcgtgcaggaggcaggagcaggcgctggactcgacgatggattgaccgctgagctgagctgaattgaaagaacgcagagcagcagctagctagccgagagagagtgcgtgtacgtgcagcagaggcacactagctagagacaaagaagggtttggcttcctcgtggtcgaggaggagatgggatcaggagagctagagccgatcgatcgaggaggaa

SEQ ID NO: 50341 - DNA, 343 bp, Zea Mays
ctaccgctgacagacgattcaaccgtccgccaaatccaaacgcaccgatccattccagaccatggcgacgaccaaggaccccgcgaccaccggcggcgagcccgccatcggcattccctaccacccggcggcggaggcccaggggcactattactacgcgccgccgccgaacccctacgcggcggggatgccgccgcccaacgcgatctacgccggcgcgcccaagggggtgccgctccagcagaccatgttccgcgacacgcccgcgcccttccactgccaggcctgcggtgaagccgccgtctcctccgtccgttaatggtggcataactgaaagtcgtcg

SEQ ID NO: 50342 - DNA, 2584 bp, Zea Mays
gtcggaatttgccaaagcagagcagtaggcaaatggggcgcgcgattaaacaaaaagcagcggcggcggcggcggcggctagtataagtagcggcggccgcgtggtgcgaacaaaagattaattcatcggagctccatccctccctccctccctcgcaccctcctcttagcctagccccaagtgggcagctaaattctagccctccgtactcgaggctccaaggcaaacaggggatcaggaaacaggaagagggtgcgggcgtgcagcagaagcaagggcgctttccacatccacagctagcctcttgcgcttacggaaagatcagaggggcaggggcggagcgtctgttgcaaggacgcgcacgagactcgtaagggagaaaccaaacaagtagcagggagctcaatcgccgcggaggggatcgatgaagtcgccgctgcggaggttcaggggcttcggccaccaccacaccaaggaggagcggaggggccaccaccagccgccgccggccaagctcgacgagctcgtctgcgccgcccaggaggtggaggacatgagagactgctacgatggcttgattgcagctgcggccgccacaacaaatagtgtatatgagttttccgaggctcttgaggaactgggaggctgcttcctcgcaaaaactgcactaaatggcgatgacgatgatgatagcggtagtagagtgctcatgaagctggggaaggcccaatttgaattacaaaaacttgttgatacctatcgctcaaatatcatttatactatcacaaccccatcagagtctcttctcaaggagctacagactgtcgaggaaatgaagcagcaatgcgacatgaaaagagagacatatgaagctatgagggcatcctatacacaaaaaggaaggtcaaggcattccaaaactgaaacatactctgcagaacaactgcaaagcgctctcgctgagtaccaagaagacgcagcgctgttcatatttcgcttaaagtcattgaggcaagggcaattccatagccttttaacacaggcttctcggcatcatgccgctcagttaagctttttcaggagagggttgaactgtcttgaggcactcgaacctcatgtaaaggcaatagctgagaaacagcacatcgactaccagttcagtggtcttgaggatgatgcatctgacaacgatgattacagctcctaccaggatgattgcagtgacgatggagagctcagtttcgactatgaaataaacgacaaggatcaatattttgttgcttcaagtggttcaatggatttagacaaaagagatgtgacgaattccccgcagccagtaaaagaaagcatgcaggaaggggtcaaacaaaccaagggaaatgttataactccgcgagtgaagccagagatcaacacacactcagcacccattctggcaggcaacttaccggatccgtccgagagatcttggcaaacgaagccatcttcagccaaactttcgtacaagcttccaatgccagttgatgacaaggatcccagatctgcaggtgctcagagaccacatcattcacagcagctggagagtaagcctcgtgtctcagcgaatccgtggcattcgtctccactgacgaaagacttcaggccgggtggccacgtgaaaacgccaccaagtgcggagggggcctcggcgttctcccagccggtctctgatttcaagaagatgaagaggcagttctattctggtccaatggcaagcggaccagggttaagcatgccatcttcgctgaacgatcgcagatcatccgcggcacaagcacagcatcttgtgatgccaggaaatttgcaaggcctcttctggcagccgtcatctgcgtccccaaaagttccccccaagatgttggggcggcatccaacgaaatcaccaaggatcagcgagctgcacgagctgcctaggcctcctccagccagcgtggagtccctcaggccttctggtttggtcggctactctggtcctctggtatccaagcgtcagactcagatccctgcagccacagcccgtgtgtcgccgacagcgtcacgaaccccctcgccgcttccaccgccgcctgctaccctgactcgcagctactccataccatcaaatagccagaggataccgatcgtcaccgcggacagattgttggaggctagaaatagcagggacggcagcgatatttattcgccgccacttacccctttgtcactgactgatttgtcccagcagcaaggaacgaaaactactgcaggtggcacaaggatgaagggggccttatgacataaatcaaccaaatgcagactgatcttagttgattttgttcatattcattatatattgtttcattcaccgtatgtattacaaatgaaaagggcggaaaagtgcaagaacattgaacctctggttcagatctctgatagcgtcaagatgaaagggctgtttcctcagttccgttttgtttcgtttttggatgaattttccatttcttgacactacatgatttcgttccagattgtatgggtggagagaaatgaaaccctgtacaaaat

SEQ ID NO: 50343 - DNA, 2566 bp, Zea Mays
catccctccctccctccctcgcaccctcctcttagcctagccccaagtgggcagctaaattctagccctccgtactcgaggctccaaggcaaacaggggatcaggaaacaggaagagggtgcgggcgtgcagcagaagcaagggcgctttccacatccacagctagcctcttgcgcttacggaaagatcagaggggcaggggcggagcgtctgttgcaaggacgcgcacgagactcgtaagggagaaaccaaacaagtagcagggagctcaatcgccgcggaggggatcgatgaagtcgccgctgcggaggttcaggggcttcggccaccaccacaccaaggaggagcggaggggccaccaccagccgccgccggccaagctcgacgagctcgtctgcgccgcccaggaggtggaggacatgagagactgctacgatggcttgattgcagctgcggccgccacaacaaatagtgtatatgagttttccgaggctcttgaggaactgggaggctgcttcctcgcaaaaactgcactaaatggcgatgacgatgatgatagcggtagtagagtgctcatgaagctggggaaggcccaatttgaattacaaaaacttgttgatacctatcgctcaaatatcatttatactatcacaaccccatcagagtctcttctcaaggagctacagactgtcgaggaaatgaagcagcaatgcgacatgaaaagagagacatatgaagctatgagggcatcctatacacaaaaaggaaggtcaaggcattccaaaactgaaacatactctgcagaacaactgcaaagcgctctcgctgagtaccaagaagacgcagcgctgttcatatttcgcttaaagtcattgaggcaagggcaattccatagccttttaacacaggcttctcggcatcatgccgctcagttaagctttttcaggagagggttgaactgtcttgaggcactcgaacctcatgtaaaggcaatagctgagaaacagcacatcgactaccagttcagtggtcttgaggatgatgcatctgacaacgatgattacagctcctaccaggatgattgcagtgacgatggagagctcagtttcgactatgaaataaacgacaaggatcaatattttgttgcttcaagtggttcaatggatacaaaagagatgtgacgaattccccgcagccagtaaaagaaagcatgcaggaaggggtcaaacaaaccaagggaaatgttataactccgcgagtgaagccagagatcaacacacactcagcacccattctggcaggcaacttaccggatccgtccgagagatcttggcaaacgaagccatcttcagccaaactttcgtacaagcttccaatgccagttgatgacaaggatcccagatctgcaggtgctcagagaccacatcattcacagcagctggagagtaagcctcgtgtctcagcgaatccgtggcattcgtctccactgacgaaagacttcaggccgggtggccacgtgaaaacgccaccaagtgcggagggggcctcggcgttctcccagccggtctctgatttcaagaagatgaagaggcagttctattctggtccaatggcaagcggaccagggttaagcatgccatcttcgctgaacgatcgcagatcatccgcggcacaagcacagcatcttgtgatgccaggaaatttgcaaggcctcttctggcagccgtcatctgcgtccccaaaagttccccccaagatgttggggcggcatccaacgaaatcaccaaggatcagcgagctgcacgagctgcctaggcctcctccagccagcgtggagtccctcaggccttctggtttggtcggctactctggtcctctggtatccaagcgtcagactcagatccctgcagccacagcccgtgtgtcgccgacagcgtcacgaaccccctcgccgcttccaccgccgcctgctaccctgactcgcagctactccataccatcaaatagccagaggataccgatcgtcaccgcggacagattgttggaggctagaaatagcagggacggcagcgatatttattcgccgccacttacccctttgtcactgactgatttgtcccagcagcaaggaacgaaaactactgcaggtggcacaaggatgaagggggccttatgacataaatcaaccaaatgcagactgatcttagttgattttgtaagtagtgatgtattttaggttcatattcatgatattcttttattcatcgtctgtattacaaatgaaaaggacggaaaagtaatatatacttttcttacacagtagtgatgtattgtaggttcatattcattatatattgtttcattcaccgtatgtattacaaatgaaaagggcggaaaagtgcaagaacattgaacctctggttcagatctctgatagcgtcaagatgaaagggctgtttcctcagttccgttttgtttcgtttttggatgaattttccatttcttgacactacatgatttcgttccagattgtatgggtggagagaaatgaaaccctgtacaaaat

SEQ ID NO: 50344 - DNA, 2278 bp, Zea Mays
atccctccctccctccctcgcaccctcctcttagcctagccccaagtgggcagctaaattctagccctccgtactcgaggctccaaggcaaacaggggatcaggaaacaggaagagggtgcgggcgtgcagcagaagcaagggcgctttccacatccacagctagcctcttgcgcttacggaaagatcagaggggcaggggcggagcgtctgttgcaaggacgcgcacgagactcgtaagggagaaaccaaacaagtagcagggagctcaatcgccgcggaggggatcgatgaagtcgccgctgcggaggttcaggggcttcggccaccaccacaccaaggaggagcggaggggccaccaccagccgccgccggccaagctcgacgagctcgtctgcgccgcccaggaggtggaggacatgagagactgctacgatggcttgattgcagctgcggccgccacaacaaatagtgtatatgagttttccgaggctcttgaggaactgggaggctgcttcctcgcaaaaactgcactaaatggcgatgacgatgatgatagcggtagtagagtgctcatgaagctggggaaggcccaatttgaattacaaaaacttgttgatacctatcgctcaaatatcatttatactatcacaaccccatcagagtctcttctcaaggagctacagactgtcgaggaaatgaagcagcaatgcgacatgaaaagagagacatatgaagctatgagggcatcctatacacaaaaaggaaggtcaaggcattccaaaactgaaacatactctgcagaacaactgcaaagcgctctcgctgagtaccaagaagacgcagcgctgttcatatttcgcttaaagtcattgaggcaagggcaattccatagccttttaacacaggcttctcggcatcatgccgctcagttaagctttttcaggagagggttgaactgtcttgaggcactcgaacctcatgtaaaggcaatagctgagaaacagcacatcgactaccagttcagtggtcttgaggatgatgcatctgacaacgatgattacagctcctaccaggatgattgcagtgacgatggagagctcagtttcgactatgaaataaacgacaaggatcaatattttgttgcttcaagtggttcaatggatttagacaaaagagatgtgacgaattccccgcagccagtaaaagaaagcatgcaggaaggggtcaaacaaaccaagggaaatgttataactccgcgagtgaagccagagatcaacacacactcagcacccattctggcaggcaacttaccggatccgtccgagagatcttggcaaacgaagccatcttcagccaaactttcgtacaagcttccaatgccagttgatgacaaggatcccagatctgcaggtgctcagagaccacatcattcacagcagctggagagtaagcctcgtgtctcagcgaatccgtggcattcgtctccactgacgaaagacttcaggccgggtggccacgtgaaaacgcctcctccagccagcgtggagtccctcaggccttctggtttggtcggctactctggtcctctggtatccaagcgtcagactcagatccctgcagccacagcccgtgtgtcgccgacagcgtcacgaaccccctcgccgcttccaccgccgcctgctaccctgactcgcagctactccataccatcaaatagccagaggataccgatcgtcaccgcggacagattgttggaggctagaaatagcagggacggcagcgatatttattcgccgccacttacccctttgtcactgactgatttgtcccagcagcaaggaacgaaaactactgcaggtggcacaaggatgaagggggccttatgacataaatcaaccaaatgcagactgatcttagttgattttgtaagtagtgatgtattttaggttcatattcatgatattcttttattcatcgtctgtattacaaatgaaaaggacggaaaagtaatatatacttttcttacacagtagtgatgtattgtaggttcatattcattatatattgtttcattcaccgtatgtattacaaatgaaaagggcggaaaagtgcaagaacattgaacctctggttcagatctctgatagcgtcaagatgaaagggctgtttcctcagttccgttttgtttcgtttttggatgaattttccatttcttgacactacatgatttcgttccagattgtatgggtggagagaaatgaaaccctgtacaaaat

SEQ ID NO: 50345 - DNA, 2234 bp, Zea Mays
ctccctcgcaccctcctcttagcctagccccaagtgggcagctaaattctagccctccgtactcgaggctccaaggcaaacaggggatcaggaaacaggaagagggtgcgggcgtgcagcagaagcaagggcgctttccacatccacagctagcctcttgcgcttacggaaagatcagaggggcaggggcggagcgtctgttgcaaggacgcgcacgagactcgtaagggagaaaccaaacaagtagcagggagctcaatcgccgcggaggggatcgatgaagtcgccgctgcggaggttcaggggcttcggccaccaccacaccaaggaggagcggaggggccaccaccagccgccgccggccaagctcgacgagctcgtctgcgccgcccaggaggtggaggacatgagagactgctacgatggcttgattgcagctgcggccgccacaacaaatagtgtatatgagttttccgaggctcttgaggaactgggaggctgcttcctcgcaaaaactgcactaaatggcgatgacgatgatgatagcggtagtagagtgctcatgaagctggggaaggcccaatttgaattacaaaaacttgttgatacctatcgctcaaatatcatttatactatcacaaccccatcagagtctcttctcaaggagctacagactgtcgaggaaatgaagcagcaatgcgacatgaaaagagagacatatgaagctatgagggcatcctatacacaaaaaggaaggtcaaggcattccaaaactgaaacatactctgcagaacaactgcaaagcgctctcgctgagtaccaagaagacgcagcgctgttcatatttcgcttaaagtcattgaggcaagggcaattccatagccttttaacacaggcttctcggcatcatgccgctcagttaagctttttcaggagagggttgaactgtcttgaggcactcgaacctcatgtaaaggcaatagctgagaaacagcacatcgactaccagttcagtggtcttgaggatgatgcatctgacaacgatgattacagctcctaccaggatgattgcagtgacgatggagagctcagtttcgactatgaaataaacgacaaggatcaatattttgttgcttcaagtggttcaatggatttagacaaaagagatgtgacgaattccccgcagccagtaaaagaaagcatgcaggaaggggtcaaacaaaccaagggaaatgttataactccgcgagtgaagccagagatcaacacacactcagcacccattctggcaggcaacttaccggatccgtccgagagatcttggcaaacgaagccatcttcagccaaactttcgtacaagcttccaatgccagttgatgacaaggatcccagatctgcaggtgctcagagaccacatcattcacagcagctggagagtaagcctcgtgtctcagcgaatccgtggcattcgtctccactgacgaaagacttcagccagcgtggagtccctcaggccttctggtttggtcggctactctggtcctctggtatccaagcgtcagactcagatccctgcagccacagcccgtgtgtcgccgacagcgtcacgaaccccctcgccgcttccaccgccgcctgctaccctgactcgcagctactccataccatcaaatagccagaggataccgatcgtcaccgcggacagattgttggaggctagaaatagcagggacggcagcgatatttattcgccgccacttacccctttgtcactgactgatttgtcccagcagcaaggaacgaaaactactgcaggtggcacaaggatgaagggggccttatgacataaatcaaccaaatgcagactgatcttagttgattttgtaagtagtgatgtattttaggttcatattcatgatattcttttattcatcgtctgtattacaaatgaaaaggacggaaaagtaatatatacttttcttacacagtagtgatgtattgtaggttcatattcattatatattgtttcattcaccgtatgtattacaaatgaaaagggcggaaaagtgcaagaacattgaacctctggttcagatctctgatagcgtcaagatgaaagggctgtttcctcagttccgttttgtttcgtttttggatgaattttccatttcttgacactacatgatttcgttccagattgtatgggtggagagaaatgaaaccctgtacaaaat

SEQ ID NO: 50346 - DNA, 1922 bp, Zea Mays
tggaaataaagcactcagcccttccattgaagagggtctagcaaactgaaatgaagcagcaatgcgacatgaaaagagagacatatgaagctatgagggcatcctatacacaaaaaggaaggtcaaggcattccaaaactgaaacatactctgcagaacaactgcaaagcgctctcgctgagtaccaagaagacgcagcgctgttcatatttcgcttaaagtcattgaggcaagggcaattccatagccttttaacacaggcttctcggcatcatgccgctcagttaagctttttcaggagagggttgaactgtcttgaggcactcgaacctcatgtaaaggcaatagctgagaaacagcacatcgactaccagttcagtggtcttgaggatgatgcatctgacaacgatgattacagctcctaccaggatgattgcagtgacgatggagagctcagtttcgactatgaaataaacgacaaggatcaatattttgttgcttcaagtggttcaatggatttagacaaaagagatgtgacgaattccccgcagccagtaaaagaaagcatgcaggaaggggtcaaacaaaccaagggaaatgttataactccgcgagtgaagccagagatcaacacacactcagcacccattctggcaggcaacttaccggatccgtccgagagatcttggcaaacgaagccatcttcagccaaactttcgtacaagcttccaatgccagttgatgacaaggatcccagatctgcaggtgctcagagaccacatcattcacagcagctggagagtaagcctcgtgtctcagcgaatccgtggcattcgtctccactgacgaaagacttcaggccgggtggccacgtgaaaacgccaccaagtgcggagggggcctcggcgttctcccagccggtctctgatttcaagaagatgaagaggcagttctattctggtccaatggcaagcggaccagggttaagcatgccatcttcgctgaacgatcgcagatcatccgcggcacaagcacagcatcttgtgatgccaggaaatttgcaaggcctcttctggcagccgtcatctgcgtccccaaaagttccccccaagatgttggggcggcatccaacgaaatcaccaaggatcagcgagctgcacgagctgcctaggcctcctccagccagcgtggagtccctcaggccttctggtttggtcggctactctggtcctctggtatccaagcgtcagactcagatccctgcagccacagcccgtgtgtcgccgacagcgtcacgaaccccctcgccgcttccaccgccgcctgctaccctgactcgcagctactccataccatcaaatagccagaggataccgatcgtcaccgcggacagattgttggaggctagaaatagcagggacggcagcgatatttattcgccgccacttacccctttgtcactgactgatttgtcccagcagcaaggaacgaaaactactgcaggtggcacaaggatgaagggggccttatgacataaatcaaccaaatgcagactgatcttagttgattttgtaagtagtgatgtattttaggttcatattcatgatattcttttattcatcgtctgtattacaaatgaaaaggacggaaaagtaatatatacttttcttacacagtagtgatgtattgtaggttcatattcattatatattgtttcattcaccgtatgtattacaaatgaaaagggcggaaaagtgcaagaacattgaacctctggttcagatctctgatagcgtcaagatgaaagggctgtttcctcagttccgttttgtttcgtttttggatgaattttccatttcttgacactacatgatttcgttccagattgtatgggtggagagaaatgaaaccctgtacaaaat

SEQ ID NO: 50347 - DNA, 911 bp, Zea Mays
cttctccagccgcttcgtcggtccgcggtctcttctgtccaccctgctcagccgataacaagataaaaaaaaggaacttagccttagatcagctggtgatagatggtttgggtgaatgggtatacatcccccaacttctaggtgaaatgatagtttcaatcaaacatattctgtggccacaggacatttcagagttgctcagccaaaagagagagaaaaagagagtgccagggcgagccatcatcccagattgtcagaaaaataaagaaccagaaaacgaaatcagcacaatgttctatccatatgcgccacctgcagcagttctgtagaaatggctaatggtgaggacatccaacctcttgtctgtgacaatggcaccagaatggtcaaggctggttttgccggcgatgatgcaccaagggctgtattccctagcatcgttgggcgtcctcgtcacaccggtgtcatggtagggatggggcagaaggatgcatatgttggtgatgaggcacagtccaagagaggtattctcacgctcaagtacccgatcgagcacggtattgtaagcaactgggatgacatggagaaaatctggcatcacactttctacaatgagctccgtgttgccctagaggagcaccctgtgttgctcactaaggctcctttgaacccaaaggccaacagggagaagatgacccagattatgttcgagactttcaatgttcctgccatggagaagatgacccagaggagcaccctctcttgactttgttaacttaatatgcaatatccaatatggcatgattgattttgaagagttctctgctgcagccattagtgtatatcaaatggaaggcctggagacctggtaagaacatgctcaacaagcatttgaattgtttgacaaggag

SEQ ID NO: 50348 - DNA, 1122 bp, Zea Mays
cttctgtccaccctgctcagccgcactttgcagataacaagataaaaaaaaggaacttagccttagatcagctggtgatagatggtttgggtgaatgggtatacatcccccaacttctaggtttgactcctcccgactcgaattttaatacctatttctgtttatttaaaatgagacctagagggtgtttgtttgggattataatctggacagattataatcccaaacaaacatcccccttgttcttcatagattggtcaagttctttttttttaagctcaatgagaggttcccaaatggccaaattccaacctagtcattactttcaaagaaagcacagtgtctgcaggtgaaatgatagtttcaatcaaacatattctgtggccacaggacatttcagagttgctcagccaaaagagagagaaaaagagagtgccagggcgagccatcatcccagattgtcagaaaaataaagaaccagaaaacgaaatcagcacaatgcagttctatccatatgcgccacctgcagcagttctgtagaaatggctaatggtgaggacatccaacctcttgtctgtgacaatggcaccagaatggtcaaggctggttttgccggcgatgatgcaccaagggctgtattccctagcatcgttgggcgtcctcgtcacaccggtgtcatggtagggatggggcagaaggatgcatatgttggtgatgaggcacagtccaagagaggtattctcacgctcaagtacccgatcgagcacggtattgtaagcaactgggatgacatggagaaaatctggcatcacactttctacaatgagctccgtgttgccctagaggagcaccctgtgttgctcactaaggctcctttgaacccaaaggccaacagggagaagatgacccagattatgttcgagactttcaatgttcctgccatggagaagatgacccagaggagcaccctctcttgactttgttaacttaatatgcaatatccaatatggcatgattgattttgaagagttctctgctgcagccattagtgtatatcaaatggaaggcctggagacctggtaagaacatgctcaacaagcatttgaattgtttgacaaggag

SEQ ID NO: 50349 - DNA, 3892 bp, Zea Mays
gtaggtagttgctgctgtgctgttcccccccgtctgtccctgagaggcccgcggcgtctccgcttcgcctcaccacccaccacctcctcctcgccggtacccctcgccggagccagcgagcttccggcgaagaaatccggcgggcacaccacacgggggcggagcaggggggaaggggtccggcgccggaatgggggcaagcggccgggtgctcaacgccgtcgtcgctggtgtcgcgtcgctctagggttaggatgccatctcaagtcatggatccgaggcgccacctctcccagttcagcaatccaaccgtggctgcgtcctccttctctgaggagcagtttcgccttcccacagagaggcaggtcggattttggaagcaggagtcgctgcatcacattggaagcaagtcagttgcatcttctccaattgaaaagccccaacccattgggacaaaaactgtgggtcgggtagaaccacaaccatacaagctgagagaccagaagactgcatttagccttgagcacaagacttttggtcaagagagacatgttaacctaccaccatctctgtggagagctgatcaagaccctaacctccaatctgatccatctttatttcccgatggaaggaggactagtccaaatgaggcctacaacgagaatgggcttttctcaagctccctatcagaaatttttgacagaaaattgggactgagatccatggatgtgcgtctacgccagccagttcaaaaggttgatctaactcatgtagatgatgagccctttgagttaacagaggaaatcgaggcgcaaataataggaaacatacttcctgatgatgatgacctactatcagatgttcttgatgttgggtacacagcccatgctaacatgggtgatgatgtcgatgatgatatattctacactggaggcgggatggaactggaaaccgatgaaaataaaaaaaatacagaacttaatggagctaatgatggtcttgggttgctaaatggcacaatgaatggtgaacatccatatggggaacacccttcaagaactctttttgtccgaaacattaatagcagcgttgaggattctgaattaaaactcctatttgaaaattatggagaaatcagcaacctttacactgcctgcaaacatcgtggttttgtgatgatatcttactatgacataagatcagcatggaatgccatgagggcacttcaaaacaagccactcagacgtagaaaacttgacatacattactccattccgaaggacaatccttcggagaaggatattaaccaggggatgcttgttgtatttaatgttgacccctctataacaaacaatgatatccatcagatatttagcgaatatggtgacataaaagagattcgcgatgcaccgcaaaagggccatcacaaaattatagaattttatgatgtcagagcagccgaaggtgcagctcgtgctttaaacaggagtgatcttgctggcaagaaaataaaactggagactggccgtctgagtggtgctagacgttcaacacagcacatgtccaaggagttggggcaggaagaatttggtgtatgcaaactgggcagtccaagcacaaatagcccttcattgccttcattgggttcatctaatatagcagcaatgacatcttgtggacgtgaaaatgggagtatgcatggtttgcattctggacttctcacatcaatgagcccgttcagagaggcttcatttctgggtctatcatctaccctaccacagagcctgtcctctcccattggaattgcttctgctgcaactcatagtaaccaggctccccttggtgagctcagccactctcttagtcggatgaatgggcatgtgaattatggttttcaaggcttgggtgctattcatccccattctcttcctgatgttcacaatggagcaaataatggcaccccttacaatctgaacaccatcacacctgttggtgtcaataagaactcaagaacagctgaagcagttgacagcagacatcttcataaagtgggttctggcaatctcaatgggcactcatttgatcgtgccggtgaaggagccatgggattttcaagaagtggaagcggtcataactgtggtcaccagttaatgtggaataattcaaataacttccacggtcatcccaattctcctgtgctgtggcaaaatcccggatcatttgtaaataatgtaccgtctcgccccccagcacaaatgcatggagttccaagagcaccatcacacatgattgagaatgttcttccaatgcatcatcatcatgtgggctctgcgccagcaatcaatccgtcactttgggacaggcggcatggctatgcaggggacttgacagaagcatcaagttttcatcctggcagtgttgggagcatgggatttcctggtagccctcagcttcatggtctggagctaaatagcatattttctcacactggtgggagtcgcatggatccaactgtgtcttcagctcagatcagcgcaccatctcaacagagaggtcctatgttccatggaaggaatcctatggtcccccttccttcatttgattcacctggtgagcggatgagaagccggagaaatgattcaggtgttaaccagtctgataataagcggcagtatgagcttgatgttgaccgcataatgcggggggaagactcacgaactacactgatgataaagaatatcccaaataagtatacctccaagatgctcttggctgctattgatgaaagtcataagggcacttatgattttatttacttgccaattgattttaagaataaatgtaatgtcggctatgctttcatcaacatgaccaatcctcagcatatcattccgttttatcagagttttaatggtaaaaagtgggagaagtttaacagtgagaaggtggcatcacttgcttatgccagaatccaagggaaaacagccctgattgctcatttccagaactctagtttgatgaatgaggacaaacgctgccgccccatacttttccactcagatggtcctaatgcaggagatcaggaacctttccccatgggttcaaacatccgagccaggtctgggagatcccggacttcttcgggtgaagaaaatcaccatgacatccagacagtcttgaccaacggtgacacttcttccaatggagctgacaattcaggtcccaccaaggatactgagtagctgaactgcagcttgctgcatcgctaaccacaaaggcccaaacttaggctgctgcagaagttttgtctctggcgggaagctatatgcaagagggtggtaccggttcgttccccagaatctatgtgcttgttaacctgaaggccgagaaaggcgaaaaggcgcagggagagcctccagattttggtcgctgtaagaattaaccccatgttgtacagctggtcccagtaatttgtgctgaggggagagtgaaggagtcatttgatcagtttttagtggtggtgtgtggagaggaagagtcttgcctgcttttcctttttgaactttcttttgtgccttcacctgtgttacattttgagtcgagggctcctcttaaattgtgtgcagaggggctcgattttgttaccccagaacaaggcgcatgtgcgtcggcgtcgtcttctgccaccgtatctatcgaccttatgtacatcttcatctatatatagtatgagttttgatgtcatctatttcttggatgtctcacaaggttatttatttgtatctacgtgtctgttatgcttgtggtgtgtaaagcctctgtgaatcttatgcttggttgcttactatgtgagcatgaatgcaagctgtgagcgtgtaatccttgttcaaat

SEQ ID NO: 50350 - DNA, 4122 bp, Zea Mays
gtaggtagttgctgctgtgctgttcccccccgtctgtccctgagaggcccgcggcgtctccgcttcgcctcaccacccaccacctcctcctcgccggtacccctcgccggagccagcgagcttccggcgaagaaatccggcgggcacaccacacgggggcggagcaggggggaaggggtccggcgccggaatgggggcaagcggccgggtgctcaacgccgtcgtcgctggtgtcgcgtcgctctagggttaggtaggtgtccgtagctttctccttcgctccccctccctcccctttgccgcccggcgtcgcattggggtcccgtgccgaccgccaggccgcgtgatccacccgtgctcgagctcggagaggctcccggttgcgtggcatggggccatctcttccgcctgctgccgctgactgggaattcggcaccatttcttcgctctgaggagtagtaggtggcagcagtcgccgatctggatgccatctcaagtcatggatccgaggcgccacctctcccagttcagcaatccaaccgtggctgcgtcctccttctctgaggagcagtttcgccttcccacagagaggcaggtcggattttggaagcaggagtcgctgcatcacattggaagcaagtcagttgcatcttctccaattgaaaagccccaacccattgggacaaaaactgtgggtcgggtagaaccacaaccatacaagctgagagaccagaagactgcatttagccttgagcacaagacttttggtcaagagagacatgttaacctaccaccatctctgtggagagctgatcaagaccctaacctccaatctgatccatctttatttcccgatggaaggaggactagtccaaatgaggcctacaacgagaatgggcttttctcaagctccctatcagaaatttttgacagaaaattgggactgagatccatggatgtgcgtctacgccagccagttcaaaaggttgatctaactcatgtagatgatgagccctttgagttaacagaggaaatcgaggcgcaaataataggaaacatacttcctgatgatgatgacctactatcagatgttcttgatgttgggtacacagcccatgctaacatgggtgatgatgtcgatgatgatatattctacactggaggcgggatggaactggaaaccgatgaaaataaaaaaaatacagaacttaatggagctaatgatggtcttgggttgctaaatggcacaatgaatggtgaacatccatatggggaacacccttcaagaactctttttgtccgaaacattaatagcagcgttgaggattctgaattaaaactcctatttgaaaattatggagaaatcagcaacctttacactgcctgcaaacatcgtggttttgtgatgatatcttactatgacataagatcagcatggaatgccatgagggcacttcaaaacaagccactcagacgtagaaaacttgacatacattactccattccgaaggacaatccttcggagaaggatattaaccaggggatgcttgttgtatttaatgttgacccctctataacaaacaatgatatccatcagatatttagcgaatatggtgacataaaagagattcgcgatgcaccgcaaaagggccatcacaaaattatagaattttatgatgtcagagcagccgaaggtgcagctcgtgctttaaacaggagtgatcttgctggcaagaaaataaaactggagactggccgtctgagtggtgctagacgttcaacacagcacatgtccaaggagttggggcaggaagaatttggtgtatgcaaactgggcagtccaagcacaaatagcccttcattgccttcattgggttcatctaatatagcagcaatgacatcttgtggacgtgaaaatgggagtatgcatggtttgcattctggacttctcacatcaatgagcccgttcagagaggcttcatttctgggtctatcatctaccctaccacagagcctgtcctctcccattggaattgcttctgctgcaactcatagtaaccaggctccccttggtgagctcagccactctcttagtcggatgaatgggcatgtgaattatggttttcaaggcttgggtgctattcatccccattctcttcctgatgttcacaatggagcaaataatggcaccccttacaatctgaacaccatcacacctgttggtgtcaataagaactcaagaacagctgaagcagttgacagcagacatcttcataaagtgggttctggcaatctcaatgggcactcatttgatcgtgccggtgaaggagccatgggattttcaagaagtggaagcggtcataactgtggtcaccagttaatgtggaataattcaaataacttccacggtcatcccaattctcctgtgctgtggcaaaatcccggatcatttgtaaataatgtaccgtctcgccccccagcacaaatgcatggagttccaagagcaccatcacacatgattgagaatgttcttccaatgcatcatcatcatgtgggctctgcgccagcaatcaatccgtcactttgggacaggcggcatggctatgcaggggacttgacagaagcatcaagttttcatcctggcagtgttgggagcatgggatttcctggtagccctcagcttcatggtctggagctaaatagcatattttctcacactggtgggagtcgcatggatccaactgtgtcttcagctcagatcagcgcaccatctcaacagagaggtcctatgttccatggaaggaatcctatggtcccccttccttcatttgattcacctggtgagcggatgagaagccggagaaatgattcaggtgttaaccagtctgataataagcggcagtatgagcttgatgttgaccgcataatgcggggggaagactcacgaactacactgatgataaagaatatcccaaataagtatacctccaagatgctcttggctgctattgatgaaagtcataagggcacttatgattttatttacttgccaattgattttaagaataaatgtaatgtcggctatgctttcatcaacatgaccaatcctcagcatatcattccgttttatcagagttttaatggtaaaaagtgggagaagtttaacagtgagaaggtggcatcacttgcttatgccagaatccaagggaaaacagccctgattgctcatttccagaactctagtttgatgaatgaggacaaacgctgccgccccatacttttccactcagatggtcctaatgcaggagatcaggaacctttccccatgggttcaaacatccgagccaggtctgggagatcccggacttcttcgggtgaagaaaatcaccatgacatccagacagtcttgaccaacggtgacacttcttccaatggagctgacaattcaggtcccaccaaggatactgagtagctgaactgcagcttgctgcatcgctaaccacaaaggcccaaacttaggctgctgcagaagttttgtctctggcgggaagctatatgcaagagggtggtaccggttcgttccccagaatctatgtgcttgttaacctgaaggccgagaaaggcgaaaaggcgcagggagagcctccagattttggtcgctgtaagaattaaccccatgttgtacagctggtcccagtaatttgtgctgaggggagagtgaaggagtcatttgatcagtttttagtggtggtgtgtggagaggaagagtcttgcctgcttttcctttttgaactttcttttgtgccttcacctgtgttacattttgagtcgagggctcctcttaaattgtgtgcagaggggctcgattttgttaccccagaacaaggcgcatgtgcgtcggcgtcgtcttctgccaccgtatctatcgaccttatgtacatcttcatctatatatagtatgagttttgatgtcatctatttcttggatgtctcacaaggttatttatttgtatctacgtgtctgttatgcttgtggtgtgtaaagcctctgtgaatcttatgcttggttgcttactatgtgagcatgaatgcaagctgtgagcgtgtaatccttgttcaaat

SEQ ID NO: 50351 - DNA, 1394 bp, Zea Mays
tttcttttttctttccatcgaattcctcgtcaccaacacgcacgcggcctctgcctccgcgtctccatcctgaggctccgaatcgatctcccttccccaccaaaccggagcacttcggaggccggacccggcgagaagcgaccgaccgcagccagctcacgtctccctcttcatccaccatgctgagggtcgcgggcaggcgcctctcgtccgctctcgcctggcgccccgccgccgccgcctcaggctcccggggccctctcgccggtacactacccggccgcgacgacgacgacacacgcgactgcagggcgcgtttcgccatcgaatctcccttcttcgccgctgccagagagactcttgctccaagaaaccaggatgtgggcttatctgagctcccagcaactgtggcagctgtgaagaatccaagtggaaaaatcgtgtatgatgagtataaccatgagcgctacccacctggagaccccagcaagcgtgcatttgcctactttgtgctgagtggtgggaggttcatttacgcatctttgctgcgacttctcgtcttaaaatttgtcctaagcatgtcagcaagtaaggatgttctcgcgcttgcctcacttgaggttgacctctcaagcattgagcctggaaccacggtgacggtgaagtggcgtggcaagccggtcttcataaggcggaggacagaggatgatatcaagttggccaacagtgttgacgtcgcatccctccgccacccagagcaagatgcagagcgcgtcaagaaccccgaatggctggtcgtcattggggtctgcactcacctgggctgcatcccgctccctaatgcaggagactttggtggctggttctgcccgtgccacggctcgcactacgacatttctggtaggatccgcaagggcccggcacccttcaacctggaagtgccgacatacagcttcttggaagagaacaagcttctcatcggctgagattgctgttagtgttgttcgtgtcatcgtgtggccctgtcgtttttgtttgatcaacaacttcaccttttctcttgcctgggttagggcatacctttgtgggctgtttctgagtgcagtgttgttgctagcacctgacactaatgaataacctgatgctacataaaggatactgttaattgttgtcaaatttggttctgtttttttttcctgacagcaatgaacaatcttctgctactgaaagtatactgttaattgttttcaagtttgcttgtgttttttccctgatctcaagagggattgattatgtaacacatttttaactgctacggtccatttttatctcgtcggttagtaggaatgtaatcggatattgatgaatattactcgttccatatttgtttttcg

SEQ ID NO: 50352 - DNA, 1602 bp, Zea Mays
ctgctctccagtgctttggttgccaatcgcctgtttcccgtctcgcatcagcgtcagcagctgggaggcttgttaactcccttttattaccgctcgggtcgggtggggataagatcgtggcgtcattgccaccggcggggcaatgcaatcgctctgccttgcctctcgatccgttgccccgtccctgttaatctctcgcttgcctacatatttataaggtaaaacaaagcgcgcggtggccatgtcgtccgacgcggtggccgaggccaggaagggccggctgaagcagcgctacgacaacgagttccgcctcgtcgcagggtgcgtgccgtaccgggtgaataagaaggacgacgacgaggtagcaggcagcccgtgcagcagcagcctcggcgacgacacgggcacggccgaggtggaggtgctcatgatctccacgcctaaccgggccgacatggtcttccccaagggcgggtgggaggacgacgaggacgtgtaccaggcggcgtcccgcgagaccatggaggaggccggcgtcaagggcgtcatccacagagctgccttggggcactgggtgttcaagagcaagagcagccaaagcagggccggcccgacgggagcctgcaagggctacatcttcgccatggaggtcacggaggagctggacacgtggccggagcaggacacgcacgaccggcggtgggtcgctcccgccgaagcctaccagctctgccggtacgactggatgcgggaggcgctcaccgcgctgctggagaggctgccggtgctcgaaccggtggtggctgccgcggcggctgcagccacggcggaactgacgaccgaccaagctggcatgtacatgatgctgcaggcgacctcggacggcgctgtggcgctgtgctagctgattgatggacgacattggtgttcgattctcagctagtcacgagtcttcagtatgccctgcaagtgtcgtcggtccagtaacagcagtgagcacatcagtttgcaggcgtttcccgtccaccacattggttttggttttggttggctagcttcagatgttaggacaaataattaaggaaaatttggatccataccattaaaagatcaccactttggatccataccattactatctcacttacatgtgggtccacatgagtcaatgacatgtggggtccatggtatatatgtaaagtttggatcttttaatggtataaatccaattgttccaataattaatgtagtattctgtccccttggcccttgcatgatcaatgcgattagtgagggttgctgtgtcatattccgtggtgtaaatgtaatatgcgaaaaatggtatggcaatttacccatgtcctgtgtctgtaagtgccaataatacccttaaatgtacttactacattgtaaccaatgctgaaaatgaggtggatgctggatgggctattagacagccgtagaacataattcctttgcacaacacgacgtttttattagatagagatgatcgtagaaaatcccagaattaattacaaaaattcgtgtcatcttcacctagggccactccgtgggccaattgctgaatggattagatctttg

SEQ ID NO: 50353 - DNA, 983 bp, Zea Mays
atggccgtggccccctccgcgccgcgattcttcccatcctctccctccgcgcggtttgcggctgccaatcctctccctccgcgtcgtgttcttcccatcctctccctccgcgtcggatctctccccatgtccaccaacgccggcgtccgtgatggcgcgcccggggcggcggtggacgcggctttcgccaggcatgcgctccaggccgaggccctcctcgggtacctccccgcactggccaccagcccgcgtgccgggggcaacagggtaaaccccgccgtcgccgcgacgcagctcggggcgctcggccggtggaagggctcggcgaggggccttctcgagtacatggtcgtccacgacatcggtggtgccatcgtcgccgcccctgggagagccaaagccaagcggaggaggccgcagtcgaccggatttgggaatcatgctcctgccaaacgggatgaacggaaggaagcgagatctttctgggttgatttggcttgaaggaagcgggatctttctggacaatggctgtctagcttcatccattctgggaacaaagaaaaaacaagaaacatctggtgtctgagtccagtagaaagttgtgcaaagagaagagcaaaatatctacaccagacgtctcttttaggtacagagggacggagtcttgtaagaaggtagttgcaagcttgaagtcgtgtgagccatgggggaacagggcattctggacaaacgccgttgggccaggttggaagttgagctttgctgttgagccatggactaagggctttagcatgtcgtgtgcggcgccatattctgctggagccacagagcatcaattatcgctcgatgagaaggtggataactccaccgttgcatctgattctgatgggctaataacaacattattcatttccatcccacaagaaggaatatcaaatggtcttcttcgaaggtctgtcatcttctttagagggttcaaaacc

SEQ ID NO: 50354 - DNA, 294 bp, Zea Mays
gttcagatgaacaagaaaggtgcaaactgaagtatattggtaaagttatctatcagctagactcatggcgggaaaggttttttctattgtcggtatccagcacctaagtaggcctaggattttttcttctgtctttaattttttcgtgaacgcgcaggagagttgcgcatcattaaattaagagaagaaacagtccaaaatggaccaaagtacaatgccacaaaaggccaaacacaagaccaccaaatcctgaccaaacacaagaccaccaattcctgctacgcacaggactgc

SEQ ID NO: 50355 - DNA, 1097 bp, Zea Mays
tatgaatttcttttattgacaacatgaattagtctattttagttcatctctttcttgtcacaaatttaaatgaatataattgtttgtttcagtggcaattctgtgaagcccaaaggttccaagtcaccatgagaaaattgaaatggcgagatctcttaatctaattgttgcaccttggaaggtctgaaccatcagagtttaattgtatcacccatttacacaagttcctaccatcagagttcaactgtatcacccatccataagcaattccttgtgttgaaatttatgagaagacatatgcctctgttaaggcatggtaccatcttcatcatgtagcctgggatgagctgggcaccatgaaagaattcaagtggttaaatcatgcatctgcaaaaatattgtactctcaaatggtgggttgctgcgtcacgggagtttgggtgaaggcctgaaagatgtgattcaaaacgtcgatgcaagtctgggatgtccgtctcattatggatcaaaattcatgacgttctaaaggtgtcggatgagtacctatatactccctccatcccagaaaacaaggcgcctcattacactattggaagttggacgacatggatgactctggcaagatgcggtaggagcacgacgacatggatgactccgaccacgagtccgacaggaagcctagcaacagtacgcattagcaaggttgaccagaggggcagtggagagtaacccaacaccccctcctctgaccgtcatagcgcttctttcctctggcttcatttcttacctatgtatggatggtcttcaccgctggttacatctagcaagtcctcccaggggtgagctcaattttctcctgatttgctctctcctttgtttttttattgattcatctatgcacatttatagtgtgtttggtttgaggaaggaagtgatccatcttcttctcactcctcacttttttatttggtttgtggaatagaatgggttgatccatcaccaccccattcctcatgtatataatacatgaggagtgggttgattccaccaaaattgatggaatgaacttatgatgcatcacttcattaagcatagag

SEQ ID NO: 50356 - DNA, 522 bp, Zea Mays
attggtggaggcagtgacatgaaggagattgtcatgctgccaaagcacatcaaggacaatgcaaacaaggacagaggaagatcgaacatgccatttccagacccgtggatccagttgcttttgcaagggaaagagatatgccttctgattcagataggaccttaaatgaagacaagtgtttcatatcttgtagtatgccacaggagcatcaaaagatctttgaattgggctgaagaaaacatagaacatagtgtaaaatcttatagtgtaatcttatagtgtaaaatttagagtctattgtcacccatacatataagtgccttgtgaatgtttatggaaccagggaagaagacattgttctgtatggcgagtctgttggtagcgaaccaacccttgatctagctgttcgtttcaatcgtgaagagatgtggtattaatcatagataaggggtgtttagttccagagactaatgtttagtacgtgtcacatagaatatttgaatctcattttactatgggttt

SEQ ID NO: 50357 - DNA, 772 bp, Zea Mays
gattcacaccaactgcacctttggatctcttctgggtcgtttcatttcaaaaaatcctggccatctccccctctatctctggtaaacatagaggactagatagatcaggataaacaaggcgtgttaattgttgacaaatataataaaagtaaaatcacagtaatgacgagtgaacaaacatgcctttgctgcttcgtctgtttgaaactagagatatcaacctttaagtgcagctttaggtttttttgggatgattctttgtttatcatcgcaggatataatgcacatgggttagttcatctctttttcttttgcacccaggtatgccattttggggatttctccactatacccgtggatccagttgcttttgcaagggaaagagatatgccttctgattcagataggaccttaaatgaagacaagtgtttcatatcttgtagtatgccacaggagcatcaaaagatctttgaattgggctgaagaaaacatagaacatagtgtaaaatcttatagtgtaatcttatagtgtaaaatttagagtctattgtcacccatacatataagtgccttgtgaatgtttatggaaccagggaagaagacattgttctgtatggcgagtctgttggtagcgaaccaacccttgatctagctgttcgtttcaatcgtgaagagatgtggtattaatcatagataaggggtgtttagttccagagactaatgtttagtacgtgtcacatagaatatttgaatctcattttactatgggttt

SEQ ID NO: 50358 - DNA, 1970 bp, Zea Mays
acttttccttgttccatttcctttcagcgtgcgcgctctatctccctagctccctcccctcccgagatctcctctcttcttccctccctccctcccttctctcttggcgacgtttacgctcaccagcgccaggtacgcgggtctttttcggccgaggtcgctgccgccccacgccaggtggtcaggtcttctccggtcccttcgccggcgacgtgcaccaccaggctgagctccacagtggttcttgcagaggtttcaggggcgttgataaacatcgtgggaagtgttgccataaactttggtactaaccttctgaagttgggccatgatcagagagaaaagctttcctcaattaacaacagtgagggaaatgaaaaattcgttccaaaatctgttatgcatttccagacttggagaataggtatactcttttttgctgctgggaactgcctcaatttcatgtcatttgcgtatgctgcacagtcactgcttgcagctcttggatcaattcagtttgtttccaacattgcttttgcctactttgtgttgaacaagactatttcagtgaaagtcatggtagccacaacgtttattgtctttggcaacatcttcttagtatccttcggcaaccatcaatcgcctgtttacacgccggagcagctgatcgcaaaatacagcaatttggtgtttgttctttattgcatgtcattggtctttgttgttgcgtttaaccattatctctacaggagtggagaaactattatttcaaatagttcaaaagatgctggcacatattggcgaacaatgttgccattttcatatgctgttgtatctggtgctattggatcttgctcagtcttgtttgcaaaatcattgtctaacatgctgagactgacgatgagcagcagatacgagttccatagctggttcacatattcgatcgttctcctgtttctgtgtactgctggattttggatggcaagactgaatgaggggctgtcattatttgatgcaatactgattgttccaatgtttcaaattgcttggaccttcttctctatttgtacaggatttgtttactttcaagaatatcaagtatttgatacgctcaggataattatgtttgtgttaggcatgacatttgtctttgttgggatttccttgctagcacccgatgacagtaaagatggttcaagcaccgccgatgactccataattgacatagacagaaatggaaagatgccgatggaggagacagacacagatgatagcatctcctttgttacttctgtaaaagtaaatgcaaaacgtgtactttcaaaggcaaagtctgcatgctccatgtcccttggccttggggagagcaccataagcgcttcatcggtgcttgccatgccgatggtctcgtcaagaacaaccggcttcagaggaatcggaaatgaccgtccaaagtatgtccctttaagaaccacagattggagtaacctatagccggtggtaatatataggtacacaggaaatgtctttgtttttgatgttgcctagcggatggcagtgaagttttttttgttgcttccagaggcaactgtttgttgtgatcgtagctagctataacacgagtgtatagttcaccgttgtaccctacaaaacactgtccatacctagctgcatatacacgtgtaagttttagaatacaactcaaatgattcgattcgcctctgaattgcgcaaccatttcagtggttgcatgttgtaaccatcttatatagaattgcaatttcttttgctgtccgacgctctgggaaggaaccagaaccgggttaggttaagctgggttccggcatgtccattcatgtggaaaaggtcgtgtgatgaccaggcaagaagagcatcttgtcctgccaactgtgtgtaacgtgattgaaacttaatctatggccgtcgctggtgcagcgccagcggcttaccgc

SEQ ID NO: 50359 - DNA, 2209 bp, Zea Mays
acttttccttgttccatttcctttcagcgtgcgcgctctatctccctagctccctcccctcccgagatctcctctcttcttccctccctccctcccttctctcttggcgacgtttacgctcaccagcgccaggtacgcgggtctttttcggccgaggtcgctgccgccccacgccaggtggtcaggtcttctccggtcccttcgccggcgacgtgcaccaccaggctgagctccacagtggttcttgcagaggtttcaggtttgtaacagactgctggggtgaatacacctactcaaaaaaaaaaaaagagagaaaatgggaaagagacaaagttctcgatgaattgaagtccatatgtcaaaaacaagagcaaggagctgttgtacaaggggcttgtggaaggagcatatcatatatttgtaggagataactttgcacttgactcatgggcgattggattataggggcgttgataaacatcgtgggaagtgttgccataaactttggtactaaccttctgaagttgggccatgatcagagagaaaagctttcctcaattaacaacagtgagggaaatgaaaaattcgttccaaaatctgttatgcatttccagacttggagaataggtatactcttttttgctgctgggaactgcctcaatttcatgtcatttgcgtatgctgcacagtcactgcttgcagctcttggatcaattcagtttgtttccaacattgcttttgcctactttgtgttgaacaagactatttcagtgaaagtcatggtagccacaacgtttattgtctttggcaacatcttcttagtatccttcggcaaccatcaatcgcctgtttacacgccggagcagctgatcgcaaaatacagcaatttggtgtttgttctttattgcatgtcattggtctttgttgttgcgtttaaccattatctctacaggtctaacatgctgagactgacgatgagcagcagatacgagttccatagctggttcacatattcgatcgttctcctgtttctgtgtactgctggattttggatggcaagactgaatgaggggctgtcattatttgatgcaatactgattgttccaatgtttcaaattgcttggaccttcttctctatttgtacaggatttgtttactttcaagaatatcaagtatttgatacgctcaggataattatgtttgtgttaggcatgacatttgtctttgttgggatttccttgctagcacccgatgacagtaaaggttggtaaaacgttgattttcatgtgtttgcacatagaagattttgactcttggtgaactgtcggcagctgatacgaaagatggttcaagcaccgccgatgactccataattgacatagacagaaatggaaagatgccgatggaggagacagacacagatgatagcatctcctttgttacttctgtaaaagtaaatgcaaaacgtgtactttcaaaggcaaaggtcattggctttcttcctagatctgattctaccatataaatctgtcacaagtcttgcctctctcacctgatcttatttgcagtctgcatgctccatgtcccttggccttggggagagcaccataagcgcttcatcggtgcttgccatgccgatggtctcgtcaagaacaaccggcttcagaggaatcggaaatgaccgtccaaagtatgtccctttaagaaccacagattggagtaacctatagccggtggtaatatataggtacacaggaaatgtctttgtttttgatgttgcctagcggatggcagtgaagttttttttgttgcttccagaggcaactgtttgttgtgatcgtagctagctataacacgagtgtatagttcaccgttgtaccctacaaaacactgtccatacctagctgcatatacacgtgtaagttttagaatacaactcaaatgattcgattcgcctctgaattgcgcaaccatttcagtggttgcatgttgtaaccatcttatatagaattgcaatttcttttgctgtccgacgctctgggaaggaaccagaaccgggttaggttaagctgggttccggcatgtccattcatgtggaaaaggtcgtgtgatgaccaggcaagaagagcatcttgtcctgccaactgtgtgtaacgtgattgaaacttaatctatggccgtcgctggtgcagcgccagcggcttaccgc

SEQ ID NO: 50360 - DNA, 2155 bp, Zea Mays
acttttccttgttccatttcctttcagcgtgcgcgctctatctccctagctccctcccctcccgagatctcctctcttcttccctccctccctcccttctctcttggcgacgtttacgctcaccagcgccaggtacgcgggtctttttcggccgaggtcgctgccgccccacgccaggtggtcaggtcttctccggtcccttcgccggcgacgtgcaccaccaggctgagctccacagtggttcttgcagaggtttcaggtttgtaacagactgctggggtgaatacacctactcaaaaaaaaaaaaagagagaaaatgggaaagagacaaagttctcgatgaattgaagtccatatgtcaaaaacaagagcaaggagctgttgtacaaggggcttgtggaaggagcatatcatatatttgtaggagataactttgcacttgactcatgggcgattggattataggggcgttgataaacatcgtgggaagtgttgccataaactttggtactaaccttctgaagttgggccatgatcagagagaaaagctttcctcaattaacaacagtgagggaaatgaaaaattcgttccaaaatctgttatgcatttccagacttggagaataggtatactcttttttgctgctgggaactgcctcaatttcatgtcatttgcgtatgctgcacagtcactgcttgcagctcttggatcaattcagtttgtttccaacattgcttttgcctactttgtgttgaacaagactatttcagtgaaagtcatggtagccacaacgtttattgtctttggcaacatcttcttagtatccttcggcaaccatcaatcgcctgtttacacgccggagcagctgatcgcaaaatacagcaatttggtgtttgttctttattgcatgtcattggtctttgttgttgcgtttaaccattatctctacaggagtggagaaactattatttcaaatagttcaaaagatgctggcacatattggcgaacaatgttgccattttcatatgctgttgtatctggtgctattggatcttgctcagtcttgtttgcaaaatcattgtctaacatgctgagactgacgatgagcagcagatacgagttccatagctggttcacatattcgatcgttctcctgtttctgtgtactgctggattttggatggcaagactgaatgaggggctgtcattatttgatgcaatactgattgttccaatgtttcaaattgcttggaccttcttctctatttgtacaggatttgtttactttcaagaatatcaagtatttgatacgctcaggataattatgtttgtgttaggcatgacatttgtctttgttgggatttccttgctagcacccgatgacagtaaagctgatacgaaagatggttcaagcaccgccgatgactccataattgacatagacagaaatggaaagatgccgatggaggagacagacacagatgatagcatctcctttgttacttctgtaaaatctgcatgctccatgtcccttggccttggggagagcaccataagcgcttcatcggtgcttgccatgccgatggtctcgtcaagaacaaccggcttcagaggaatcggaaatgaccgtccaaagtatgtccctttaagaaccacagattggagtaacctatagccggtggtaatatataggtacacaggaaatgtctttgtttttgatgttgcctagcggatggcagtgaagttttttttgttgcttccagaggcaactgtttgttgtgatcgtagctagctataacacgagtgtatagttcaccgttgtaccctacaaaacactgtccatacctagctgcatatacacgtgtaagttttagaatacaactcaaatgattcgattcgcctctgaattgcgcaaccatttcagtggttgcatgttgtaaccatcttatatagaattgcaatttcttttgctgtccgacgctctgggaaggaaccagaaccgggttaggttaagctgggttccggcatgtccattcatgtggaaaaggtcgtgtgatgaccaggcaagaagagcatcttgtcctgccaactgtgtgtaacgtgattgaaacttaatctatggccgtcgctggtgcagcgccagcggcttaccgc

SEQ ID NO: 50361 - DNA, 2192 bp, Zea Mays
acttttccttgttccatttcctttcagcgtgcgcgctctatctccctagctccctcccctcccgagatctcctctcttcttccctccctccctcccttctctcttggcgacgtttacgctcaccagcgccaggtacgcgggtctttttcggccgaggtcgctgccgccccacgccaggtggtcaggtcttctccggtcccttcgccggcgacgtgcaccaccaggctgagctccacagtggttcttgcagaggtttcaggtttgtaacagactgctggggtgaatacacctactcaaaaaaaaaaaaagagagaaaatgggaaagagacaaagttctcgatgaattgaagtccatatgtcaaaaacaagagcaaggagctgttgtacaaggggcttgtggaaggagcatatcatatatttgtaggagataactttgcacttgactcatgggcgattggattataggggcgttgataaacatcgtgggaagtgttgccataaactttggtactaaccttctgaagttgggccatgatcagagagaaaagctttcctcaattaacaacagtgagggaaatgaaaaattcgttccaaaatctgttatgcatttccagacttggagaataggtatactcttttttgctgctgggaactgcctcaatttcatgtcatttgcgtatgctgcacagtcactgcttgcagctcttggatcaattcagtttgtttccaacattgcttttgcctactttgtgttgaacaagactatttcagtgaagtatagtcatggtagccacaacgtttattgtctttggcaacatcttcttagtatccttcggcaaccatcaatcgcctgtttacacgccggagcagctgatcgcaaaatacagcaatttggtgtttgttctttattgcatgtcattggtctttgttgttgcgtttaaccattatctctacaggagtggagaaactattatttcaaatagttcaaaagatgctggcacatattggcgaacaatgttgccattttcatatgctgttgtatctggtgctattggatcttgctcagtcttgtttgcaaaatcattgtctaacatgctgagactgacgatgagcagcagatacgagttccatagctggttcacatattcgatcgttctcctgtttctgtgtactgctggattttggatggcaagactgaatgaggggctgtcattatttgatgcaatactgattgttccaatgtttcaaattgcttggaccttcttctctatttgtacaggatttgtttactttcaagaatatcaagtatttgatacgctcaggataattatgtttgtgttaggcatgacatttgtctttgttgggatttccttgctagcacccgatgacagtaaagctgatacgaaagatggttcaagcaccgccgatgactccataattgacatagacagaaatggaaagatgccgatggaggagacagacacagatgatagcatctcctttgttacttctgtaaaagtaaatgcaaaacgtgtactttcaaaggcaaagtctgcatgctccatgtcccttggccttggggagagcaccataagcgcttcatcggtgcttgccatgccgatggtctcgtcaagaacaaccggcttcagaggaatcggaaatgaccgtccaaagtatgtccctttaagaaccacagattggagtaacctatagccggtggtaatatataggtacacaggaaatgtctttgtttttgatgttgcctagcggatggcagtgaagttttttttgttgcttccagaggcaactgtttgttgtgatcgtagctagctataacacgagtgtatagttcaccgttgtaccctacaaaacactgtccatacctagctgcatatacacgtgtaagttttagaatacaactcaaatgattcgattcgcctctgaattgcgcaaccatttcagtggttgcatgttgtaaccatcttatatagaattgcaatttcttttgctgtccgacgctctgggaaggaaccagaaccgggttaggttaagctgggttccggcatgtccattcatgtggaaaaggtcgtgtgatgaccaggcaagaagagcatcttgtcctgccaactgtgtgtaacgtgattgaaacttaatctatggccgtcgctggtgcagcgccagcggcttaccgc

SEQ ID NO: 50362 - DNA, 2051 bp, Zea Mays
acttttccttgttccatttcctttcagcgtgcgcgctctatctccctagctccctcccctcccgagatctcctctcttcttccctccctccctcccttctctcttggcgacgtttacgctcaccagcgccaggtacgcgggtctttttcggccgaggtcgctgccgccccacgccaggtggtcaggtcttctccggtcccttcgccggcgacgtgcaccaccaggctgagctccacagtggttcttgcagaggtttcaggtttgtaacagactgctggggtgaatacacctactcaaaaaaaaaaaaagagagaaaatgggaaagagacaaagttctcgatgaattgaagtccatatgtcaaaaacaagagcaaggagctgttgtacaaggggcttgtggaaggagcatatcatatatttgtaggagataactttgcacttgactcatgggcgattggattataggggcgttgataaacatcgtgggaagtgttgccataaactttggtactaaccttctgaagttgggccatgatcagagagaaaagctttcctcaattaacaacagtgagggaaatgaaaaattcgttccaaaatctgttatgcatttccagacttggagaataggtatactcttttttgctgctgggaactgcctcaatttcatgtcatttgcgtatgctgcacagtcactgcttgcagctcttggatcaattcagtttgtttccaacattgcttttgcctactttgtgttgaacaagactatttcagtgaagtatagtcatggtagccacaacgtttattgtctttggcaacatcttcttagtatccttcggcaaccatcaatcgcctgtttacacgccggagcagctgatcgcaaaatacagcaatttggtgtttgttctttattgcatgtcattggtctttgttgttgcgtttaaccattatctctacaggtctaacatgctgagactgacgatgagcagcagatacgagttccatagctggttcacatattcgatcgttctcctgtttctgtgtactgctggattttggatggcaagactgaatgaggggctgtcattatttgatgcaatactgattgttccaatgtttcaaattgcttggaccttcttctctatttgtacaggatttgtttactttcaagaatatcaagtatttgatacgctcaggataattatgtttgtgttaggcatgacatttgtctttgttgggatttccttgctagcacccgatgacagtaaagatggttcaagcaccgccgatgactccataattgacatagacagaaatggaaagatgccgatggaggagacagacacagatgatagcatctcctttgttacttctgtaaaagtaaatgcaaaacgtgtactttcaaaggcaaagtctgcatgctccatgtcccttggccttggggagagcaccataagcgcttcatcggtgcttgccatgccgatggtctcgtcaagaacaaccggcttcagaggaatcggaaatgaccgtccaaagtatgtccctttaagaaccacagattggagtaacctatagccggtggtaatatataggtacacaggaaatgtctttgtttttgatgttgcctagcggatggcagtgaagttttttttgttgcttccagaggcaactgtttgttgtgatcgtagctagctataacacgagtgtatagttcaccgttgtaccctacaaaacactgtccatacctagctgcatatacacgtgtaagttttagaatacaactcaaatgattcgattcgcctctgaattgcgcaaccatttcagtggttgcatgttgtaaccatcttatatagaattgcaatttcttttgctgtccgacgctctgggaaggaaccagaaccgggttaggttaagctgggttccggcatgtccattcatgtggaaaaggtcgtgtgatgaccaggcaagaagagcatcttgtcctgccaactgtgtgtaacgtgattgaaacttaatctatggccgtcgctggtgcagcgccagcggcttaccgc

SEQ ID NO: 50363 - DNA, 2136 bp, Zea Mays
acttttccttgttccatttcctttcagcgtgcgcgctctatctccctagctccctcccctcccgagatctcctctcttcttccctccctccctcccttctctcttggcgacgtttacgctcaccagcgccaggtacgcgggtctttttcggccgaggtcgctgccgccccacgccaggtggtcaggtcttctccggtcccttcgccggcgacgtgcaccaccaggctgagctccacagtggttcttgcagaggtttcaggggcgttgataaacatcgtgggaagtgttgccataaactttggtactaaccttctgaagttgggccatgatcagagagaaaagctttcctcaattaacaacagtgagggaaatgaaaaattcgttccaaaatctgttatgcatttccagacttggagaataggtatactcttttttgctgctgggaactgcctcaatttcatgtcatttgcgtatgctgcacagtcactgcttgcagctcttggatcaattcagtttgtttccaacattgcttttgcctactttgtgttgaacaagactatttcagtgaagtatagtcatggtagccacaacgtttattgtctttggcaacatcttcttagtatccttcggcaaccatcaatcgcctgtttacacgccggagcagctgatcgcaaaatacagcaatttggtgtttgttctttattgcatgtcattggtctttgttgttgcgtttaaccattatctctacaggagtggagaaactattatttcaaatagttcaaaagatgctggcacatattggcgaacaatgttgccattttcatatgctgttgtatctggtgctattggatcttgctcagtcttgtttgcaaaatcattgtctaacatgctgagactgacgatgagcagcagatacgagttccatagctggttcacatattcgatcgttctcctgtttctgtgtactgctggattttggatggcaagactgaatgaggggctgtcattatttgatgcaatactgattgttccaatgtttcaaattgcttggaccttcttctctatttgtacaggatttgtttactttcaagaatatcaagtatttgatacgctcaggataattatgtttgtgttaggcatgacatttgtctttgttgggatttccttgctagcacccgatgacagtaaaggttggtaaaacgttgattttcatgtgtttgcacatagaagattttgactcttggtgaactgtcggcagctgatacgaaagatggttcaagcaccgccgatgactccataattgacatagacagaaatggaaagatgccgatggaggagacagacacagatgatagcatctcctttgttacttctgtaaaagtaaatgcaaaacgtgtactttcaaaggcaaaggtcattggctttcttcctagatctgattctaccatataaatctgtcacaagtcttgcctctctcacctgatcttatttgcagtctgcatgctccatgtcccttggccttggggagagcaccataagcgcttcatcggtgcttgccatgccgatggtctcgtcaagaacaaccggcttcagaggaatcggaaatgaccgtccaaagtatgtccctttaagaaccacagattggagtaacctatagccggtggtaatatataggtacacaggaaatgtctttgtttttgatgttgcctagcggatggcagtgaagttttttttgttgcttccagaggcaactgtttgttgtgatcgtagctagctataacacgagtgtatagttcaccgttgtaccctacaaaacactgtccatacctagctgcatatacacgtgtaagttttagaatacaactcaaatgattcgattcgcctctgaattgcgcaaccatttcagtggttgcatgttgtaaccatcttatatagaattgcaatttcttttgctgtccgacgctctgggaaggaaccagaaccgggttaggttaagctgggttccggcatgtccattcatgtggaaaaggtcgtgtgatgaccaggcaagaagagcatcttgtcctgccaactgtgtgtaacgtgattgaaacttaatctatggccgtcgctggtgcagcgccagcggcttaccgc

SEQ ID NO: 50364 - DNA, 2089 bp, Zea Mays
gaaaacaacagaccatcaatgatctcgagatccccaaatctctttcttaagtaggtaccgctgcgccgcaaacccaccgcttccaccatcgccacccgtcagtccgtcacccctcgcgcccatagtccccttccccataccatgtccgacctccacccgccggagcaccaagtcgccggccaccgcgcctccgccagcaagctgggcccgctcatcgacggctccggcctcttctacaagccgctccaggccggcgaccgtggggagcacgaggtcgccttctatgaggcgttctccgcccacgccgccgtcccggcccgcatccgagacaccttcttcccccggttccacggcacgcgactcctccccaccgaggcgcagcccggggagccgcatcctcacctcgtcctcgacgacctcctcgcggggtttcaggcgccctgcgtcgcagacatcaagatcggcgccatcacgtggccaccgagttcgccggagccctacatcgccaagtgcctcgccaaggaccgcgggaccacgagcgttctgctcggattccgcgtctccggcgtccgagtcgtcggccccgagggcgccgtgtggcggacggagcgcccggaggtgaaggccatggacaccgccggcgtccgccgcgtgctccggcgctacgtgtcatccgttgccgacgaggggatggactgtgcgctcgccgcggcggtgtacggaggaaaaggtggagtcttgtcacagctgcgcgagctcaaggcgtggttcgaggagcagactctgttccacttctactcggcgtcgattcttctgggctatgatgctgctgcagtcgcagcaggcggagatgggggtggggtgacggtgaagctggtggactttgcccatgtggccgagggtgatggggtgattgaccacaacttcctgggcgggctctgctcgctgatcaagttcgtttctgacattgttccggagactcctcatacgcagcctttgggtccttcttaagagaggatcctggcatttcgatttgataacaaaggttccttgcagcgctcgggagatggtgcaggctggtgatgactacggcggcggcgaggcttttccgtccctatctgtctgccccgatggtgcccctatggagtttgtttggttggcttggataagcggtggacaaggtacgcgtgtatatatatactcttcgcagagaagtccggctgggagaagcgagcagactttgccggatttcacgcaaccaaaccgctcgacgctcgggagcatgtttgtttagcgaagacggggcggcttttaattgcatgcagatatcactgcgatgatatttacggttttagaattaaagaaaacaagaaatacacccatggcatgatcacgtgaagggagttggaaaaataaatgggcccgcacaagtgcctttggtcgacgtgataccagccctacaagttttgtctggaaaaagaagcgcctccgagttgtgctgggtgtggagatctgagacggtcgtcggcccacttggttgccttgcctttgccttgcctgcaaacatacggcaacctgctccttttttcgcaaccccttacttccgaagaaactttttttttcccactttgggggttcgattacgttggatctggtttgtgccactcggtcagaggttgtaagcatggagggaggcgtgttgatccggcaactgtgtcagtctttgcgctgcctgccgtttctgcatggcttttgcctgctgcgatccgatgtgtactggagatcgtagtgatggacgtctctacctccaaacgaatccgtccgataaatctaacgcaggttgagagtccatttgggttatgggttgtccaaatccattgtcggctcagaagccagcgttgagttcggatgtgcagacggatggggatgtggctgtggacactggagacaggggaggctactcggcttgcgtcgtcatgggaaaaagaggcaatctttttctagtagccgtcctgtccgtttgggtcgcatactcgcacggttggctgctccacccgtgacctcgagcctctttgtattcggatctgag

SEQ ID NO: 50365 - DNA, 2532 bp, Zea Mays
ggaaaaacaaagtcaacacgaaggactcggccggtagcactggcgctagcagcagcagagatcgaccggccatcgccgttttataaaaagagagtccagcggtagccgtcgctgacggacgcccccctcccagacctccgcccggatctcgccgcctctcccgcccctgctcgcgagccgccgtcgacagccaccgccatgggcacggccaacggccagcagccggcagagggcgctccctctgacaagctccgccacgtcgagtccatgtcggagctgccctccggcgccggcaagatctcggggatcaacgccgtcgtgctcggggagtcgctcgccgccgaggagaacgacctcatcgtccccagccccgagttctctgccagcgccctcgtctcttctccgaaacagtatcgcgagatgtatgagaggtccattaaggacccggccgggttctggtcggagattgccgagaccttttactggaaggagaagtggaaccccgccgaggtctgctcggagaacctcgatgtcaccaagggacccgtccagatcaactggttcaagggagggaaaaccaacatatgttacaacgctgttgaccgcaacatcgagtctggcaatggcgacaaggttgcaatgtactgggagggtaatgagcccggtcaggatgggaagcttacctattccgagctcctggagaaggtttgccagcttgcaaattacttgaagagccttggtgtcggcaagggtgatgctgttattatatacctaccaatgttgctggagcttcccattgccatgcttgcctgtgcccgcattggtgccgttcactcggttgtgtttgctggcttctcagcagattcgctagctcaaaggattgtcgattgcaagcctaagcttgtcatcacgtgcaatgctgtgaagcggggagtcaagcccatctttctcaaagatatagtggatgcagctttggttgaaagtgagaagaatggagtctctgtaggtctctgtttgacgtatgaaaaccagtcagccatgaagagggaaaacacaaaatggcaagcagaaagggatgtttggtggcaggacgttgtcacaaaatttccaaccaaatgtgatgtggagtgggtggatgcagaggatccattgttccttttgtacacaagtggcagcacagggaagccaaagggtgtactgcatacttctgggggctacatggtgtacactgcaacaacatttaagtacgcatttgactacaagccaactgacatatactggtgcactgcagactgtggctggattactggacatagttatgtaacatatggtcctctcctgaatggtgctacggttctcgtttttgaagggacgccgaactaccctgattcgggccgatgctgggatattgtggacaagtacaatgtgacaatattttatactgccccaactcttgttcgttcactcatgcgtgatggcactgagtatgttacacgttactctcgaaagtctctccgagtcctgggaagtgttgatggttctacaatactgttggggattcccggtgccctatatcagacacctggtggcaaactgaaactggcggtttcatgatcacccctttgcctggcgcctggcctcaaaaaccaggttctgcaacctttcctttctttggtgttcagccggtcattgttgacgagaaagggcaagagattgaaggggaatgtagtggatatctttgcataaagaaatcatggcctggggctttccggactctgtatggagatcatgagagatacgagaccacgtacttcaaaccatttgctgggtactatttcactggtgatggttgcagcagagacaaagatggttaccactggctgactggaagagtagatgatgtcatcaatgtcagtggacaccgaatcggcacagcagaggttgagtcagctttagtgtcacatccacagtgtgcagaggctgctgttgttggtgttgagcatgaggtcaaaggtcaaggaatttatgcttttgtaactttggtggatggtgttccgtatagtgaggaactacgaaaaagcctcataatgacagtgcgcaaccagattggggcatttgcagctcctgacaagatccactgggcaccgggacttcctaaaacccggagtggcaagatcatgcgaaggattttgcgcaagattgctgcacggcaactggatgaacttggggacataagcaccctcgctgaacctgctgtagttgaccagcttatttcgctcagcaattgttaggttgcaacgtaattggatggtggatacatccttgagcgcatgttgcgtttgtctgtaatatgagtagaaggtgcatttcaatatcgagaactcaagtgggacgtggtgacatgttgtcgatgtttccttttaaacttttgtatcagatatcaagataggtccatcagaatgtattattgattgacacagacaaatatatcaataaaattgttaatttttcatttggtttcgtttggataaa

SEQ ID NO: 50366 - DNA, 715 bp, Zea Mays
gcctcgggagaagagctcaaggcatttttccgtccagagttgctcaatagaatcgacgagatggttgtgttccgtcctctggagaagactcagatgctggccattcttgatatcatcctaaaggaagtcaagggccgacttttggccctcgggataggtttggaggtgtctgatgcaatgaaggacctgatatgccaagagggctacgacaaaagctatggcgctcggcctctgaggagagctgtcacccacattatcgaggatgtcatcagcgaagcgattctttttggcgagttcaagcccggtgacacgatactgatggacatcgatgcagaggggaagccatgcatgggccatctggaccaacagatcgtccaggtctctgacccaacacgggcaatctgaagctgtgttggaccttttccagtgtagtagattagggatctaaatcttttattctttcaagatagagattattaattctttgttacgtagatatatagagtagtatttcattatgtatatatatcaaccagatgatccagataggggaatctggtcagtcattggagttatttgaaattttcatccagctgtatgtatattgttgaattgtttctgattcaactggccatatatatcatcattaaactatcttcatcggcttacccatttatctcttattttaaacttcaatatagtctatagctgtgca

SEQ ID NO: 50367 - DNA, 3263 bp, Zea Mays
ggactcgtgtccctccttccttgcgtgcttccttccccttccttccgttccgtcctccccgcctccgcccccgcctccgccgcgcggtatttttataccgctctcccccgtctcctcctcgcctactcatccactcgccacgccacgccacgccacgcctccaactccaagcagatagatagactagatagctgttggcgtgcgacgcgtagcgagagcgtgactaaccgctgcctaagcaagcatataagcatttgattcgttcctaggacaggggagggttaaggtagttccttaatttttcttgtttctttttttgtgtgtcgttgctggtgcggtagctatggaggtgtgctgctgctccacctcgtcgtccgtcctcaccgccgggggccgcggcgccgcggcgcggaggctggccgcgccggcggctcgctggggcgcagcggggttcgggagggcggtggtgctggcgcacccgctcccacgcccggcatccgcggccgcggcggcgcccacgcgccgggcgcgcagggggggcgtcggcgtcgtcagggcggtgttcgagcggttcacggagcgggccgtcaaggcggtcgtgctgtcgcagcgggaggcccgggggctcggggagcccgccgtggcgccgcgccacctcctcctcggcctggtcgccgaggaccgatcctcgggcggcttcctctcgtcggggatcaacatcgagcgcgcgcgcgaggagtgccgcggcatcgctgccagtgccagggacgcggactcggccaccgcggcgtctaggcccgggtcgtcggggctcgacacggacgtgcccttcgccgcgcccaccaagcaggtcttcgacgtggccgtcgtgctctccaagaacatgggctccagcttcgtctcgcccgagcacctcgccatcgcactcttctccctcgacgatccaaccaccaacaacctcctaaggagtttgggagcggatcccagtcatctagcatcggttgcagtcgaccgtctccaagcagagcttgcgaaagatggcagagatcctgctgaaccatcatctttcaaagttccaaagaaagcccctgctgcagccggaagatctgccttctcccagtccttgactaaaaagaaagataagggtgcgctggatcaattttgtttggatttgaccacacaagctagtggaggtttcattgatcctattattggccgtgaagaagagattgaaagagtagttcagatagtatgccggcggacgaagaacaaccctattcttttgggtgaggcgggtgttggcaaaactgcaattgccgagggtctggctcttcgaattgcaaatggagatgtccccatttaccttgtggcaaagcgcatattgtcgctagatgttggtctccttattgctggtgcaaaggagaggggtgaactggagtctagggttactaatataatccgcgaggtccgggaagcaggcgatgttattctttttattgatgaggtccacaaccttattggatctggaactgttggaaagagtaagggttctggtcttgacattggcaacttgctgaagcccgcgcttgctagaggtgaattgcagtgcattgctgctacaactctagatgaacaccggatgcattttgagaaggataaggctttggcccgccgcttccagccagtactagtagatgagcctagtcaggaagatgctgtgaagatattactgggtcttcgtgaaaaatatgaaacttaccataaatgcaaattcacattggaagccatcaatgcagcagtttatttgtcagcaagatacattcctgacagacagcttcctgataaggctattgatctgattgatgaggctggaagtagagctcggatggaatcatttaataggaagaaggaagggcagtcttcgattctcttgaagtcaccagatgaatactggcaagagataagagctgctcaggccatgcatgaagtggtgttatctaacaaggaaaaatattctccaaatgagaatgctgaagagagtggtagtgctaacgttgaagcactacacagagacaatattgagtcaacatctacttcatcactctcagctgatgaaccagttgtagttgggacagaggaaattgcaagggttgcctcattatggtctgggataccagtacagcagttgactgccgacgataaaaaacttctagtaggactggacgacgaactcagaaaacgtgtcattggccaagatgatgctgttgtggccatatctcgtgcagtgaagagatcacgtgttggccttaacgatcctgatagacctattgctacgctgcttttctgtggtccaacaggagttggtaaaacagagctcaccaaagctctagcagctagttattttggatcgggtcgcagggtttccttcaaaaatacgttgattgtcatgacttcgaatgttggttcaacatcaatttcaaaaggaagacagagcataggtttcttgaaggaagataccgagtcaggctcatacttcgcaatgaaatccttagtgatggaagagctcaaggcatttttccgtccagagttgctcaatagaatcgacgagatggttgtgttccgtcctctggagaagactcagatgctggccattcttgatatcatcctaaaggaagtcaagggccgacttttggccctcgggataggtttggaggtgtctgatgcaatgaaggacctgatatgccaagagggctacgacaaaagctatggcgctcggcctctgaggagagctgtcacccacattatcgaggatgtcatcagcgaagcgattctttttggcgagttcaagcccggtgacacgatactgatggacatcgatgcagaggggaagccatgcatgggccatctggaccaacagatcgtccaggtctctgacccaacacgggcaatctgaagctgtgttggaccttttccagtgtagtagattagggatctaaatcttttattctttcaagatagagattattaattctttgttacgtagatatatagagtagtatttcattatgtatatatatcaaccagatgatccagataggggaatctggtcagtcattggagttatttgaaattttcatccagctgtatgtatattgttgaattgtttctgattcaactggccatatatatcatcattaaactatcttcatcggcttacccatttatctcttattttaaacttcaatatagtctatagctgtgca

SEQ ID NO: 50368 - DNA, 3449 bp, Zea Mays
tccgttccgtcctccccgcctccgcccccgcctccgccgcgcggtatttttataccgctctcccccgtctcctcctcgcctactcatccactcgccacgccacgccacgccacgcctccaactccaagcagatagatagactagatagctgttggcgtgcgacgcgtagcgagagcgtgactaaccgctgcctaagcaagcatataagcatttgattcgttcctaggacaggggagggttaaggtagttccttaatttttcttgtttctttttttgtgtgtcgttgctggtgcggtagctatggaggtgtgctgctgctccacctcgtcgtccgtcctcaccgccgggggccgcggcgccgcggcgcggaggctggccgcgccggcggctcgctggggcgcagcggggttcgggagggcggtggtgctggcgcacccgctcccacgcccggcatccgcggccgcggcggcgcccacgcgccgggcgcgcagggggggcgtcggcgtcgtcagggcggtgttcgagcggttcacggagcgggccgtcaaggcggtcgtgctgtcgcagcgggaggcccgggggctcggggagcccgccgtggcgccgcgccacctcctcctcggcctggtcgccgaggaccgatcctcgggcggcttcctctcgtcggggatcaacatcgagcgcgcgcgcgaggagtgccgcggcatcgctgccagtgccagggacgcggactcggccaccgcggcgtctaggcccgggtcgtcggggctcgacacggacgtgcccttcgccgcgcccaccaagcaggtcttcgacgtggccgtcgtgctctccaagaacatgggctccagcttcgtctcgcccgagcacctcgccatcgcactcttctccctcgacgatccaaccaccaacaacctcctaaggagtttgggagcggatcccagtcatctagcatcggttgcagtcgaccgtctccaagcagagcttgcgaaagatggcagagatcctgctgaaccatcatctttcaaagttccaaagaaagcccctgctgcagccggaagatctgccttctcccagtccttgactaaaaagaaagggtgcgctggatcaattttgtttggatttgaccacacaagctagtggaggtttcattgatcctattattggccgtgaagaagagattgaaagagtagttcagatagtatgccggcggacgaagaacaaccctattcttttgggtgaggcgggtgttggcaaaactgcaattgccgagggtctggctcttcgaattgcaaatggagatgtccccatttaccttgtggcaaagcgcatattgtcgctagatgttggtctccttattgctggtgcaaaggagaggggtgaactggagtctagggttactaatataatccgcgaggtccgggaagcaggcgatgttattctttttattgatgaggtccacaaccttattggatctggaactgttggaaagagtaagggttctggtcttgacattggcaacttgctgaagcccgcgcttgctagaggtgaattgcagtgcattgctgctacaactctagatgaacaccggatgcattttgagaaggataaggctttggcccgccgcttccagccagtactagtagatgagcctagtcaggaagatgctgtgaagatattactgggtcttcgtgaaaaatatgaaacttaccataaatgcaaattcacattggaagccatcaatgcagcagtttatttgtcagcaagatacattcctgacagacagcttcctgataaggctattgatctgattgatgaggctggaagtagagctcggatggaatcatttaataggaagaaggaagggcagtcttcgattctcttgaagtcaccagatgaatactggcaagagataagagctgctcaggccatgcatgaagtggtgttatctaacaaggaaaaatattctccaaatgagaatgctgaagagagtggtagtgctaacgttgaagcactacacagagacaatattgagtcaacatctacttcatcactctcagctgatgaaccagttgtagttgggacagaggaaattgcaagggttgcctcattatggtctgggataccagtacagcagttgactgccgacgataaaaaacttctagtaggactggacgacgaactcagaaaacgtgtcattggccaagatgatgctgttgtggccatatctcgtgcagtgaagagatcacgtgttggccttaacgatcctgatagacctattgctacgctgcttttctgtggtccaacaggagttggtaaaacagagctcaccaaagctctagcagctagttattttggatcggaatctgctatgcttaggttagacatgagcgagtatatggagaggcacactgtgagcaagctcataggctctcctccagggtacattgggtatggtgaaactggtactttgacagaagcagtcaggagaaaaccatttactgtggtattgttggatgagatagagaaagctcaccctgatattttcaacatccttctccaaatatttgaggatggacatttgacagactcacagggtcgcagggtttccttcaaaaatacgttgattgtcatgacttcgaatgttggttcaacatcaatttcaaaaggaagacagagcataggtttcttgaaggaagataccgagtcaggctcatacttcgcaatgaaatccttagtgatggaagagctcaaggcatttttccgtccagagttgctcaatagaatcgacgagatggttgtgttccgtcctctggagaagactcagatgctggccattcttgatatcatcctaaaggaagtcaagggccgacttttggccctcgggataggtttggaggtgtctgatgcaatgaaggacctgatatgccaagagggctacgacaaaagctatggcgctcggcctctgaggagagctgtcacccacattatcgaggatgtcatcagcgaagcgattctttttggcgagttcaagcccggtgacacgatactgatggacatcgatgcagaggggaagccatgcatgggccatctggaccaacagatcgtccaggtctctgacccaacacgggcaatctgaagctgtgttggaccttttccagtgtagtagattagggatctaaatcttttattctttcaagatagagattattaattctttgttacgtagatatatagagtagtatttcattatgtatatatatcaaccagatgatccagataggggaatctggtcagtcattggagttatttgaaattttcatccagctgtatgtatattgttgaattgtttctgattcaactggccatatatatcatcattaaactatcttcatcggcttacccatttatctcttattttaaacttcaatatagtctatagctgtgca

SEQ ID NO: 50369 - DNA, 3424 bp, Zea Mays
ctccgcccccgcctccgccgcgcggtatttttataccgctctcccccgtctcctcctcgcctactcatccactcgccacgccacgccacgccacgcctccaactccaagcagatagatagactagatagctgttggcgtgcgacgcgtagcgagagcgtgactaaccgctgcctaagcaagcatataagcatttgattcgttcctaggacaggggagggttaaggtagttccttaatttttcttgtttctttttttgtgtgtcgttgctggtgcggtagctatggaggtgtgctgctgctccacctcgtcgtccgtcctcaccgccgggggccgcggcgccgcggcgcggaggctggccgcgccggcggctcgctggggcgcagcggggttcgggagggcggtggtgctggcgcacccgctcccacgcccggcatccgcggccgcggcggcgcccacgcgccgggcgcgcagggggggcgtcggcgtcgtcagggcggtgttcgagcggttcacggagcgggccgtcaaggcggtcgtgctgtcgcagcgggaggcccgggggctcggggagcccgccgtggcgccgcgccacctcctcctcggcctggtcgccgaggaccgatcctcgggcggcttcctctcgtcggggatcaacatcgagcgcgcgcgcgaggagtgccgcggcatcgctgccagtgccagggacgcggactcggccaccgcggcgtctaggcccgggtcgtcggggctcgacacggacgtgcccttcgccgcgcccaccaagcaggtcttcgacgtggccgtcgtgctctccaagaacatgggctccagcttcgtctcgcccgagcacctcgccatcgcactcttctccctcgacgatccaaccaccaacaacctcctaaggagtttgggagcggatcccagtcatctagcatcggttgcagtcgaccgtctccaagcagagcttgcgaaagatggcagagatcctgctgaaccatcatctttcaaagttccaaagaaagcccctgctgcagccggaagatctgccttctcccagtccttgactaaaaagaaagataagggtgcgctggatcaattttgtttggatttgaccacacaagctagtggaggtttcattgatcctattattggccgtgaagaagagattgaaagagtagttcagatagtatgccggcggacgaagaacaaccctattcttttgggtgaggcgggtgttggcaaaactgcaattgccgagggtctggctcttcgaattgcaaatggagatgtccccatttaccttgtggcaaagcgcatattgtcgctagatgttggtctccttattgctggtgcaaaggagaggggtgaactggagtctagggttactaatataatccgcgaggtccgggaagcaggcgatgttattctttttattgatgaggtccacaaccttattggatctggaactgttggaaagagtaagggttctggtcttgacattggcaacttgctgaagcccgcgcttgctagagtgcattgctgctacaactctagatgaacaccggatgcattttgagaaggataaggctttggcccgccgcttccagccagtactagtagatgagcctagtcaggaagatgctgtgaagatattactgggtcttcgtgaaaaatatgaaacttaccataaatgcaaattcacattggaagccatcaatgcagcagtttatttgtcagcaagatacattcctgacagacagcttcctgataaggctattgatctgattgatgaggctggaagtagagctcggatggaatcatttaataggaagaaggaagggcagtcttcgattctcttgaagtcaccagatgaatactggcaagagataagagctgctcaggccatgcatgaagtggtgttatctaacaaggaaaaatattctccaaatgagaatgctgaagagagtggtagtgctaacgttgaagcactacacagagacaatattgagtcaacatctacttcatcactctcagctgatgaaccagttgtagttgggacagaggaaattgcaagggttgcctcattatggtctgggataccagtacagcagttgactgccgacgataaaaaacttctagtaggactggacgacgaactcagaaaacgtgtcattggccaagatgatgctgttgtggccatatctcgtgcagtgaagagatcacgtgttggccttaacgatcctgatagacctattgctacgctgcttttctgtggtccaacaggagttggtaaaacagagctcaccaaagctctagcagctagttattttggatcggaatctgctatgcttaggttagacatgagcgagtatatggagaggcacactgtgagcaagctcataggctctcctccagggtacattgggtatggtgaaactggtactttgacagaagcagtcaggagaaaaccatttactgtggtattgttggatgagatagagaaagctcaccctgatattttcaacatccttctccaaatatttgaggatggacatttgacagactcacagggtcgcagggtttccttcaaaaatacgttgattgtcatgacttcgaatgttggttcaacatcaatttcaaaaggaagacagagcataggtttcttgaaggaagataccgagtcaggctcatacttcgcaatgaaatccttagtgatggaagagctcaaggcatttttccgtccagagttgctcaatagaatcgacgagatggttgtgttccgtcctctggagaagactcagatgctggccattcttgatatcatcctaaaggaagtcaagggccgacttttggccctcgggataggtttggaggtgtctgatgcaatgaaggacctgatatgccaagagggctacgacaaaagctatggcgctcggcctctgaggagagctgtcacccacattatcgaggatgtcatcagcgaagcgattctttttggcgagttcaagcccggtgacacgatactgatggacatcgatgcagaggggaagccatgcatgggccatctggaccaacagatcgtccaggtctctgacccaacacgggcaatctgaagctgtgttggaccttttccagtgtagtagattagggatctaaatcttttattctttcaagatagagattattaattctttgttacgtagatatatagagtagtatttcattatgtatatatatcaaccagatgatccagataggggaatctggtcagtcattggagttatttgaaattttcatccagctgtatgtatattgttgaattgtttctgattcaactggccatatatatcatcattaaactatcttcatcggcttacccatttatctcttattttaaacttcaatatagtctatagctgtgca

SEQ ID NO: 50370 - DNA, 304 bp, Zea Mays
atgtgcgtgttgagcgtggagacttgggcgagcaggcggtccagcttctcttcaatggaatcctcaggaacgttccccatggagccggacagaggtgtcgatgctccactggtctttgataccaaattgatgcggccacctctggagggcctctttggcgaccgtagaggtgagaggaggaggaggctagaaccaggaacagatctgagagggatgataaatcatcaaagaattgagataatacgggcagttactggtgaaaggtacagccatgccacagctaatgtaggcacccgtgatcggc

SEQ ID NO: 50371 - DNA, 3916 bp, Zea Mays
taatcacccttgcaaattgactttatatatggaagcgggtatggacgtatggttggattcctgcgtggcgcactgggccctcggtgagagggaaagattctaacaactaaagaaaaacaaaattgccatggtggcccccacagtttttgttgttacgacaacaccaaaaaatgaagggcaaaaccaagcgaagccaggccaagcaactttcttgttgtcctttcgtctcacagcggcagcaggatccattagatgctcgggtggagcactgagccttttccggcggtgagttgagctgagcagaaccgtgctacctagccaatccacaggaggaagagaggagaacgggagccctttttatgacaagaagggaggcgccaggcgtgtgattaacagttttgaagggagagttacctgcatctgcatggaagagggaggcgacccgcagcttccgagcatctccgcacgcaccacgtccgaaggcgcggggggcgtcgacttggatctccttgagcagctactgtctgacgacaacggctggctcgagacgggtggcgcgagcccctcctccgtggaggagcagttcagccaggccctgtcctacatccgagatacgcagagcgacggcgacgtcctcgtgcagctctgggtgccggtcaaccacgatgacgggaaactggtgctgaccacaagcgagcaaccgttcacgctcgaccaccgctccgacagcctcctccggttcagggaggtgtccaccaagtaccagttctcggccaatgttaagtcgggggattcgccggggctgtcagggagggtctttatcggcaggctccccgagtggtcgccggacatcaggtacttcaccagctacgagtatcccagggtaagggatgcacaatacctcgatgtccatggcaccatgggtctgccagtgttcgagaagggaagctacaactgcctgggcgtcatcgagctgatcatgataaggcagaagataaacttcacctctgagctcaacaccatttgcagtgctctccaggtatgaaacctcctcaatctcactgcccctgaaagttcagagaagtatatcgcaagtgtgttaggttaggagatcaaatcaccagcttagtgcaggaaagaaaaacagcagtctagccactgatgccaccttgaagtacctgcatgccaattattactgtagaaaatcaatagtgtttccaggtccgggctttagtaatagtgaatagggtgtttgcaggcagttaatctcagaagtacagaagtttcaagcattccacgcataaaggtgagcagaaaagaaattctacactcactgtgtcacaactttgaattttgggaaataattcatttttccaaaaatatgaatctcaggacctctacattccaacttaatgtaggcatgatatgaaatctacttaaaattgcatgtttgtgaagaaaaaaaactatgcacgtttcaatttacctaccctagctcagctactccctctgttccagattataagtcgctttggttcttttagtacatagatcctcttttgtatctagatatatgttatatttagacacatggaaaaaattatgtaacaaaaaaaatcaaagcgacttataatttggaaaagagagaatataaagcaagtgtgtaagatattgagacacgaacaccaatgcttatatcttctcacttatgacttcatggcaactcctattgattatccaccagttcagcactgcttcctacaaagatgctttaccagagatactggaggtcctgagagcagcctgcttgacccacaagctgccattagctcagacatgggtcacatgtgctcaacaagggaaacgaggcaaccgacattccgacgagaactaccggtactgcatctccaccattgatgaagcatgctttgtgaatgaagccgagatgcggggcttccatgagacctgctccgagcaccaccttctgcgtggggaggggttaaaaggtgcagtggcgatccgcctgcggtgcacacgcactgggacaacagactttgtgctggaattctttctgccaacagattgtgaagcactggaggaccagaacatagtgctggactccttgtcaggcaccatgcgaagtgtttgccagaccctacgtgtggtcacaaatagagagatggaagacgaagcggtgctggaaatgaacgagctgaactcttttactcctcatgggaaggacaaagttgagttgtcctttggaggcaattcagcagatcgtagaggagaggcctcttggacaagtctggcaggaacatcacagcaagaatctgagttagctgcattgcggatgcatggaatgttctcacctggggggcagggtccatctctatctggtgttcaggcaactgctgaaggtagcaaggcaaaaaggcgtacaaaggccgagaagaccgttagtttgcagattcttcggcagtactttgctggtagcctaaaagatgcagcaaggagccttggaggtgacaactcaagatcagcaggcataatgtcactcagtagattgtgtgtatatggatcatcatctatcacctatgtgctctccgcccgcggaacttcaggtgagctcgtgctctttgtgcgtcgacctgaaatggtgcttgattacggcggaattcaaccacttctattcaactctctaagttctttgacgaaatggatgaagatggaaatttgagacatagtaatgacccgagccttgtaaacaagaggggtaacaatggtgggagacttgcaagccattcaacggttgcaaggcaagatccacctcgctcttatcctagagttgtcgaaaaagttcaacccaggaggctagaactggcaaggcaagagccaccaatgaggcaagcgaacccacaaaccctccaaagttcaagtttgcaagccaaacctcaaggtgcgctcaacaagcagtctaataatccctcaagttatgaatctagaccggggaaccagtaaaggcagctcagcagagaccatttggtgacatgaaacctaaacaaactcgagagcatgttgttgtcgaaagaaaacctatggcaagccagacagataaatcaaggcccggcgctcgaccttcggcaggagccaagctagagttggcaaagccaaagttttacgatgatggtctggatgacaacaggaagctggaagcagcgaagcggtaccaggaagcggagaatggttcgtggtctctattttaacactcacaagagaattaagaatgaggattttgaagtgttagcaaagtcacatcaactgcaagcaaacagctggtgggggaagctagatatcaggggaggagagaaaaacattgctaaagcacaaagaaaaactgaggcaagggatttcaaagcaaatgaaggttctgaatatctgcaaagatctagcacctgctgatttagctgaggacgaagttctgttgcaaacggttttagatgaaaccattaacactctgagacttaagtttgaaaagattctgggaattcttcacggatcatgtagaatggatcacctagaattagttgacgttgcctgagtctagacactaagttgcgagagagaactctgttctttagttgcacttttaatttgaaatatgttgcacgttcacaactacatttatgctgatttacaatggtcatccaaattccaaatcttaaataaatatgtgatttgacaacatgcatattgttaagcctgttacaaatattagctttattttatttattgcatgagatgaagttttataaaggaattatatagcattaatacttgtgagtattcttcatgcttttcaagatctgagtgcattcgtatttcgtgatgaataattaattaaaactatttatttgaa

SEQ ID NO: 50372 - DNA, 1136 bp, Zea Mays
taatcacccttgcaaattgactttatatatggaagcgggtatggacgtatggttggattcctgcgtggcgcactgggccctcggtgagagggaaagattctaacaactaaagaaaaacaaaattgccatggtggcccccacagtttttgttgttacgacaacaccaaaaaatgaagggcaaaaccaagcgaagccaggccaagcaactttcttgttgtcctttcgtctcacagcggcagcaggatccattagatgctcgggtggagcactgagccttttccggcggtgagttgagctgagcagaaccgtgctacctagccaatccacaggaggaagagaggagaacgggagccctttttatgacaagaagggaggcgccaggcgtgtgattaacagttttgaagggagagttacctgcatctgcatggaagagggaggcgacccgcagcttccgagcatctccgcacgcaccacgtccgaaggcgcggggggcgtcgacttggatctccttgagcagctactgtctgacgacaacggctggctcgagacgggtggcgcgagcccctcctccgtggaggagcagttcagccaggccctgtcctacatccgagatacgcagagcgacggcgacgtcctcgtgcagctctgggtgccggtcaaccacgatgacgggaaactggtgctgaccacaagcgagcaaccgttcacgctcgaccaccgctccgacagcctcctccggttcagggaggtgtccaccaagtaccagttctcggccaatgttaagtcgggggattcgccggggctgtcagggagggtctttatcggcaggctccccgagtggtcgccggacatcaggtacttcaccagctacgagtatcccagggtaagggatgcacaatacctcgatgtccatggcaccatgggtctgccagtgttcgagaagggaagctacaactgcctgggcgtcatcgagctgatcatgataaggcagaagataaacttcacctctgagctcaacaccatttgcagtgctctccaggcagttaatctcagaagtacagaagtttcaagcattccacgcataaagatcggagcacaaatttgagatgttcctgaagtgataaattacactaaat

SEQ ID NO: 50373 - DNA, 1476 bp, Zea Mays
taatcacccttgcaaattgactttatatatggaagcgggtatggacgtatggttggattcctgcgtggcgcactgggccctcggtgagagggaaagattctaacaactaaagaaaaacaaaattgccatggtggcccccacagtttttgttgttacgacaacaccaaaaaatgaagggcaaaaccaagcgaagccaggccaagcaactttcttgttgtcctttcgtctcacagcggcagcaggatccattagatgctcgggtggagcactgagccttttccggcggtgagttgagctgagcagaaccgtgctacctagccaatccacaggaggaagagaggagaacgggagccctttttatgacaagaagggaggcgccaggcgtgtgattaacagttttgaagggagagttacctgcatctgcatggaagagggaggcgacccgcagcttccgagcatctccgcacgcaccacgtccgaaggcgcggggggcgtcgacttggatctccttgagcagctactgtctgacgacaacggctggctcgagacgggtggcgcgagcccctcctccgtggaggagcagttcagccaggccctgtcctacatccgagatacgcagagcgacggcgacgtcctcgtgcagctctgggtgccggtcaaccacgatgacgggaaactggtgctgaccacaagcgagcaaccgttcacgctcgaccaccgctccgacagcctcctccggttcagggaggtgtccaccaagtaccagttctcggccaatgttaagtcgggggattcgccggggctgtcagggagggtctttatcggcaggctccccgagtggtcgccggacatcaggtacttcaccagctacgagtatcccagggtaagggatgcacaatacctcgatgtccatggcaccatgggtctgccagtgttcgagaagggaagctacaactgcctgggcgtcatcgagctgatcatgataaggcagaagataaacttcacctctgagctcaacaccatttgcagtgctctccaggtatgaaacctcctcaatctcactgcccctgaaagttcagagaagtatatcgcaagtgtgttaggttaggagatcaaatcaccagcttagtgcaggaaagaaaaacagcagtctagccactgatgccaccttgaagtacctgcatgccaattattactgtagaaaatcaatagtgtttccaggtccgggctttagtaatagtgaatagggtgtttgcaggcagttaatctcagaagtacagaagtttcaagcattccacgcataaaggagcatgattcactgacttgtgaaccattacctttatgggaaaagaaaaactccataagcagccctctggccgtctgactgaatctctaaaaatgttgtgattggcttcttatatttcttctcatcgccttttatcaggaagaccatcaaaccaaactattcaaacttca

SEQ ID NO: 50374 - DNA, 2473 bp, Zea Mays
taatcacccttgcaaattgactttatatatggaagcgggtatggacgtatggttggattcctgcgtggcgcactgggccctcggtgagagggaaagattctaacaactaaagaaaaacaaaattgccatggtggcccccacagtttttgttgttacgacaacaccaaaaaatgaagggcaaaaccaagcgaagccaggccaagcaactttcttgttgtcctttcgtctcacagcggcagcaggatccattagatgctcgggtggagcactgagccttttccggcggtgagttgagctgagcagaaccgtgctacctagccaatccacaggaggaagagaggagaacgggagccctttttatgacaagaagggaggcgccaggcgtgtgattaacagttttgaagggagagttacctgcatctgcatggaagagggaggcgacccgcagcttccgagcatctccgcacgcaccacgtccgaaggcgcggggggcgtcgacttggatctccttgagcagctactgtctgacgacaacggctggctcgagacgggtggcgcgagcccctcctccgtggaggagcagttcagccaggccctgtcctacatccgagatacgcagagcgacggcgacgtcctcgtgcagctctgggtgccggtcaaccacgatgacgggaaactggtgctgaccacaagcgagcaaccgttcacgctcgaccaccgctccgacagcctcctccggttcagggaggtgtccaccaagtaccagttctcggccaatgttaagtcgggggattcgccggggctgtcagggagggtctttatcggcaggctccccgagtggtcgccggacatcaggtacttcaccagctacgagtatcccagggtaagggatgcacaatacctcgatgtccatggcaccatgggtctgccagtgttcgagaagggaagctacaactgcctgggcgtcatcgagctgatcatgataaggcagaagataaacttcacctctgagctcaacaccatttgcagtgctctccaggcagttaatctcagaagtacagaagtttcaagcattccacgcataaaggtgagcagaaaagaaattctacactcactgtgtcacaactttgaattttgggaaataattcatttttccaaaaatatgaatctcaggacctctacattccaacttaatgtaggcatgatatgaaatctacttaaaattgcatgtttgtgaagaaaaaaaactatgcacgtttcaatttacctaccctagctcagctactccctctgttccagattataagtcgctttggttcttttagtacatagatcctcttttgtatctagatatatgttatatttagacacatggaaaaaattatgtaacaaaaaaaatcaaagcgacttataatttggaaaagagagaatataaagcaagtgtgtaagatattgagacacgaacaccaatgcttatatcttctcacttatgacttcatggcaactcctattgattatccaccagttcagcactgcttcctacaaagatgctttaccagagatactggaggtcctgagagcagcctgcttgacccacaagctgccattagctcagacatgggtcacatgtgctcaacaagggaaacgaggcaaccgacattccgacgagaactaccggtactgcatctccaccattgatgaagcatgctttgtgaatgaagccgagatgcggggcttccatgagacctgctccgagcaccaccttctgcgtggggaggggttaaaaggtgcagtggcgatccgcctgcggtgcacacgcactgggacaacagactttgtgctggaattctttctgccaacagattgtgaagcactggaggaccagaacatagtgctggactccttgtcaggcaccatgcgaagtgtttgccagaccctacgtgtggtcacaaatagagagatggaagacgaagcggtgctggaaatgaacgagctgaactcttttactcctcatgggaaggacaaagttgagttgtcctttggaggcaattcagcagatcgtagaggagaggcctcttggacaagtctggcaggaacatcacagcaagaatctgagttagctgcattgcggatgcatggaatgttctcacctggggggcagggtccatctctatctggtgttcaggcaactgctgaaggtagcaaggcaaaaaggcgtacaaaggccgagaagaccgttagtttgcagattcttcggcagtactttgctggtagcctaaaagatgcagcaaggagccttggaggagcatgattcactgacttgtgaaccattacctttatgggaaaagaaaaactccataagcagccctctggccgtctgactgaatctctaaaaatgttgtgattggcttcttatatttcttctcatcgccttttatcaggaagaccatcaaaccaaactattcaaacttca

SEQ ID NO: 50375 - DNA, 2226 bp, Zea Mays
taatcacccttgcaaattgactttatatatggaagcgggtatggacgtatggttggattcctgcgtggcgcactgggccctcggtgagagggaaagattctaacaactaaagaaaaacaaaattgccatggtggcccccacagtttttgttgttacgacaacaccaaaaaatgaagggcaaaaccaagcgaagccaggccaagcaactttcttgttgtcctttcgtctcacagcggcagcaggatccattagatgctcgggtggagcactgagccttttccggcggtgagttgagctgagcagaaccgtgctacctagccaatccacaggaggaagagaggagaacgggagccctttttatgacaagaagggaggcgccaggcgtgtgattaacagttttgaagggagagttacctgcatctgcatggaagagggaggcgacccgcagcttccgagcatctccgcacgcaccacgtccgaaggcgcggggggcgtcgacttggatctccttgagcagctactgtctgacgacaacggctggctcgaggtggtctcacgctcgcccaactcggtagcgtttcctccactctcagccttcttctcggctgacgtgacagccaccacagtgacgacgacggcgacggcagcgccggccgcgaacgccagctggtgaattcagacgggtggcgcgagcccctcctccgtggaggagcagttcagccaggccctgtcctacatccgagatacgcagagcgacggcgacgtcctcgtgcagctctgggtgccggtcaaccacgatgacgggaaactggtgctgaccacaagcgagcaaccgttcacgctcgaccaccgctccgacagcctcctccggttcagggaggtgtccaccaagtaccagttctcggccaatgttaagtcgggggattcgccggggctgtcagggagggtctttatcggcaggctccccgagtggtcgccggacatcaggtacttcaccagctacgagtatcccagggtaagggatgcacaatacctcgatgtccatggcaccatgggtctgccagtgttcgagaagggaagctacaactgcctgggcgtcatcgagctgatcatgataaggcagaagataaacttcacctctgagctcaacaccatttgcagtgctctccaggagcatgattcactgacttgtgaaccattacctttatgggaaaagaaaaactccataagcagccctctggccgtctgactgaatctctaaaaatgttgtgattggcttcttatatttcttctcatcgccttttatcaggaagaccatcaaaccaaactattcaaacttcaatcgatggtaatcattaacccccttttatgtgaactaatactcatgttttcacaaaatatttgattctctgaagctgtttccaaatgcaggtatattgcatggatattcttggcagcactataccatctgcccagttttcagtcaatgggcttggatttgcggatgaatctttccatcttcctcaccatttatatttcttctataattttcttgatggtcttccataccatatttcttggcctttggtatttgggttttgtttctcgtatggcagagaaaaaaccagagatgcttactataatacaaaactgtgcagttataagcatagcttgctgtgtgttttatagccattgtggtaataggactgtttcaagcgacaaatctattgatcgtagaactgctagctggattgtattctcactttggacaaagcatgatgacaacacactgatcccaaggctattgcgtatgcataaatttaaactacagatttgctcctcctggtttcctccagttagtatacatacaggtaaattgaaatcagtctttgaaatctattatgttgtttatggttaagagttattgcgtatgcataatttaaacaacagataaatataggtttccttccagcttgcttagctagccacaaacatttatagggagcaattggtgccaacatatgcaacagcctcggcagcgggcaagaggattgatcgacttttgatccgaaaatgcaatccacacgagacttaaatgctcagaatcaagcaaaacaatacatggtatacaattcaaaaaattgctcctagctaactgagtataaaccaaacttcattggagagtcgatcataccttggtcaaggcctgcgcggttgattcttatc

SEQ ID NO: 50376 - DNA, 1670 bp, Zea Mays
ctggacgatgctgtgattggaatatgctagaaatattgaaactaacttgcaagttaacgattttttctggaaattgctgagcttagagtacaccattctcgccttcgttgacaacagctgtcaaaatcctaaaatcataggaagtagaatgagagagcaatccatggacagtgcagcagttaattataagcaaatgaaacaaagtgtttttataggggagagaaaacatttgaagtctcctaataaacaagaattgatccagatcagcactaatagaatataatccagatgtcaacgacttcatagacattgtttgttgtagtctacaacatataaattttgccattgccaaaatagcatgattattagcaatagcagatggattgtcgatttgctacagctcctcataatgcttcagttagtttcttaaggaagtaaactgcaacatataaattttggaaggaagcaatggtcaatgtgcctcctaataaacaattgtaaacacaaattatgatgtgtttgccatctaaaaatcctacaccatggactacatcaatgtaaattcgatgcttgccacactttctaagcaccatgtcccacacttcaaagtttttttctagcctgaagaagttttcttagttgcataagctacaaaaacccttaggcatcaactaattaggaatcgcaggatactatgttgcctgctacatcatattaataacacatactataataatgagctacaaaaacctaaaaaaatcttgtatgtcccattgtttacacagtaatcaaaatgtgagcatttaaatcatagtgttgtgtttcatgagagaactaataaatgcactgatcttcagaaacaaataatcccaacagttgttttcatgagagagaagcacagaaactggtacagtgacaagggatcatgtacctgactgtgcaagctcagtgtgccgtctaattgggacagcttcgttattagcatctcttacaatccaaggaaacagcaagcaatatttatttaagtataaaaatcttgctcatgtacataaccagtgggatttagaaagtgatataatcgaatggaaaattcaagaaaataattgtaacctgtgggagcgtggtgatggaaatcacgaaccttttgtccgtggacttggtcaaattcagttaaaatttggagacttcaaaagttcattaggtagctttgagaaagttttggaggtgcaccctgaaaattgtgaaagtttgaaggctattggtcacatacatgcaaaatctggggaaactgaaaaagctatagaaaccttcaaggaagttacccgtattgacccaaaagatcatcaggcatttgtggagcttggtgaattgttggtagaatctgactgggctgctgctatggaatacttgaagacatgggatttagaaagtgatatagtcgaatggaaaattcaagaaaataattgtaacctgtgggagcgtggtgatggaaatcacgaaccttttgtccgtggtgagccatgacccctcttcccgacgatggagctccccccagaaaacgacttctatttcacaggtatcattgcacatgcactacatgatcagatcaatgtattcctcccatagatcttgctggagacagaaagaaagaacaatggttaagagaggac

SEQ ID NO: 50377 - DNA, 2314 bp, Zea Mays
attgaaactaacttgcaagttaacgattttttctggaaattgctgagcttagagtacaccattctcgccttcgttgacaacagctgtcaaaatcctaaaatcataggaagtagaatgagagagcaatccatggacagtgcagcagttaattataagcaaatgaaacaaagtgtttttataggggagagaaaacatttgaagtctcctaataaacaagaattgatccagatcagcactaatagaatataatccagatgtcaacgacttcatagacattgtttgttgtagtctacaacatataaattttgccattgccaaaatagcatgattattagcaatagcagatggattgtcgatttgctacagctcctcataatgcttcagttagtttcttaaggaagtaaactgcaacatataaattttggaaggaagcaatggtcaatgtgcctcctaataaacaattgtaaacacaaattatgatgtgtttgccatctaaaaatcctacaccatggactacatcaattgggatttagaaagtgatataatcgaatggaaaattcaagaaaataattgtaacctgtgggagcgtggtgatggaaatcacgaaccttttgtccgtggacttggtcaaattcagttaaaatttggagacttcaaaagttcattaggtagctttgagaaagttttggaggtgcaccctgaaaattgtgaaagtttgaaggctattggtcacatacatgcaaaatctggggaaactgaaaaagctatagaaaccttcaaggaagttacccgtattgacccaaaagatcatcaggtacttgcttccccctcccctcaaccattactttcatggcttcatgtattcgggtcaaaagaagtgctgtaacatggtcccaaaatataattctgccactaatttgtttctaacatgtcaatacataaatagtacaactgctttccaggatgaatgtactgatgaaattttcaaatgctcaatctgaacataaattactccatatgaacatggcaaaaaatatatatttttgaacactgaattttggtccatctctggatctttgaatgctgatgatttgcaacaatgaagatgctgatctaggatgaagttgattgaaaacttggaatgctagcatcttacagtcagttttttgttgtcgatttgatctgtatttggtccatgaaaggaacacactacatttgccctaatgtgtagttttgattggtatacagattttctattgttaccttaattattaatctataatgagaaacattctttatcttcatagtttctctcacgtctgctatatttgttttagaaaaggataagacacccataccaagcttcatgattgcaaaaaaaaggacatttgttgtttagctgttttttcttttgactaatttatgtgtcacagtactacatttttgggacttactacagtgtcatgtattatgaagttactggacgatagtttcagagtgattaaccaaaaaatgaataaaacaaagtgtggaagctgttcaatatcagatgatgagtatgatgtctattcaaattacttcctgtttgtgtttagtcctagactcctagttgcattcttactctccgttatgaggccacacattaactttaccgatcgattatttcatgtttgcatataacctattttaatgagattattttgcaggcatttgtggagcttggtgaattgttggtagaatctgactgggctgctgctatggaatacttgaagacagtaagcttttcagtcagttctgtataaatttctatgattccccccatttttctatcgaaggacgctcgtgattcagcataactaatcatgaaaagttagctttgagcgttgtgttgccctccaaaactgtttgacttaaggcataaatccaaaactgtacctgactgtgcaagctcagtgtgccgtctaattgggacagcttcgttattagcatctcttacaatccaaggaaacagcaagcaatatttatttaagtataaaaatcttgctcatgtacataaccagtgggatttagaaagtgatatagtcgaatggaaaattcaagaaaataattgtaacctgtgggagcgtggtgatggaaatcacgaaccttttgtccgtggtgagccatgacccctcttcccgacgatggagctccccccagaaaacgacttctatttcacaggtatcattgcacatgcactacatgatcagatcaatgtattcctcccatagatcttgctggagacagaaagaaagaacaatggttaagagaggac

SEQ ID NO: 50378 - DNA, 3006 bp, Zea Mays
attgaaactaacttgcaagttaacgattttttctggaaattgctgagcttagagtacaccattctcgccttcgttgacaacagctgtcaaaatcctaaaatcataggaagtagaatgagagagcaatccatggacagtgcagcagttaattataagcaaatgaaacaaagtgtttttataggggagagaaaacatttgaagtctcctaataaacaagaattgatccagatcagcactaatagaatataatccagatgtcaacgacttcatagacattgtttgttgtagtctacaacatataaattttgccattgccaaaatagcatgattattagcaatagcagatggattgtcgatttgctacagctcctcataatgcttcagttagtttcttaaggaagtaaactgcaacatataaattttggaaggaagcaatggtcaatgtgcctcctaataaacaattgtaaacacaaattatgatgtgtttgccatctaaaaatcctacaccatggactacatcaatgtaaattcgatgcttgccacactttctaagcaccatgtcccacacttcaaagtttttttctagcctgaagaagttttcttagttgcataagctacaaaaacccttaggcatcaactaattaggaatcgcaggatactatgttgcctgctacatcatattaataacacatactataataatgagctacaaaaacctaaaaaaatcttgtatgtcccattgtttacacagtaatcaaaatgtgagcatttaaatcatagtgttgtgtttcatgagagaactaataaatgcactgatcttcagaaacaaataatcccaacagttgttttcatgagagagaagcacagaaactggtacagtgacaagggatcatgtacctgactgtgcaagctcagtgtgccgtctaattgggacagcttcgttattagcatctcttacaatccaaggaaacagcaagcaatatttatttaagtataaaaatcttgctcatgtacataaccagtgggatttagaaagtgatataatcgaatggaaaattcaagaaaataattgtaacctgtgggagcgtggtgatggaaatcacgaaccttttgtccgtggtgagcctcccacaccagcttgatcataaactacctatatatgacatccaaaattaatagttctaattttcttttcaatcttcttccttaggtttgcacatgatgcatgcagcctagattagcatgattggtcatttggagcactccactgtatattaagttgatatttataacacaatttgatctgaaccaggacttggtcaaattcagttaaaatttggagacttcaaaagttcattaggtagctttgagaaagttttggaggtgcaccctgaaaattgtgaaagtttgaaggctattggtcacatacatgcaaaatctggggaaactgaaaaagctatagaaaccttcaaggaagttacccgtattgacccaaaagatcatcaggtacttgcttccccctcccctcaaccattactttcatggcttcatgtattcgggtcaaaagaagtgctgtaacatggtcccaaaatataattctgccactaatttgtttctaacatgtcaatacataaatagtacaactgctttccaggatgaatgtactgatgaaattttcaaatgctcaatctgaacataaattactccatatgaacatggcaaaaaatatatatttttgaacactgaattttggtccatctctggatctttgaatgctgatgatttgcaacaatgaagatgctgatctaggatgaagttgattgaaaacttggaatgctagcatcttacagtcagttttttgttgtcgatttgatctgtatttggtccatgaaaggaacacactacatttgccctaatgtgtagttttgattggtatacagattttctattgttaccttaattattaatctataatgagaaacattctttatcttcatagtttctctcacgtctgctatatttgttttagaaaaggataagacacccataccaagcttcatgattgcaaaaaaaaggacatttgttgtttagctgttttttcttttgactaatttatgtgtcacagtactacatttttgggacttactacagtgtcatgtattatgaagttactggacgatagtttcagagtgattaaccaaaaaatgaataaaacaaagtgtggaagctgttcaatatcagatgatgagtatgatgtctattcaaattacttcctgtttgtgtttagtcctagactcctagttgcattcttactctccgttatgaggccacacattaactttaccgatcgattatttcatgtttgcatataacctattttaatgagattattttgcaggcatttgtggagcttggtgaattgttggtagaatctgactgggctgctgctatggaatacttgaagacagtaagcttttcagtcagttctgtataaatttctatgattccccccatttttctatcgaaggacgctcgtgattcagcataactaatcatgaaaagttagctttgagcgttgtgttgccctccaaaactgtttgacttaaggcataaatccaaaactgtacctgactgtgcaagctcagtgtgccgtctaattgggacagcttcgttattagcatctcttacaatccaaggaaacagcaagcaatatttatttaagtataaaaatcttgctcatgtacataaccagtgggatttagaaagtgatatagtcgaatggaaaattcaagaaaataattgtaacctgtgggagcgtggtgatggaaatcacgaaccttttgtccgtggtgagccatgacccctcttcccgacgatggagctccccccagaaaacgacttctatttcacaggtatcattgcacatgcactacatgatcagatcaatgtattcctcccatagatcttgctggagacagaaagaaagaacaatggttaagagaggac

SEQ ID NO: 50379 - DNA, 1366 bp, Zea Mays
caccattctcgccttcgttgacaacagctgtcaaaatcctaaaatcataggaagtagaatgagagagcaatccatggacagtgcagcagttaattataagcaaatgaaacaaagtgtttttataggggagagaaaacatttgaagtctcctaataaacaagaattgatccagatcagcactaatagaatataatccagatgtcaacgacttcatagacattgtttgttgtagtctacaacatataaattttgccattgccaaaatagcatgattattagcaatagcagatggattgtcgatttgctacagctcctcataatgcttcagttagtttcttaaggaagtaaactgcaacatataaattttggaaggaagcaatggtcaatgtgcctcctaataaacaattgtaaacacaaattatgatgtgtttgccatctaaaaatcctacaccatggactacatcaattgggatttagaaagtgatataatcgaatggaaaattcaagaaaataattgtaacctgtgggagcgtggtgatggaaatcacgaaccttttgtccgtggacttggtcaaattcagttaaaatttggagacttcaaaagttcattaggtagctttgagaaagttttggaggtgcaccctgaaaattgtgaaagtttgaaggctattggtcacatacatgcaaaatctggggaaactgaaaaagctatagaaaccttcaaggaagttacccgtattgacccaaaagatcatcaggcatttgtggagcttggtgaattgttggtagaatctgactgggctgctgctatggaatacttgaagacagtaagcttttcagtcagttctgtataaatttctatgattccccccatttttctatcgaaggacgctcgtgattcagcataactaatcatgaaaagttagctttgagcgttgtgttgccctccaaaactgtttgacttaaggcataaatccaaaactgtacctgactgtgcaagctcagtgtgccgtctaattgggacagcttcgttattagcatctcttacaatccaaggaaacagcaagcaatatttatttaagtataaaaatcttgctcatgtacataaccagtgggatttagaaagtgatatagtcgaatggaaaattcaagaaaataattgtaacctgtgggagcgtggtgatggaaatcacgaaccttttgtccgtggtgagccatgacccctcttcccgacgatggagctccccccagaaaacgacttctatttcacaggtatcattgcacatgcactacatgatcagatcaatgtattcctcccatagatcttgctggagacagaaagaaagaacaatggttaagagaggac

SEQ ID NO: 50380 - DNA, 431 bp, Zea Mays
ggaggctgtagtcgaccggcgtggcgcggcagacggggcaggtggggtgctgcctcagccaggcgtcgatgcaggtcgcgtggaaggcgtggccgcaggcgggcagcacgcgcaccacgtccttggcctcgtactcctccaggcacacggtgcacctgcgtccacagagagagagagagcaccagcgctcttgtcagtcagtctggaggggagggggattctgcaattcctcttgcagaatgcagagtcgtcaggatttgctacgtgattgctgatcgtcatgtatcatgcatgattcatgtatgttgtcaacctcagtctagcggagtcggcaatcaatatggccttattgaggtgtgataagccatttttgaaaactgcatctgcacaccacttaaactacaatttttatgtttcagcattttttttct

SEQ ID NO: 50381 - DNA, 109 bp, Zea Mays
cacgcgacctcggcagttcggggcgggggcgaggcggacggctgcatgagcagtggcgtgcacgggcggtcgaggcaggccgttgcgcgtcggtccaagcgcacacgcg

SEQ ID NO: 50382 - DNA, 699 bp, Zea Mays
gagcaggcagagcacacaaaccattcccccccagctcctcacttttcgccgtcgccctgcccccacagacatccgacagtctcatcagcgtctccccgctttagggtggccaaggtcaccggctccaccacagcaagaactgctacatcatgaaggagaacgagcggctgcgcaaggcggccctgctgctgaaccaggagaaccaggcgctgctctccgagctcaagcaccgcctcgccaagtccgccgccggtggcggtggcggtggcagcaacagcaacgcggcagcggcgagccgcgcctcgcccaagcccggcgccgacgccgacgccgctgcgccgccgtctcatcatcaggccggcggcatgcctgcccccaagcccaagcccaagtaggctgcggctgcggctgcagtccgtcgcacggctgctgctgctgctgtcggatagtggtggccttcatggtgtttgttttagcgatcactttaattagctccggatgttacttagtttcaggaatgtttgtctagttttagttgatgggcactcatgtgtggcaatgatcttgcgatgaatggataactagctagatggatcgatcggtcgatcgtcggggggtatagagaggtgtgcgtttctgaactctgatgagagcggagcttcttcagtcttcgattcgcaaatggtttgaggagagtgg

SEQ ID NO: 50383 - DNA, 1928 bp, Zea Mays
aaatcaatcacatcataaatataactaacagataatatatagagaatcatgtagagacagacttgtatttgtttatttagtcctctttcaatgttcagttaagtctatgcttctagctcactacatcattccgattgagttttaatttagagacaaaaccaaaatcaaagagagaggactagtttctagcccaatccacggtggagcccagcctccactctccagtccggttttcagttggtagccacgcgcacggggacggggttctccctttgctgtcgcccccgcctccgattccgcgatgataacccaccatccctccctgatccgcccatctgtcctcaccctccgtgccgacgtcctccgtcggcgcccaacactgcacgccgtcgcctccgcgccgcctccccgattgtggtctttgcgcgccaccaccggtggaacttcgcccgtcagtggcgatggaggcaaacgcgctgtgccgcttcccacgcgtgggcccgccctgctcggcttcgtgcgtagcaacttcctcccgcttgctctcattggtgggatcatattgggtcttctagatcctactcttggatgccttgcacacaaatactccctgtcaaagtacagcacttttgggatattcgttatctcaggactgaccctgcgcactagggagcttggtgcagcgttagaagcttggcctgctggactatatggactagtatgaccttatgtttgttctgtggctgccagacttagggcatgtttggtttgtggctaaatgtgccacactttgcctaaggttagtcattcaaattgaataactaaccttgggcaaaaaagttaggcaaagtgtggcaattgaggcaacaaaccaaacatgcccttacctattctaatatcattctgtggcacaactataagtatgttggaataaagttctcactgccgtttgatccaaggcataattcaaggaaattccatgccattgattttctggcatttatttcttaccaggagtgctaattgcctttctgattatttttttcagttcctatacttctattggtcatcaatggagcacccagcacctgcaataagtttgctaatgtattatattattgtatataattgcagggatctattttgctgtttacaccctttcttgctcagtttattatgcaagttcagttcttcccccctgaatttatcactggtatatgggtcaagcacatgcctgcttttcatgatggattttctgtcttcattccaccattttttgttgccatcgattaactcatacttttgtgctccttatagcttgtttttttggcatcttacagggttagctatgttttgctgcatgccaacaacactatcaagtggagtcacactaacacagcttgttggtggtaactctgcacttgctcttgcaatgacagttgcatccaatttacttggcattataattgtacctctttctcttgcaaaatacattagcaatggtgttggggtttccttgcctactgagcaattattcaaaagtcttgtcaccagccttctaatccctcttattatagggaagactatagtgccatcttgaaatatctgaagcttcctggagacacttatgatggcttgttctttgtcaggttgctcgagaaacctcaaaaggtattgctgattttgttgatggaaatcgacaaggcttttcagttgcaagtgctgttctcctcagcctagtatgtctctaatttgaacatatgccagttgacatgttatttacttgctctgtagctcccttgatttgtccttcagcatgtcatgcttttgggtccatatatatagtgcttcactgcttccagcccaattacccatcccttttggcgaagcgggtacaagagggaaactgatgcatgcataaacctatc

SEQ ID NO: 50384 - DNA, 2596 bp, Zea Mays
ctctttcaatgttcagttaagtctatgcttctagctcactacatcattccgattgagttttaatttagagacaaaaccaaaatcaaagagagaggactagtttctagcccaatccacggtggagcccagcctccactctccagtccggttttcagttggtagccacgcgcacggggacggggttctccctttgctgtcgcccccgcctccgattccgcgatgataacccaccatccctccctgatccgcccatctgtcctcaccctccgtgccgacgtcctccgtcggcgcccaacactgcacgccgtcgcctccgcgccgcctccccgattgtggtctttgcgcgccaccaccggtggaacttcgcccgtcagtggcgatggaggcaaacgcgctgtgccgcttcccacgcgtgggcccgccctgctcggcttcgtgcgtagcaacttcctcccgcttgctctcattggtgggatcatattgggtcttctagatcctactcttggatgccttgcacacaaatactccctgtcaaagtacagcacttttgggatattcgttatctcaggactgaccctgcgcactagggagcttggtgcagcgttagaagcttggcctgctggactatatggactagtatgaccttatgtttgttctgtggctgccagacttagggcatgtttggtttgtggctaaatgtgccacactttgcctaaggttagtcattcaaattgaataactaaccttgggcaaaaaagttaggcaaagtgtggcaattgaggcaacaaaccaaacatgcccttacctattctaatatcattctgtggcacaactataagtatgttggaataaagttctcactgccgtttgatccaaggcataattcaaggaaattccatgccattgattttctggcatttatttcttaccaggagtgctaattgcctttctgattatttttttcagttcctatacttctattggtcatcaatggagcacccagcacctgcaataagtttgctaatgtattatattattgtatataattgcagggatctattttgctgtttacaccctttcttgctcagtttattatgcaagttcagttcttcccccctgaatttatcactgggttagctatgttttgctgcatgccaacaacactatcaagtggagtcacactaacacagcttgttggtggtaactctgcacttgctcttgcaatgacagttgcatccaatttacttggcattataattgtacctctttctcttgcaaaatacattagcaatggtgttggggtttccttgcctactgagcaattattcaaaagtcttgtcaccagccttctaatccctcttattatagggaagggcttattctgaatctcatgtaactacctttcatggggcctgtttgtttcggcttctggcagcttctggtcaccaaaagctgctgcggactgccaaacgctcagcttttaagacagcttctataaaattcgttggggcaaaaaccatccaaaatcaacataaacacataatcagttgagtcattgtgatagtaggaatccgtcactttctagatcctgagccctatgaacaactttatcttcctccacacgtaatcgtaatgatactcagattctcctcacagccagattctccccacagctagattttcagaaaagctgatcagaaaaaagctgaaccaaacaggcctatgatcaactgataagcatgatttgtttgtcgaatgtttaggagcacaatttaggcaagtattcatttcttttagtagattatcagccatgaaccacctaactacaatatatataaataaaaaactcgacctgtggggctaagacaccccccatgacattatattaagaaacacagatcgagaaaccccctcgaacccctgtcccacccagacacagcggcaccgtagcctgaccgaggccggaccttggacctgtgctttggtgtgggacagatgagaggacttttttaaccacaactaaaattcgctctcacggaaagtcgaacccaggacctaaggagtgctactcggaccacctaatcaactcaactagatgccctttcacatctgactacaatatgcaaagtataatttgaactcctctaccctaagtgcttataatgttctgtttattttgaatttagtccctctgtttcttaaacaagaaataattaaattcaccatatatcccccatgttttccttaaagactatagtgccatcttgaaatatctgaagcttcctggagacacttatgatggcttgttctttgtcaggttgctcgagaaacctcaaaaggtattgctgattttgttgatggaaatcgacaaggcttttcagttgcaagtgctgttctcctcagcctagtatgtctctaatttgaacatatgccagttgacatgttatttacttgctctgtagctcccttgatttgtccttcagcatgtcatgcttttgggtccatatatatagtgcttcactgcttccagcccaattacccatcccttttggcgaagcgggtacaagagggaaactgatgcatgcataaacctatc

SEQ ID NO: 50385 - DNA, 2104 bp, Zea Mays
ccaaaatcaaagagagaggactagtttctagcccaatccacggtggagcccagcctccactctccagtccggttttcagttggtagccacgcgcacggggacggggttctccctttgctgtcgcccccgcctccgattccgcgatgataacccaccatccctccctgatccgcccatctgtcctcaccctccgtgccgacgtcctccgtcggcgcccaacactgcacgccgtcgcctccgcgccgcctccccgattgtggtctttgcgcgccaccaccggtggaacttcgcccgtcagtggcgatggaggcaaacgcgctgtgccgcttcccacgcgtgggcccgccctgctcggcttcgtgcgtagcaacttcctcccgcttgctctcattggtgggatcatattgggtcttctagatcctactcttggatgccttgcacacaaatactccctgtcaaagtacagcacttttgggatattcgttatctcaggactgaccctgcgcactagggagcttggtgcagcgttagaagcttggcctgctggactatatggactaggatctattttgctgtttacaccctttcttgctcagtttattatgcaagttcagttcttcccccctgaatttatcactgggttagctatgttttgctgcatgccaacaacactatcaagtggagtcacactaacacagcttgttggtggtaactctgcacttgctcttgcaatgacagttgcatccaatttacttggcattataattgtacctctttctcttgcaaaatacattagcaatggtgttggggtttccttgcctactgagcaattattcaaaagtcttgtcaccagccttctaatccctcttattatagggaagggcttattctgaatctcatgtaactacctttcatggggcctgtttgtttcggcttctggcagcttctggtcaccaaaagctgctgcggactgccaaacgctcagcttttaagacagcttctataaaattcgttggggcaaaaaccatccaaaatcaacataaacacataatcagttgagtcattgtgatagtaggaatccgtcactttctagatcctgagccctatgaacaactttatcttcctccacacgtaatcgtaatgatactcagattctcctcacagccagattctccccacagctagattttcagaaaagctgatcagaaaaaagctgaaccaaacaggcctatgatcaactgataagcatgatttgtttgtcgaatgtttaggagcacaatttaggcaagtattcatttcttttagtagattatcagccatgaaccacctaactacaatatatataaataaaaaactcgacctgtggggctaagacaccccccatgacattatattaagaaacacagatcgagaaaccccctcgaacccctgtcccacccagacacagcggcaccgtagcctgaccgaggccggaccttggacctgtgctttggtgtgggacagatgagaggacttttttaaccacaactaaaattcgctctcacggaaagtcgaacccaggacctaaggagtgctactcggaccacctaatcaactcaactagatgccctttcacatctgactacaatatgcaaagtataatttgaactcctctaccctaagtgcttataatgttctgtttattttgaatttagtccctctgtttcttaaacaagaaataattaaattcaccatatatcccccatgttttccttaaagactatagtgccatcttgaaatatctgaagcttcctggagacacttatgatggcttgttctttgtcaggttgctcgagaaacctcaaaaggtattgctgattttgttgatggaaatcgacaaggcttttcagttgcaagtgctgttctcctcagcctagtatgtctctaatttgaacatatgccagttgacatgttatttacttgctctgtagctcccttgatttgtccttcagcatgtcatgcttttgggtccatatatatagtgcttcactgcttccagcccaattacccatcccttttggcgaagcgggtacaagagggaaactgatgcatgcataaacctatc

SEQ ID NO: 50386 - DNA, 1768 bp, Zea Mays
gcccaatccacggtggagcccagcctccactctccagtccggttttcagttggtagccacgcgcacggggacggggttctccctttgctgtcgcccccgcctccgattccgcgatgataacccaccatccctccctgatccgcccatctgtcctcaccctccgtgccgacgtcctccgtcggcgcccaacactgcacgccgtcgcctccgcgccgcctccccgattgtggtctttgcgcgccaccaccggtggaacttcgcccgtcagtggcgatggaggcaaacgcgctgtgccgcttcccacgcgtgggcccgccctgctcggcttcgtgcgtagcaacttcctcccgcttgctctcattggtgggatcatattgggtcttctagatcctactcttggatgccttgcacacaaatactccctgtcaaagtacagcacttttgggatattcgttatctcaggactgaccctgcgcactagggagcttggtgcagcgttagaagcttggcctgctggactatatggactagtatgaccttatgtttgttctgtggctgccagacttagggcatgtttggtttgtggctaaatgtgccacactttgcctaaggttagtcattcaaattgaataactaaccttgggcaaaaaagttaggcaaagtgtggcaattgaggcaacaaaccaaacatgcccttacctattctaatatcattctgtggcacaactataagtatgttggaataaagttctcactgccgtttgatccaaggcataattcaaggaaattccatgccattgattttctggcatttatttcttaccaggagtgctaattgcctttctgattatttttttcagttcctatacttctattggtcatcaatggagcacccagcacctgcaataagtttgctaatgtattatattattgtatataattgcagggatctattttgctgtttacaccctttcttgctcagtttattatgcaagttcagttcttcccccctgaatttatcactgggttagctatgttttgctgcatgccaacaacactatcaagtggagtcacactaacacagcttgttggtggtaactctgcacttgctcttgcaatgacagttgcatccaatttacttggcattataatttgttggagggggggcctctacagactgcagccgccgcgtgatggagggggagcagctcacgctcgagcagagggccgccggtactgttcatctgcatgaatagtaccacgtctccccagccaacagcccgacggcgcccaagcgtcggagttctggtacctctttctcttgcaaaatacattagcaatggtgttggggtttccttgcctactgagcaattattcaaaagtcttgtcaccagccttctaatccctcttattatagggaagactatagtgccatcttgaaatatctgaagcttcctggagacacttatgatggcttgttctttgtcaggttgctcgagaaacctcaaaaggtattgctgattttgttgatggaaatcgacaaggcttttcagttgcaagtgctgttctcctcagcctagtatgtctctaatttgaacatatgccagttgacatgttatttacttgctctgtagctcccttgatttgtccttcagcatgtcatgcttttgggtccatatatatagtgcttcactgcttccagcccaattacccatcccttttggcgaagcgggtacaagagggaaactgatgcatgcataaacctatc

SEQ ID NO: 50387 - DNA, 2615 bp, Zea Mays
gcccaatccacggtggagcccagcctccactctccagtccggttttcagttggtagccacgcgcacggggacggggttctccctttgctgtcgcccccgcctccgattccgcgatgataacccaccatccctccctgatccgcccatctgtcctcaccctccgtgccgacgtcctccgtcggcgcccaacactgcacgccgtcgcctccgcgccgcctccccgattgtggtctttgcgcgccaccaccggtggaacttcgcccgtcagtggcgatggaggcaaacgcgctgtgccgcttcccacgcgtgggcccgccctgctcggcttcgtgcgtagcaacttcctcccgcttgctctcattggtgggatcatattgggtcttctagatcctactcttggatgccttgcacacaaatactccctgtcaaagtacagcacttttgggatattcgttatctcaggactgaccctgcgcactagggagcttggtgcagcgttagaagcttggcctgctggactatatggactagtatgaccttatgtttgttctgtggctgccagacttagggcatgtttggtttgtggctaaatgtgccacactttgcctaaggttagtcattcaaattgaataactaaccttgggcaaaaaagttaggcaaagtgtggcaattgaggcaacaaaccaaacatgcccttacctattctaatatcattctgtggcacaactataagtatgttggaataaagttctcactgccgtttgatccaaggcataattcaaggaaattccatgccattgattttctggcatttatttcttaccaggagtgctaattgcctttctgattatttttttcagttcctatacttctattggtcatcaatggagcacccagcacctgcaataagtttgctaatgtattatattattgtatataattgcagggatctattttgctgtttacaccctttcttgctcagtttattatgcaagttcagttcttcccccctgaatttatcactgggttagctatgttttgctgcatgccaacaacactatcaagtggagtcacactaacacaggcttgttggtggtaactctgcacttgctcttgcaatgacagttgcatccaatttacttggcattataattgtacctctttctcttgcaaaatacattagcaatggtgttggggtttccttgcctactgagcaattattcaaaagtcttgtcaccagccttctaatccctcttattatagggaaggtatgtggttattcatatctttgtactccatgccataccttactatttcatttcaatacaataatactgcacccattatgttcagatctcctttcagtttaatctttggatgtaaaaacaacagggcttattctgaatctcatgtaactacctttcatggggcctgtttgtttcggcttctggcagcttctggtcaccaaaagctgctgcggactgccaaacgctcagcttttaagacagcttctataaaattcgttggggcaaaaaccatccaaaatcaacataaacacataatcagttgagtcattgtgatagtaggaatccgtcactttctagatcctgagccctatgaacaactttatcttcctccacacgtaatcgtaatgatactcagattctcctcacagccagattctccccacagctagattttcagaaaagctgatcagaaaaaagctgaaccaaacaggcctatgatcaactgataagcatgatttgtttgtcgaatgtttaggagcacaatttaggcaagtattcatttcttttagtagattatcagccatgaaccacctaactacaatatatataaataaaaaactcgacctgtggggctaagacaccccccatgacattatattaagaaacacagatcgagaaaccccctcgaacccctgtcccacccagacacagcggcaccgtagcctgaccgaggccggaccttggacctgtgctttggtgtgggacagatgagaggacttttttaaccacaactaaaattcgctctcacggaaagtcgaacccaggacctaaggagtgctactcggaccacctaatcaactcaactagatgccctttcacatctgactacaatatgcaaagtataatttgaactcctctaccctaagtgcttataatgttctgtttattttgaatttagtccctctgtttcttaaacaagaaataattaaattcaccatatatcccccatgttttccttaaagactatagtgccatcttgaaatatctgaagcttcctggagacacttatgatggcttgttctttgtcaggttgctcgagaaacctcaaaaggtattgctgattttgttgatggaaatcgacaaggcttttcagttgcaagtgctgttctcctcagcctagtatgtctctaatttgaacatatgccagttgacatgttatttacttgctctgtagctcccttgatttgtccttcagcatgtcatgcttttgggtccatatatatagtgcttcactgcttccagcccaattacccatcccttttggcgaagcgggtacaagagggaaactgatgcatgcataaacctatc

SEQ ID NO: 50388 - DNA, 2769 bp, Zea Mays
gcccaatccacggtggagcccagcctccactctccagtccggttttcagttggtagccacgcgcacggggacggggttctccctttgctgtcgcccccgcctccgattccgcgatgataacccaccatccctccctgatccgcccatctgtcctcaccctccgtgccgacgtcctccgtcggcgcccaacactgcacgccgtcgcctccgcgccgcctccccgattgtggtctttgcgcgccaccaccggtggaacttcgcccgtcagtggcgatggaggcaaacgcgctgtgccgcttcccacgcgtgggcccgccctgctcggcttcgtgcgtagcaacttcctcccgcttgctctcattggtgggatcatattgggtcttctagatcctactcttggatgccttgcacacaaatactccctgtcaaagtacagcacttttgggatattcgttatctcaggactgaccctgcgcactagggagcttggtgcagcgttagaagcttggcctgctggactatatggactagtatgaccttatgtttgttctgtggctgccagacttagggcatgtttggtttgtggctaaatgtgccacactttgcctaaggttagtcattcaaattgaataactaaccttgggcaaaaaagttaggcaaagtgtggcaattgaggcaacaaaccaaacatgcccttacctattctaatatcattctgtggcacaactataagtatgttggaataaagttctcactgccgtttgatccaaggcataattcaaggaaattccatgccattgattttctggcatttatttcttaccaggagtgctaattgcctttctgattatttttttcagttcctatacttctattggtcatcaatggagcacccagcacctgcaataagtttgctaatgtattatattattgtatataattgcagggatctattttgctgtttacaccctttcttgctcagtttattatgcaagttcagttcttcccccctgaatttatcactgggttagctatgttttgctgcatgccaacaacactatcaagtggagtcacactaacacagcttgttggtggtaactctgcacttgctcttgcaatgacagttgcatccaatttacttggcattataatttgttggagggggggcctctacagactgcagccgccgcgtgatggagggggagcagctcacgctcgagcagagggccgccggtactgttcatctgcatgaatagtaccacgtctccccagccaacagcccgacggcgcccaagcgtcggagttctggtacctctttctcttgcaaaatacattagcaatggtgttggggtttccttgcctactgagcaattattcaaaagtcttgtcaccagccttctaatccctcttattatagggaaggtatgtggttattcatatctttgtactccatgccataccttactatttcatttcaatacaataatactgcacccattatgttcagatctcctttcagtttaatctttggatgtaaaaacaacagggcttattctgaatctcatgtaactacctttcatggggcctgtttgtttcggcttctggcagcttctggtcaccaaaagctgctgcggactgccaaacgctcagcttttaagacagcttctataaaattcgttggggcaaaaaccatccaaaatcaacataaacacataatcagttgagtcattgtgatagtaggaatccgtcactttctagatcctgagccctatgaacaactttatcttcctccacacgtaatcgtaatgatactcagattctcctcacagccagattctccccacagctagattttcagaaaagctgatcagaaaaaagctgaaccaaacaggcctatgatcaactgataagcatgatttgtttgtcgaatgtttaggagcacaatttaggcaagtattcatttcttttagtagattatcagccatgaaccacctaactacaatatatataaataaaaaactcgacctgtggggctaagacaccccccatgacattatattaagaaacacagatcgagaaaccccctcgaacccctgtcccacccagacacagcggcaccgtagcctgaccgaggccggaccttggacctgtgctttggtgtgggacagatgagaggacttttttaaccacaactaaaattcgctctcacggaaagtcgaacccaggacctaaggagtgctactcggaccacctaatcaactcaactagatgccctttcacatctgactacaatatgcaaagtataatttgaactcctctaccctaagtgcttataatgttctgtttattttgaatttagtccctctgtttcttaaacaagaaataattaaattcaccatatatcccccatgttttccttaaagactatagtgccatcttgaaatatctgaagcttcctggagacacttatgatggcttgttctttgtcaggttgctcgagaaacctcaaaaggtattgctgattttgttgatggaaatcgacaaggcttttcagttgcaagtgctgttctcctcagcctagtatgtctctaatttgaacatatgccagttgacatgttatttacttgctctgtagctcccttgatttgtccttcagcatgtcatgcttttgggtccatatatatagtgcttcactgcttccagcccaattacccatcccttttggcgaagcgggtacaagagggaaactgatgcatgcataaacctatc

SEQ ID NO: 50389 - DNA, 1173 bp, Zea Mays
ctccactctccagtccggttttcagttggtagccacgcgcacggggacggggttctccctttgctgtcgcccccgcctccgattccgcgatgataacccaccatccctccctgatccgcccatctgtcctcaccctccgtgccgacgtcctccgtcggcgcccaacactgcacgccgtcgcctccgcgccgcctccccgattgtggtctttgcgcgccaccaccggtggaacttcgcccgtcagtggcgatggaggcaaacgcgctgtgccgcttcccacgcgtgggcccgccctgctcggcttcgtgcgtagcaacttcctcccgcttgctctcattggtgggatcatattgggtcttctagatcctactcttggatgccttgcacacaaatactccctgtcaaagtacagcacttttgggatattcgttatctcaggactgaccctgcgcactagggagcttggtgcagcgttagaagcttggcctgctggactatatggactaggatctattttgctgtttacaccctttcttgctcagtttattatgcaagttcagttcttcccccctgaatttatcactgggttagctatgttttgctgcatgccaacaacactatcaagtggagtcacactaacacagcttgttggtggtaactctgcacttgctcttgcaatgacagttgcatccaatttacttggcattataattgtacctctttctcttgcaaaatacattagcaatggtgttggggtttccttgcctactgagcaattattcaaaagtcttgtcaccagccttctaatccctcttattatagggaagactatagtgccatcttgaaatatctgaagcttcctggagacacttatgatggcttgttctttgtcaggttgctcgagaaacctcaaaaggtattgctgattttgttgatggaaatcgacaaggcttttcagttgcaagtgctgttctcctcagcctagtatgtctctaatttgaacatatgccagttgacatgttatttacttgctctgtagctcccttgatttgtccttcagcatgtcatgcttttgggtccatatatatagtgcttcactgcttccagcccaattacccatcccttttggcgaagcgggtacaagagggaaactgatgcatgcataaacctatc

SEQ ID NO: 50390 - DNA, 1175 bp, Zea Mays
gtccggttttcagttggtagccacgcgcacggggacggggttctccctttgctgtcgcccccgcctccgattccgcgatgataacccaccatccctccctgatccgcccatctgtcctcaccctccgtgccgacgtcctccgtcggcgcccaacactgcacgccgtcgcctccgcgccgcctccccgattgtggtctttgcgcgccaccaccggtggaacttcgcccgtcagtggcgatggaggcaaacgcgctgtgccgcttcccacgcgtgggcccgccctgctcggcttcgtgcgtagcaacttcctcccgcttgctctcattggtgggatcatattgggtcttctagatcctactcttggatgccttgcacacaaatactccctgtcaaagtacagcacttttgggatattcgttatctcaggactgaccctgcgcactagggagcttggtgcagcgttagaagcttggcctgctggactatatggactagtatgaccttatgtttgttctgtggctgccagacttagggcatgtttggtttgtggctaaatgtgccacactttgcctaagggatctattttgctgtttacaccctttcttgctcagtttattatgcaagttcagttcttcccccctgaatttatcactgggttagctatgttttgctgcatgccaacaacactatcaagtggagtcacactaacacagcttgttggtggtaactctgcacttgctcttgcaatgacagttgcatccaatttacttggcattataattgtacctctttctcttgcaaaatacattagcaatggtgttggggtttccttgcctactgagcaattattcaaaagtcttgtcaccagccttctaatccctcttattatagggaaggttgctcgagaaacctcaaaaggtattgctgattttgttgatggaaatcgacaaggcttttcagttgcaagtgctgttctcctcagcctagtatgtctctaatttgaacatatgccagttgacatgttatttacttgctctgtagctcccttgatttgtccttcagcatgtcatgcttttgggtccatatatatagtgcttcactgcttccagcccaattacccatcccttttggcgaagcgggtacaagagggaaactgatgcatgcataaacctatc

SEQ ID NO: 50391 - DNA, 2249 bp, Zea Mays
ccggttttcagttggtagccacgcgcacggggacggggttctccctttgctgtcgcccccgcctccgattccgcgatgataacccaccatccctccctgatccgcccatctgtcctcaccctccgtgccgacgtcctccgtcggcgcccaacactgcacgccgtcgcctccgcgccgcctccccgattgtggtctttgcgcgccaccaccggtggaacttcgcccgtcagtggcgatggaggcaaacgcgctgtgccgcttcccacgcgtgggcccgccctgctcggcttcgtgcgtagcaacttcctcccgcttgctctcattggtgggatcatattgggtcttctagatcctactcttggatgccttgcacacaaatactccctgtcaaagtacagcacttttgggatattcgttatctcaggactgaccctgcgcactagggagcttggtgcagcgttagaagcttggcctgctggactatatggactattcctatacttctattggtcatcaatggagcacccagcacctgcaataagtttgctaatgtattatattattgtatataattgcagggatctattttgctgtttacaccctttcttgctcagtttattatgcaagttcagttcttcccccctgaatttatcactggtatatgggtcaagcacatgcctgcttttcatgatggattttctgtcttcattccaccattttttgttgccatcgattaactcatacttttgtgctccttatagcttgtttttttggcatcttacagggttagctatgttttgctgcatgccaacaacactatcaagtggagtcacactaacacagcttgttggtggtaactctgcacttgctcttgcaatgacagttgcatccaatttacttggcattataattgtacctctttctcttgcaaaatacattagcaatggtgttggggtttccttgcctactgagcaattattcaaaagtcttgtcaccagccttctaatccctcttattatagggaagggcttattctgaatctcatgtaactacctttcatggggcctgtttgtttcggcttctggcagcttctggtcaccaaaagctgctgcggactgccaaacgctcagcttttaagacagcttctataaaattcgttggggcaaaaaccatccaaaatcaacataaacacataatcagttgagtcattgtgatagtaggaatccgtcactttctagatcctgagccctatgaacaactttatcttcctccacacgtaatcgtaatgatactcagattctcctcacagccagattctccccacagctagattttcagaaaagctgatcagaaaaaagctgaaccaaacaggcctatgatcaactgataagcatgatttgtttgtcgaatgtttaggagcacaatttaggcaagtattcatttcttttagtagattatcagccatgaaccacctaactacaatatatataaataaaaaactcgacctgtggggctaagacaccccccatgacattatattaagaaacacagatcgagaaaccccctcgaacccctgtcccacccagacacagcggcaccgtagcctgaccgaggccggaccttggacctgtgctttggtgtgggacagatgagaggacttttttaaccacaactaaaattcgctctcacggaaagtcgaacccaggacctaaggagtgctactcggaccacctaatcaactcaactagatgccctttcacatctgactacaatatgcaaagtataatttgaactcctctaccctaagtgcttataatgttctgtttattttgaatttagtccctctgtttcttaaacaagaaataattaaattcaccatatatcccccatgttttccttaaagactatagtgccatcttgaaatatctgaagcttcctggagacacttatgatggcttgttctttgtcaggttgctcgagaaacctcaaaaggtattgctgattttgttgatggaaatcgacaaggcttttcagttgcaagtgctgttctcctcagcctagtatgtctctaatttgaacatatgccagttgacatgttatttacttgctctgtagctcccttgatttgtccttcagcatgtcatgcttttgggtccatatatatagtgcttcactgcttccagcccaattacccatcccttttggcgaagcgggtacaagagggaaactgatgcatgcataaacctatc

SEQ ID NO: 50392 - DNA, 1151 bp, Zea Mays
ccggttttcagttggtagccacgcgcacggggacggggttctccctttgctgtcgcccccgcctccgattccgcgatgataacccaccatccctccctgatccgcccatctgtcctcaccctccgtgccgacgtcctccgtcggcgcccaacactgcacgccgtcgcctccgcgccgcctccccgattgtggtctttgcgcgccaccaccggtggaacttcgcccgtcagtggcgatggaggcaaacgcgctgtgccgcttcccacgcgtgggcccgccctgctcggcttcgtgcgtagcaacttcctcccgcttgctctcattggtgggatcatattgggtcttctagatcctactcttggatgccttgcacacaaatactccctgtcaaagtacagcacttttgggatattcgttatctcagggatctattttgctgtttacaccctttcttgctcagtttattatgcaagttcagttcttcccccctgaatttatcactggtatatgggtcaagcacatgcctgcttttcatgatggattttctgtcttcattccaccattttttgttgccatcgattaactcatacttttgtgctccttatagcttgtttttttggcatcttacagggttagctatgttttgctgcatgccaacaacactatcaagtggagtcacactaacacagcttgttggtggtaactctgcacttgctcttgcaatgacagttgcatccaatttacttggcattataattgtacctctttctcttgcaaaatacattagcaatggtgttggggtttccttgcctactgagcaattattcaaaagtcttgtcaccagccttctaatccctcttattatagggaaggttgctcgagaaacctcaaaaggtattgctgattttgttgatggaaatcgacaaggcttttcagttgcaagtgctgttctcctcagcctagtatgtctctaatttgaacatatgccagttgacatgttatttacttgctctgtagctcccttgatttgtccttcagcatgtcatgcttttgggtccatatatatagtgcttcactgcttccagcccaattacccatcccttttggcgaagcgggtacaagagggaaactgatgcatgcataaacctatc

SEQ ID NO: 50393 - DNA, 1329 bp, Zea Mays
cggttttcagttggtagccacgcgcacggggacggggttctccctttgctgtcgcccccgcctccgattccgcgatgataacccaccatccctccctgatccgcccatctgtcctcaccctccgtgccgacgtcctccgtcggcgcccaacactgcacgccgtcgcctccgcgccgcctccccgattgtggtctttgcgcgccaccaccggtggaacttcgcccgtcagtggcgatggaggcaaacgcgctgtgccgcttcccacgcgtgggcccgccctgctcggcttcgtgcgtagcaacttcctcccgcttgctctcattggtgggatcatattgggtcttctagatcctactcttggatgccttgcacacaaatactccctgtcaaagtacagcacttttgggatattcgttatctcaggttcggttgcttaaccctattcgtgtgaatccctgttctattacagtattacttctgtgttctgctgatagcttcctcttggctgcataggactgaccctgcgcactagggagcttggtgcagcgttagaagcttggcctgctggactatatggactagtatgaccttatgtttgttctgtggctgccagacttagggcatgtttggtttgtggctaaatgtgccacactttgcctaagggatctattttgctgtttacaccctttcttgctcagtttattatgcaagttcagttcttcccccctgaatttatcactgggttagctatgttttgctgcatgccaacaacactatcaagtggagtcacactaacacagcttgttggtggtaactctgcacttgctcttgcaatgacagttgcatccaatttacttggcattataattgtacctctttctcttgcaaaatacattagcaatggtgttggggtttccttgcctactgagcaattattcaaaagtcttgtcaccagccttctaatccctcttattatagggaagactatagtgccatcttgaaatatctgaagcttcctggagacacttatgatggcttgttctttgtcaggttgctcgagaaacctcaaaaggtattgctgattttgttgatggaaatcgacaaggcttttcagttgcaagtgctgttctcctcagcctagtatgtctctaatttgaacatatgccagttgacatgttatttacttgctctgtagctcccttgatttgtccttcagcatgtcatgcttttgggtccatatatatagtgcttcactgcttccagcccaattacccatcccttttggcgaagcgggtacaagagggaaactgatgcatgcataaacctatc

SEQ ID NO: 50394 - DNA, 1369 bp, Zea Mays
gttttcagttggtagccacgcgcacggggacggggttctccctttgctgtcgcccccgcctccgattccgcgatgataacccaccatccctccctgatccgcccatctgtcctcaccctccgtgccgacgtcctccgtcggcgcccaacactgcacgccgtcgcctccgcgccgcctccccgattgtggtctttgcgcgccaccaccggtggaacttcgcccgtcagtggcgatggaggcaaacgcgctgtgccgcttcccacgcgtgggcccgccctgctcggcttcgtgcgtagcaacttcctcccgcttgctctcattggtgggatcatattgggtcttctagatcctactcttggatgccttgcacacaaatactccctgtcaaagtacagcacttttgggatattcgttatctcaggactgaccctgcgcactagggagcttggtgcagcgttagaagcttggcctgctggactatatggactattcctatacttctattggtcatcaatggagcacccagcacctgcaataagtttgctaatgtattatattattgtatataattgcagggatctattttgctgtttacaccctttcttgctcagtttattatgcaagttcagttcttcccccctgaatttatcactggtatatgggtcaagcacatgcctgcttttcatgatggattttctgtcttcattccaccattttttgttgccatcgattaactcatacttttgtgctccttatagcttgtttttttggcatcttacagggttagctatgttttgctgcatgccaacaacactatcaagtggagtcacactaacacagcttgttggtggtaactctgcacttgctcttgcaatgacagttgcatccaatttacttggcattataattgtacctctttctcttgcaaaatacattagcaatggtgttggggtttccttgcctactgagcaattattcaaaagtcttgtcaccagccttctaatccctcttattatagggaagactatagtgccatcttgaaatatctgaagcttcctggagacacttatgatggcttgttctttgtcaggttgctcgagaaacctcaaaaggtattgctgattttgttgatggaaatcgacaaggcttttcagttgcaagtgctgttctcctcagcctagtatgtctctaatttgaacatatgccagttgacatgttatttacttgctctgtagctcccttgatttgtccttcagcatgtcatgcttttgggtccatatatatagtgcttcactgcttccagcccaattacccatcccttttggcgaagcgggtacaagagggaaactgatgcatgcataaacctatc

SEQ ID NO: 50395 - DNA, 2248 bp, Zea Mays
cagttggtagccacgcgcacggggacggggttctccctttgctgtcgcccccgcctccgattccgcgatgataacccaccatccctccctgatccgcccatctgtcctcaccctccgtgccgacgtcctccgtcggcgcccaacactgcacgccgtcgcctccgcgccgcctccccgattgtggtctttgcgcgccaccaccggtggaacttcgcccgtaacaaccaaatcgaaccccctcggattctctgacactcattgggccatgcttcgattcagttgtaaatgcctagttgcctgaaaaaaagttgtaaacgcctacttgctccgcaggtcagtggcgatggaggcaaacgcgctgtgccgcttcccacgcgtgggcccgccctgctcggcttcgtgcgtagcaacttcctcccgcttgctctcattggtgggatcatattgggtcttctagatcctactcttggatgccttgcacacaaatactccctgtcaaagtacagcacttttgggatattcgttatctcaggactgaccctgcgcactagggagcttggtgcagcgttagaagcttggcctgctggactatatggactattcctatacttctattggtcatcaatggagcacccagcacctgcaataagtttgctaatggttagctatgttttgctgcatgccaacaacactatcaagtggagtcacactaacacagcttgttggtggtaactctgcacttgctcttgcaatgacagttgcatccaatttacttggcattataattgtacctctttctcttgcaaaatacattagcaatggtgttggggtttccttgcctactgagcaattattcaaaagtcttgtcaccagccttctaatccctcttattatagggaaggtatgtggttattcatatctttgtactccatgccataccttactatttcatttcaatacaataatactgcacccattatgttcagatctcctttcagtttaatctttggatgtaaaaacaacagggcttattctgaatctcatgtaactacctttcatggggcctgtttgtttcggcttctggcagcttctggtcaccaaaagctgctgcggactgccaaacgctcagcttttaagacagcttctataaaattcgttggggcaaaaaccatccaaaatcaacataaacacataatcagttgagtcattgtgatagtaggaatccgtcactttctagatcctgagccctatgaacaactttatcttcctccacacgtaatcgtaatgatactcagattctcctcacagccagattctccccacagctagattttcagaaaagctgatcagaaaaaagctgaaccaaacaggcctatgatcaactgataagcatgatttgtttgtcgaatgtttaggagcacaatttaggcaagtattcatttcttttagtagattatcagccatgaaccacctaactacaatatatataaataaaaaactcgacctgtggggctaagacaccccccatgacattatattaagaaacacagatcgagaaaccccctcgaacccctgtcccacccagacacagcggcaccgtagcctgaccgaggccggaccttggacctgtgctttggtgtgggacagatgagaggacttttttaaccacaactaaaattcgctctcacggaaagtcgaacccaggacctaaggagtgctactcggaccacctaatcaactcaactagatgccctttcacatctgactacaatatgcaaagtataatttgaactcctctaccctaagtgcttataatgttctgtttattttgaatttagtccctctgtttcttaaacaagaaataattaaattcaccatatatcccccatgttttccttaaagactatagtgccatcttgaaatatctgaagcttcctggagacacttatgatggcttgttctttgtcaggttgctcgagaaacctcaaaaggtattgctgattttgttgatggaaatcgacaaggcttttcagttgcaagtgctgttctcctcagcctagtatgtctctaatttgaacatatgccagttgacatgttatttacttgctctgtagctcccttgatttgtccttcagcatgtcatgcttttgggtccatatatatagtgcttcactgcttccagcccaattacccatcccttttggcgaagcgggtacaagagggaaactgatgcatgcataaacctatc

SEQ ID NO: 50396 - DNA, 775 bp, Zea Mays
gtttcatattttttatttaaccacgttttatgattttttaatatatattgatgctcaactttatttggatcttgctcctgtttctagtgttttacagctcgtagtcatgaccattatttattaaaaagctatcattttgcgctatattaggcgaagagatcaatggaaaggatctaatggattccgatcataaagatgatgccaacctcgcaaatgccatgctcccccacatatagatccggcattgcatagctactgtttggttgcatcactaggtaataggtttcaaataaggcaggggctcaaacatcatgcaatcaactaatcaagcaatcaacgtaaactaaatccgaaaatgatagtttaaacaaataacagttgtaactacgactctacgagcaataaaacaataggtacaagaacaagtataagattcaagtaaccctttttctcgaatgtgcagaagagttgtgtatcattatattaagaaaaataaggtttaaaatagaccgatacaagccgccggtaaaagtgcggaaataaaataaaataaaaaggttacaagacagcaaagagaacccgacccacagatagaacaccaatagatagattgtatttctagaaagagatcaagtaccagttttgttaattttcaatttaatatgaattatttatgaattttcgagaatgaaccatatttttattattttaggaaaacacatatataggtaaaccaccttgaaacatggtcgagggccaaagttgtcccacttct

SEQ ID NO: 50397 - DNA, 616 bp, Zea Mays
atggattccgatcataaagatgatgccaacctcgcaaatgccatgctcccccacatatagatccggcattgcatagctactgtttggttgcatcactagaaaacgttgccagtgttggttgctgtggttgagcagcttggaggagcgttcggggagtctggatttctggtcatcccttgtgttgccgcacacattaaccagatcattattgattctatcatagtaaattggtggcgccagaaggatcaacaatttacttctgcaaagtaacttcaggattcaatttcggtgtgtaacatatggaatcggtcaggagctcttaatgtttatcccctgacgccaaagcaaaatgagatctacgtgttcagttatttcaaccgaaagtagtcatatcgagatgttttacacaaaaatgccttttcgtgcctgaaggaacgatattatgtatttccttcacaatcttcagatgtcttccttgcaacgtttttggatagttgaataaaaaaaatgaagaatgtagttgtacttgtcatgcaggaagttcagtaaaaggaagaattgctgactgcaaagctgattttgtgaagatcattatacgctttaatttcatagtatt

SEQ ID NO: 50398 - DNA, 887 bp, Zea Mays
acaaaacagacaaggggtcgattaatataacctttttcataaataaatgatttgcgtttgtcaaataaaggtcgacgcacggggcggggcgaggcgccggggggctgccgctgccggcaatccgaaattccgtaggcgctgggcaggagccggcgctgcgcgtgcgtttcgggtcttttttttgcttggacttggccttccaccctttcccttcccttcccctgcgtctgctgccacgagacgagacgaggcgcgggcaccgccggtccgccgacgggaggaccgggtccgggactcgggatggtcagacacatgtcgcgtggtgtcccaaccgtccgtccatggtcaggtctgctgcctcgccagccaatctgctctgctctgctctgctctgccctgcggtaaaaccaggcacgcacgacacaaaaagccgagctcgagagtgacatcgtctcgcaggcagtcgcggttggggtggcttctctagtcgctataaaatggcctctggttgcgtcgcctccctctccacccgtccgatctaaccgtcccaccgcccaagccactcgagggccgatcttgctgctgccctggcccctggcccctgggccctggcccttcgccctccgccctcctcctcggcaccgtctcgtccgaccatggctgctgactcgggcaagatgccgtccgccggcggcaaggcgccgccgcccaagtcatccgaatccggccccgctccagagtccagccgaccaggcaggcccaggctccacctccgccctccgggccaatagaatagacaccgcatgcgacgccggcgtgaagccccatgctcatccgtgactcttggtttcttcttgaccacgtccacgtgggtgtgttaataaacc

SEQ ID NO: 50399 - DNA, 1545 bp, Zea Mays
ttggccttccaccctttcccttcccttcccctgcgtctgctgccacgagacgagacgaggcgcgggcaccgccggtccgccgacgggaggaccgggtccgggactcgggatggtcagacacatgtcgcgtggtgtcccaaccgtccgtccatggtcaggtctgctgcctcgccagccaatctgctctgctctgctctgctctgccctgcggtaaaaccaggcacgcacgacacaaaaagccgagctcgagagtgacatcgtctcgcaggcagtcgcggttggggtggcttctctagtcgctataaaatggcctctggttgcgtcgcctccctctccacccgtccgatctaaccgtcccaccgcccaagccactcgagggccgatcttgctgctgccctggcccctggcccctgggccctggcccttcgccctccgccctcctcctcggcaccgtctcgtccgaccatggctgctgactcgggcaagatgccgtccgccggcggcaaggcgccgccgcccaagtcatccgaatccggtacgacgtgctccgggtgtcgcccgagctggcccgggagctgggcgtctacctgctctccttcgaccggcccgggtacggggagagcgacccgcacccggctaggaccgacaagagcgtcgccctggacatcgagcagctcgccgacgccatggagctcggcgacaggttctacctcgccggcttctccatgggcggggagatcatgtggagctgcctcaagtacatcccgcacaggctttccggcgtagccatcctgggccccgtgggcaacttctggtggtccgggctccccgcgaacgtgtccctggaggcctggaacgtgcaggtggcgcaggacaagtgggccgtgggcgtggcgcaccacgctccctggctcacctactggtggaacacccagaagctgttcccggcctccagcgtcatcgccttcaacccggccatcatgtccccggcggacatggaactcatccccagcttcgcctacaggacccacgcctaccaggcgcggcagcagggggagcacgagagcctgcaccgcgacatgatggtcggcttcggcaagtggagctggagcccgctggagctggaggacccgttccccgacggcgacggcaaggtgcacctgtggcacggcgccgaggacctcatcgtgcccgtggggctgtctaggcacatcagcaagagcctgccgtgggtgcgctaccacgagctgcccacggccggccacctcttccccatggccgacgggatggccgacgtcatcgtcaagtcactgctgctgggcgacgagtgacgattgtcatctcccgtcgtcgtcgtcgagtcgatctccctctccctcttcctccccccctgctttttcctgtgcgcgcgagtctttttgactctttgtagtgcagtgagagaatgctacggacatgtctttgcgatcgttactcctattcctatataatatatgatatatagataaagaaatattaacgggatgtttagtttctaaagactaa

SEQ ID NO: 50400 - DNA, 1017 bp, Zea Mays
cctgcgtctgctgccacgagacgagacgaggcgcgggcaccgccggtccgccgacgggaggaccgggtccgggactcgggatggtcagacacatgtcgcgtggtgtcccaaccgtccgtccatggtcaggtctgctgcctcgccagccaatctgctctgctctgctctgctctgccctgcggtaaaaccaggcacgcacgacacaaaaagccgagctcgagagtgacatcgtctcgcaggcagtcgcggttggggtggcttctctagtcgctataaaatggcctctggttgcgtcgcctccctctccacccgtccgatctaaccgtcccaccgcccaagccactcgagggccgatcttgctgctgccctggcccctggcccctgggccctggcccttcgccctccgccctcctcctcggcaccgtctcgtccgaccatggctgctgactcgggcaagatgccgtccgccggcggcaaggcgccgccgcccaagtcatccgaatccgtaccaggcgcggcagcagggggagcacgagagcctgcaccgcgacatgatggtcggcttcggcaagtggagctggagcccgctggagctggaggacccgttccccgacggcgacggcaaggtgcacctgtggcacggcgccgaggacctcatcgtgcccgtggggctgtctaggcacatcagcaagagcctgccgtgggtgcgctaccacgagctgcccacggccggccacctcttccccatggccgacgggatggccgacgtcatcgtcaagtcactgctgctgggcgacgagtgacgattgtcatctcccgtcgtcgtcgtcgagtcgatctccctctccctcttcctccccccctgctttttcctgtgcgcgcgagtctttttgactctttgtagtgcagtgagagaatgctacggacatgtctttgcgatcgttactcctattcctatataatatatgatatatagataaagaaatattaacgggatgtttagtttctaaagactaa

SEQ ID NO: 50401 - DNA, 2029 bp, Zea Mays
aatctgccgcaatagaacgaacaccagaacagaaccgcagaacgcaaccgccttcagccttctcccatcccacggacgagcgccacacggcaccccactgcgaggcaatcgccaacccgcactgcaccactcgcgcctcgcgatcaccgctccgaactggaaatcaaatggcgccgtcgccgctgtgttccgcttccccacggccgcttcgagccccaggccagcctccccgagacgtccgctcgccgcggacggtcgtcgtggccgcgggcacccgtgtgagcggagcggaggcccgcgcgtcgctggtgctggccttggcctcgcatgcgctctccgcctcgcagcgccgcttcgccgagctcgccgatgaggccgccaagtacgccttcccgtctggccgcttcgagccccgcaccctcgaggaggccctcatgtccgtgcctgatctcgagacagttccgtttcgcgtactgaagcgcgaggcagagtacgagatcagagaagtggagtcatacttcgttgctgaaacgacgatgcccggaagatctgggttcgatttcaacgggtcatctcagtcgttcaacgtgctggcatcatatttattcggtaagaatactgcctctgagcaaatggaaatgacaacacctgtttttactcggaagggtgagtcaaacggccaatcaatggacatgacgaccccagtgataacaaaaaagtcagctggtacaaataaatggaaaatgtcatttgtgatgccagcgaagtatggttccaatttgcctcgcccaaaagatccttctgtgattatcaaggaggtgcccagcaaaatagttgccgttgcagccttttcaggtccataatattgtacttctgtcatacccatttcatagctgtatgtgattaagaagctatatattcagagtcaagtacataatttataggtacaaaattttaaatcttttttcagtatttgtaatgaaaaaaaacagaaatactctgtatcaattttctgtgccttttcttctgttgattactcaagatcctttttgctgcagaaatcataatgatagataattaatctactgaaacatttgtatggagcgtaccgttttttatcactaaccacatgccttttgtttttagtcaggaaatagtttagaacgataggagttgttgtgttccttcccaattcaaaacaccaacacgatctctaatatagaattactttcatgatgacacagatcaaaccagattttctcaagttgttattttgaaatgattaatgagctctatgtatttaccatttgtcttacagagtagccattacaattcttttttgttcacaatataataaaagcatataagaactcttttaacttcaaattttattggctggagaaagttttcacaacaataagcatctcatttgtttttaatattctgatgctacaatattgagacgcttagctctctgctaaatgaaccatttctcttcattctttgttggttcattggatatggtcagttatgaagtcatattgatactggcgtgcaatctttgtcaaccatggtaccattgtcatagtccacactcctttgtgtccgtacaggtttggttactgatgatgatataaaccagagggagtctaaattgcgcgaatctctccgtaaagataccacatttagagtgaaagatgattcggtggtggaagtcgcacagtacaatccaccgttcacacttccattcacaaggagaaatgaaatagcattggaggttgagaggaacgatatagccttatgatgtcctagattaacaaataaattattggcatttgagagtgtatgcaaatgcccatcgtccctaatgcatatatgtataatttctatctggcatgttctgtatatatgtagacatgttaattatcgcatgcatatattattgtattggaaactaaataataagagcaaaaaatgttgtgcgttcgagcccgcgcagggtcgggctggagatatttgaggccctgtg

SEQ ID NO: 50402 - DNA, 2011 bp, Zea Mays
agaacgaacaccagaacagaaccgcagaacgcaaccgccttcagccttctcccatcccacggacgagcgccacacggcaccccactgcgaggcaatcgccaacccgcactgcaccactcgcgcctcgcgatcaccgctccgaactggaaatcaaatggcgccgtcgccgctgtgttccgcttccccacggccgcttcgagccccaggccagcctccccgagacgtccgctcgccgcggacggtcgtcgtggccgcgggcacccgtgtgagcggagcggaggcccgcgcgtcgctggtgctggccttggcctcgcatgcgctctccgcctcgcagcgccgcttcgccgagctcgccgatgaggccgccaagtacgccttcccgtctggccgcttcgagccccgcaccctcgaggaggccctcatgtccgtgcctgatctcgagacagttccgtttcgcgtactgaagcgcgaggcagagtacgagatcagagaagtggagtcatacttcgttgctgaaacgacgatgcccggaagatctgggttcgatttcaacgggtcatctcagtcgttcaacgtgctggcatcatatttattcgaatactgcctctgagcaaatggaaatgacaacacctgtttttactcggaagggtgagtcaaacggccaatcaatggacatgacgaccccagtgataacaaaaaagtcagctggtacaaataaatggaaaatgtcatttgtgatgccagcgaagtatggttccaatttgcctcgcccaaaagatccttctgtgattatcaaggaggtgcccagcaaaatagttgccgttgcagccttttcaggtccataatattgtacttctgtcatacccatttcatagctgtatgtgattaagaagctatatattcagagtcaagtacataatttataggtacaaaattttaaatcttttttcagtatttgtaatgaaaaaaaacagaaatactctgtatcaattttctgtgccttttcttctgttgattactcaagatcctttttgctgcagaaatcataatgatagataattaatctactgaaacatttgtatggagcgtaccgttttttatcactaaccacatgccttttgtttttagtcaggaaatagtttagaacgataggagttgttgtgttccttcccaattcaaaacaccaacacgatctctaatatagaattactttcatgatgacacagatcaaaccagattttctcaagttgttattttgaaatgattaatgagctctatgtatttaccatttgtcttacagagtagccattacaattcttttttgttcacaatataataaaagcatataagaactcttttaacttcaaattttattggctggagaaagttttcacaacaataagcatctcatttgtttttaatattctgatgctacaatattgagacgcttagctctctgctaaatgaaccatttctcttcattctttgttggttcattggatatggtcagttatgaagtcatattgatactggcgtgcaatctttgtcaaccatggtaccattgtcatagtccacactcctttgtgtccgtacaggtttggttactgatgatgatataaaccagagggagtctaaattgcgcgaatctctccgtaaagataccacatttagagtgaaagatgattcggtggtggaagtcgcacagtacaatccaccgttcacacttccattcacaaggagaaatgaaatagcattggaggttgagaggaacgatatagccttatgatgtcctagattaacaaataaattattggcatttgagagtgtatgcaaatgcccatcgtccctaatgcatatatgtataatttctatctggcatgttctgtatatatgtagacatgttaattatcgcatgcatatattattgtattggaaactaaataataagagcaaaaaatgttgtgcgttcgagcccgcgcagggtcgggctggagatatttgaggccctgtg

SEQ ID NO: 50403 - DNA, 661 bp, Zea Mays
attcgatactgcctctgagcaaatggaaatgacaacacctgtttttactcggaagggtgagtcaaacggccaatcaatggacatgacgaccccagtgataacaaaaaagtcagctggtacaaataaatggaaaatgtcatttgtgatgccagcgaagtatggttccaatttgcctcgcccaaaagatccttctgtgattatcaaggaggtgcccagcaaaatagttgccgttgcagccttttcaggtttggttactgatgatgatataaaccagagggagtctaaattgcgcgaatctctccgtaaagataccacatttagagtgaaagatgattcggtggtggaagtcgcacagtacaatccaccgttcacacttccattcacaaggagaaatgaaatagcattggaggttgagaggaacgatatagccttatgatgtcctagattaacaaataaattattggcatttgagagtgtatgcaaatgcccatcgtccctaatgcatatatgtataatttctatctggcatgttctgtatatatgtagacatgttaattatcgcatgcatatattattgtattggaaactaaataataagagcaaaaaatgttgtgcgttcgagcccgcgcagggtcgggctggagatatttgaggccctgtg

SEQ ID NO: 50404 - DNA, 977 bp, Zea Mays
aaagcagccatccacgtccattagatgtcaatccaacggttgattagagaagcacacaagaaaggtgcaaagattgtactcgttcaggaattgtttgaggggcactatttctgccaagctcaaagactggatttctttcggcgcgctaagccttacaaaggcaatccaactattataaggatgcaacagcttgcaaaggagctggaagttgtcatacctgtcagttttttcgaagaagcaaacaatgcacattataattcggtggctattatcgatgctgatggcgctgatcttggactctatcgcaaatcacacattccagatggaccaggatatcaagagaagttttatttcaaccccggtgacactggctttaaggctttcaaaaccaagtatgccaccattggtgttggaatctgctgggatcagtggtttccagagtgtgcaagagcaatggcacttctgggggctgaaatactgttttatcccactgcaattggatccgaaccccaggattgtaacctggattcccgtgaacattggaagcgggttatgcaaggccatgctggtgccaacttggtccctcttgttgcttccaaccggattggcagagaaactgttgacactgagcatggcaagagctcgataaccttctatgggaattccttcattgcaggaccaaccggagaaatagtgaagcttgctaacgacaaagacgaggaagtgctggtggcagagtttgacttggatgagatcaagtcgattaggcatggttgggggatattcagggaccggcgccctgaactatacaaagtgctactgacgttggatggcgagaaacaatcataaaccccggtctcacgcttaatagtggtatatgtactcctatgtgttttcctaaagggatgcctctagaaactcggacacttcggggtcccatgttggaacttccacagtagaggaagttcacaaagcag

SEQ ID NO: 50405 - DNA, 1259 bp, Zea Mays
attagatgtcaatccaacggttgattagagaagcacacaagaaaggtgcaaagattgtactcgttcaggaattgtttgaggggcactatttctgccaagctcaaagactggatttctttcggcgcgctaagccttacaaaggcaatccaactattataaggatgcaacagcttgcaaaggagctggaagttgtcatacctgtcagttttttcgaagaagcaaacaatgcacattataattcggtggctattatcgatgctgatggcgctgatcttggactctatcgcaaatcacacattccagatggaccaggatatcaagagaagttttatttcaaccccggtgacactggctttaaggctttcaaaaccaagtatgccaccattggtgttggaatctgctgggatcagtggtttccagagtgtgcaagagcaatggcacttctgggggctgaaatactgttttatcccactgcaattggatccgaaccccaggattgtaacctggattcccgtgaacattggaagcgggttatgcaaggccatgctggtgccaacttggtccctcttgttgcttccaaccggattggcagagaaactgttgacactgagcatggcaagagctcgataaccttctatgggaattccttcattgcaggaccaaccggagaaatagtgaagcttgctaacgacaaagacgaggaagtgctggtggcagagtttgacttggatgagatcaagtcgattaggcatggttgggggatattcagggaccggcgccctgaactatacaaagtgctactgacgttggatggcgagaaacaatcataaaccccggtctcacgcttaatagtggtaaggcacaggcaggctccagctccacatcaatgttagattttttttttctccttttttaccctgtccaacgatgccatgcctgcatttgtacaagccatctgcgcgtgttcaccatttcacattcagcaaaataaataattttcgtgcaatgtcattctatgtcgggggagaatttagagctccagttcatgactgcatcaatggttcctcgttaaactttgatttatgggtagcattggtctatcaaagtaggaaggtcatacctggcagaaggtgcggaatcagcatatttgattccaaatgccattcacgatggtcgatggcctttaaccgtcaaccatccactacctttggcatgtgacatgtacctttttttccatcaaaaagctcaggattcttgtg

SEQ ID NO: 50406 - DNA, 1140 bp, Zea Mays
gccttttcccccctactctgtgcacacactcgagagtcgagactcagttgtcaccgctccccgccgtcctgctgataagattgctcacatctgctccctccccagacagcaagtgaagaatcaggttgtagaaattgtattgggtttagggttggagcagggtgttttcagaaaaaaaagaataggagagggggagggttaaatcgcgaatttctctgcttgcttgagaccacagcagtcgcaagtcgcaagtcgcaagtcccaactcaggtcaggtgaggggtaggtgaagtgggaaggcgcgcggaggggaggggaggagaggaggatggctgcagccgcggggaggaaggtggcggtcgccgccgtgcagttcgcctgcaccgacgtcgaggcggagaacgtcgccaccgccgagaggttgattagagaagcacacaagaaaggtgcaaagattgtactcgttcaggaattgtttgaggggcactatttctgccaagctcaaagactggatttctttcggcgcgctaagccttacaaaggcaatccaactattataagcttgctaacgacaaagacgaggaagtgctggtggcagagtttgacttggatgagatcaagtcgattaggcatggttgggggatattcagggaccggcgccctgaactatacaaagtgctactgacgttggatggcgagaaacaatcataaaccccggtctcacgcttaatagtggtaaggcacaggcaggctccagctccacatcaatgttagattttttttttctccttttttaccctgtccaacgatgccatgcctgcatttgtacaagccatctgcgcgtgttcaccatttcacattcagcaaaataaataattttcgtgcaatgtcattctatgtcgggggagaatttagagctccagttcatgactgcatcaatggttcctcgttaaactttgatttatgggtagcattggtctatcaaagtaggaaggtcatacctggcagaaggtgcggaatcagcatatttgattccaaatgccattcacgatggtcgatggcctttaaccgtcaaccatccactacctttggcatgtgacatgtacctttttttccatcaaaaagctcaggattcttgtg

SEQ ID NO: 50407 - DNA, 1053 bp, Zea Mays
gccttttcccccctactctgtgcacacactcgagagtcgagactcagttgtcaccgctccccgccgtcctgctgataagattgctcacatctgctccctccccagacagcaagtgaagaatcaggttgattagagaagcacacaagaaaggtgcaaagattgtactcgttcaggaattgtttgaggggcactatttctgccaagctcaaagactggatttctttcggcgcgctaagccttacaaaggcaatccaactattataagcttgcaaaggagctggaagttgtcatacctgtcagttttttcgaagaagcaaacaatgcacattataattcggtggctattatcgatgctgatggcgctgatcttggactctatcgcaaatcacacattccagatggaccaggatatcaagagaagttttatttcaaccccggtgacactggctttaaggctttcaaaaccaagtatgccaccattggtgttggaatctgctgggatcagtggtttccagagtgtgcaagagcaatggcacttctgggggctgaaatactgttttatcccactgcaattggatccgaaccccaggattgtaacctggattcccgtgaacattggaagcgggttatgcaaggccatgctggtgccaacttggtccctcttgttgcttccaaccggattggcagagaaactgttgacactgagcatggcaagagctcgataaccttctatgggaattccttcattgcaggaccaaccggagaaatagtgaagcttgctaacgacaaagacgaggaagtgctggtggcagagtttgacttggatgagatcaagtcgattaggcatggttgggggatattcagggaccggcgccctgaactatacaaagtgctactgacgttggatggcgagaaacaatcataaaccccggtctcacgcttaatagtggtatatgtactcctatgtgttttcctaaagggatgcctctagaaactcggacacttcggggtcccatgttggaacttccacagtagaggaagttcacaaagcag

SEQ ID NO: 50408 - DNA, 2987 bp, Zea Mays
gccccgacccggccgatgccccgtccatccaatccaatccaaaccgtcccttgtccctctcttcctcgaaacgcagctatggggactcggccgcggggggtcgtcctcgcgccatgggcggtggtgctggtgctggtgctcgcgcttcgtctggcaggcgcgtcgcatgtgatccaccgcagcctggaggccgaggcggcgccgtcggtcccggcctccattgtcagccccctgctcaggacggggtaccatttccagccgccaatgaactggatcaacgaccccaacgctccgctgtactacaaaggatggtatcacctgttctaccagtacaaccccaagggcgcggtatggggcaacatcgtgtgggcgcactcggtgtcgcgcgacctgatcaactgggtggcgctggagcccgccatctaccccagcatcccgtccgacaagtacggctgctggtcgggctcggcgacgatcctggaggacggcacgccggcgatcctgtacacggggatcgaccgggcggacatcaactaccaggtgcaggtgctggcgctccccaaggacgcgtccgacccgctgctccgcgagtgggagaagccggaggagtacaacccggtggcgacgccggcggccggcggcatcaacgcgacgcagttccgcgacccgacgacggcgtggcggcacgcggggcactggcggatgctggtgggcagcgtgcgcggcgcgcgcgggatggcgctggtgtaccggagccgggacttcaggaagtggaccaaggccaagcacccgctgcactcggcggcgctgacggggatgtgggagtgccccgacttcttcccggtgtccgggccggggctgcaggccggcctcgacacctccgcgcccggaaggaagtacgtgctcaagagcagcctggacctcacccgctacgactactacaccatcgggtcgtacgacggcggcaaggaccggtactaccccgacgaccccgccggcgactaccaccaccgcctgcgctacgactacggcaactactacgcgtccaagacgttctacgaccccgtggagcgccgccgcgtgctgctcgggtgggccaacgagtccgacagcgtcaccgacgacaaggccaagggctgggccggcatccatgcgatcccaaggaagatctggctggaccccaccgggaagcagctgctgcagtggcccatccacgaggtcgagaagctcagggggaaggccgtcagtgtggacgccaagctggtcaagcccggcgaccattttgaggtcacaggcatcgcaacttatcaggttagttttatactctagctacgttttgaattcgatggatcataaaactgtttttttttacttagtaactagtggcaagctaaggccggcggtaacatgtgtgcgtgcgcacacagctggtcacctgtcaagcttcgattcgcagcttgtcggtagtatacactacactagtactagcagggtatctgtctagccagcccagctgccaagatccaatggtccatgcatgcatgcctgttgtcggcggccgtaaaataatccctgctaggctgctacgtcacacacacacacgccggccattccattccgatgcttgtcttgcccagccacttgccagcgacaccacggcgcttcgttcgttttctcttctctttcacccctgccgtacgcgtagtttacgtcgtgcacttgtttctgatttgaagtccgaacaaacaatgaaacaatcttctgccacacacacgcacacgtacctgtcgcgtaagaaatcgcggacacatggggaggaggagaaggagaaaatcttccggtgcaagtgcaatgaaacgcacacgtatgcaagcgcgttattttccaaagagaaaaaaatgcaccgaaatacggacgatgttgtgtgatatggcaggctgacgtggaggtgagcttcgagctggagctggaggcggggacgagcctgctggagaaggcggaggcgttcgacccggcgtacgacgacgacgcgcagaagctgtgcggagtcaagggcgcggacgccaggggcggcgtggggccattcggcctctgggtgctggcctccgccgacctgcaggagcggacggccgtcttcttcagggtgttcagggacggacacggcaagcccaaggtgctcatgtgcaccgaccccaccaagtcgtctcttagtccggatctgtacaagccgaccttcgcgggcttcgtcgacgccgacatctccagcggcaagatcacccttagaagcttgatcgatcggtccgtggtcgagagcttcggcgcgggaggcaagacgtgcatcctgtcacgggtgtacccgtccatcgccgtcgggaaggacgctcacctctacgttttcaacaacggcgaggtggacgtcacggtgtccggcctgaccgcctgggagatgaagaaaccgctgatgaacggcgcctgaaattgaagggaaaaaacaaaagtctatccggccgccacgtgactttctttattttcgttcttcttcttcttcgtcaacacacgtctctgccgccaaaggagaaattgattgatttcaacgtacgtatgtgtacgtctgctgccgatcgaaagagaattggattattataaaattgtttgaggccggtccttccattttctcgtccttaattcctctggcatgcaggatcagtgaccgacgacttgtagtttgcttgagcatgttgtttacgctgctagcttcttgttgtacgatacacatatacaacaatatgacacgatgaataaaaaaagtgctgctaattaattttacagtgtgtccacaagcaacgagagctagcgctgcctttacgtactagctctcctttcgttttgaactatatataaaacgttttagctttttttagatatgatgtttttttacttatagtgtatgttttagttatgtagaaaaaatgtatctggaaacagat

SEQ ID NO: 50409 - DNA, 1037 bp, Zea Mays
aatcagacggcggacaggcggagtcgcggaaaccacaaccgcacgattcgtacaacgtccaaaccgagtgggtccccgcccgctgccgtgcttctccccattttccgcagtttcttcaggttttctctttcctctcctcgcttatcttcctcccaagcaaccgcttctcgccgggcgccggcggcagctgccacgtgccgccaccgtctcatcgcctcgccgtactagccccgcggcttcgtcagccgatgagccgctgccctgtttcctctcatacaatataatggtgtcaaagcctgtagtgcttgtcttcctgttggtggtactcataatcacatcccagtttgaatggaagcaacagcttgtaaacgagttggaatctacggctcgcaaccagaaacatgtttcaagtagagaagagcttgtcaaggatcagataatcttcactcaagaaaagatgattcaaagattgaataattttgtccgaaatcttcagcaacagttggtgcagtgtcgtggcaacaacaggacagttaatcgttctggaacttctttgacatcttatattagtgagatccagatgccgcagatgatggatgactgacaatgtcgcgcggcatgaactatacggataaaaagataggatattcacagagtcatgtggacagcgaagttctcccagtaaaagcagtcataatgtagtattagcctggacagaacaatattcgatcagttccagagagaaaggaacgctgatcctttgaaaacccgtgtaattttatttcccttttcctctttttcccccctaagagaactgaaaattctttgttttatgataggcatctatatatacttattatcctctacagatattgtgatatgaaggtgttttagaagtgtaaattgctctttaatgcgtgctctggcacaatagcactgaaacctcttcagtgaggagaggactctgcctttacatattacagtctccgtttctccccatttcgcagcatgctgcaacttttttaaaacgtcataac

SEQ ID NO: 50410 - DNA, 1005 bp, Zea Mays
aatcagacggcggacaggcggagtcgcggaaaccacaaccgcacgattcgtacaacgtccaaaccgagtgggtccccgcccgctgccgtgcttctccccattttccgcagtttcttcaggttttctctttcctctcctcgcttatcttcctcccaagcaaccgcttctcgccgggcgccggcggcagctgccacgtgccgccaccgtctcatcgcctcgccgtactagccccgcggcttcgtcagccgatgagccgctgccctcctgtagtgcttgtcttcctgttggtggtactcataatcacatcccagtttgaatggaagcaacagcttgtaaacgagttggaatctacggctcgcaaccagaaacatgtttcaagtagagaagagcttgtcaaggatcagataatcttcactcaagaaaagatgattcaaagattgaataattttgtccgaaatcttcagcaacagttggtgcagtgtcgtggcaacaacaggacagttaatcgttctggaacttctttgacatcttatattagtgagatccagatgccgcagatgatggatgactgacaatgtcgcgcggcatgaactatacggataaaaagataggatattcacagagtcatgtggacagcgaagttctcccagtaaaagcagtcataatgtagtattagcctggacagaacaatattcgatcagttccagagagaaaggaacgctgatcctttgaaaacccgtgtaattttatttcccttttcctctttttcccccctaagagaactgaaaattctttgttttatgataggcatctatatatacttattatcctctacagatattgtgatatgaaggtgttttagaagtgtaaattgctctttaatgcgtgctctggcacaatagcactgaaacctcttcagtgaggagaggactctgcctttacatattacagtctccgtttctccccatttcgcagcatgctgcaacttttttaaaacgtcataac

SEQ ID NO: 50411 - DNA, 1022 bp, Zea Mays
ggcggagtcgcggaaaccacaaccgcacgattcgtacaacgtccaaaccgagtgggtccccgcccgctgccgtgcttctccccattttccgcagtttcttcaggttttctctttcctctcctcgcttatcttcctcccaagcaaccgcttctcgccgggcgccggcggcagctgccacgtgccgccaccgtctcatcgcctcgccgtactagccccgcggcttcgtcagccgatgagccgctgccctggtttcctctcatacaatataatggtgtcaaagcctgtagtgcttgtcttcctgttggtggtactcataatcacatcccagtttgaatggaagcaacagcttgtaaacgagttggaatctacggctcgcaaccagaaacatgtttcaagtagagaagagcttgtcaaggatcagataatcttcactcaagaaaagatgattcaaagattgaataattttgtccgaaatcttcagcaacagttggtgcagtgtcgtggcaacaacaggacagttaatcgttctggaacttctttgacatcttatattagtgagatccagatgccgcagatgatggatgactgacaatgtcgcgcggcatgaactatacggataaaaagataggatattcacagagtcatgtggacagcgaagttctcccagtaaaagcagtcataatgtagtattagcctggacagaacaatattcgatcagttccagagagaaaggaacgctgatcctttgaaaacccgtgtaattttatttcccttttcctctttttcccccctaagagaactgaaaattctttgttttatgataggcatctatatatacttattatcctctacagatattgtgatatgaaggtgttttagaagtgtaaattgctctttaatgcgtgctctggcacaatagcactgaaacctcttcagtgaggagaggactctgcctttacatattacagtctccgtttctccccatttcgcagcatgctgcaacttttttaaaacgtcataac

SEQ ID NO: 50412 - DNA, 1039 bp, Zea Mays
ggcggagtcgcggaaaccacaaccgcacgattcgtacaacgtccaaaccgagtgggtccccgcccgctgccgtgcttctccccattttccgcagtttcttcaggttttctctttcctctcctcgcttatcttcctcccaagcaaccgcttctcgccgggcgccggcggcagctgccacgtgccgccaccgtctcatcgcctcgccgtactagccccgcggcttcgtcagccgatgagccgctgccctgtgagctatcctctcctggtttcctctcatacaatataatggtgtcaaagcctgtagtgcttgtcttcctgttggtggtactcataatcacatcccagtttgaatggaagcaacagcttgtaaacgagttggaatctacggctcgcaaccagaaacatgtttcaagtagagaagagcttgtcaaggatcagataatcttcactcaagaaaagatgattcaaagattgaataattttgtccgaaatcttcagcaacagttggtgcagtgtcgtggcaacaacaggacagttaatcgttctggaacttctttgacatcttatattagtgagatccagatgccgcagatgatggatgactgacaatgtcgcgcggcatgaactatacggataaaaagataggatattcacagagtcatgtggacagcgaagttctcccagtaaaagcagtcataatgtagtattagcctggacagaacaatattcgatcagttccagagagaaaggaacgctgatcctttgaaaacccgtgtaattttatttcccttttcctctttttcccccctaagagaactgaaaattctttgttttatgataggcatctatatatacttattatcctctacagatattgtgatatgaaggtgttttagaagtgtaaattgctctttaatgcgtgctctggcacaatagcactgaaacctcttcagtgaggagaggactctgcctttacatattacagtctccgtttctccccatttcgcagcatgctgcaacttttttaaaacgtcataac

SEQ ID NO: 50413 - DNA, 641 bp, Zea Mays
ataacatgcaaattattgcttccaagaccttattttcatgataatcttcactcaagaaaagatgattcaaagattgaataattttgtccgaaatcttcagcaacagttggtgcagtgtcgtggcaacaacaggacagttaatcgttctggaacttctttgacatcttatattagtgagatccagatgccgcagatgatggatgactgacaatgtcgcgcggcatgaactatacggataaaaagataggatattcacagagtcatgtggacagcgaagttctcccagtaaaagcagtcataatgtagtattagcctggacagaacaatattcgatcagttccagagagaaaggaacgctgatcctttgaaaacccgtgtaattttatttcccttttcctctttttcccccctaagagaactgaaaattctttgttttatgataggcatctatatatacttattatcctctacagatattgtgatatgaaggtgttttagaagtgtaaattgctctttaatgcgtgctctggcacaatagcactgaaacctcttcagtgaggagaggactctgcctttacatattacagtctccgtttctccccatttcgcagcatgctgcaacttttttaaaacgtcataac

SEQ ID NO: 50414 - DNA, 1687 bp, Zea Mays
ccatttgaggcacctggagagatctccgttcttggccacgactgcaacagcgacccgaccaacctacctcttgtctcccgtccccttcttcaggtcattttccaccgccaccaggcagccgaaccccttctcgagctcgatcgacgattgcttgtcgaatcacttccttcaactcgcctctgcagcggccttgccggtgccggtgccggtgccagttgccactgccaggctgcccgccgccaccacctctcctctccattccataaaacagaaacatgaatgggagcagagcaatagatgaggagtacaatatggtcaattaaagggtgcaagtactcctcgacagtgcagcatttaagaaaacaaattgacctccatagctcccgctcgccatttccccccactataaatactcgctgccatgccatctcttcttccacaccacagtccacaggcaccagcaccaccagtcaccactcctccggctccgagctgaggaagggaagggaagtcagagccgcagctgcagaccgtcgtcaccgagacgagacacttcacggtgcgtgatgagccgaggcagcagcaagggtgggaagggcggggggctggacctgaagctgcacctgtctcccccggcggcggcggcggcggcgtcctccgacgaggagtggtcgtcttcgtcgtcgtcgccgccgccgagctcgtgcctgtcgtcgtcggagggcgagcgggagccgcggccgcagatccacgggcacgggctgcagtggtccgacagcccggaggcgacgcccatggtgctggcggcctgcccgcgctgcctcatgtacgtgatgctctccgaggccgacccgcgctgcccccgctgccgcagccccgtcctcctcgacttcctgcaccacgccgccgcagccgccacccgcagcagcagcagcatcaacgtcagccggcgggaggacggcgatcacagccgcagtagcaccagcggcgccggtggccggaggaacaggagggcgtgaccatccgcagttccacaccgcacggcactatcgaaaatccacaagtttccccctttttttccccattatcattaccactagttctatcaatcagtaccagcagtagcttcggtttcgctcagcagtccgtccgtttcccaacaggaatgaaacatgagctctagatccctccctgcttcttcttcccggccggagctctacataaaaactggaagcgttcgccggttttccgatgttcacgttggatggggaagtcgtcgtgatcgatacgtcgaacgacaatcatatatttgagctgcagcctgcagctgatctgcgacatttttttctttctttgttggagatggtggcgtatccttgtcaagctaggagaagtagaaaagagacgagcatagcatttttttctcagagcctggctgcaattgcaacgaacgatcgatagcggagcaggtgagaccgtgactctgtctctactctcaacgtgagaggagagtagcaaacgcaggaaggaactggtacgcattgtatgacgcgacgcaatgaagaggcgaattaaattccgggacgccaccctccatgaaccagcacgcttccatctgaatattgcgagcatcgcccaccttaattgccgctgcaccccccggccccttggtcaactttgccaccac

SEQ ID NO: 50415 - DNA, 2892 bp, Zea Mays
ctaccattcagcgagagcgagagagaccacccatcgtctcatcgtcttcgccttcgcttaatcggatttattagggatcatcatcagggatgagagccgggggctgcacggtgcagcaggcgctgtcgccggaggccgcggtggtggtgaagcaggccgtgagcctggcgcggcgccgcgggaacgcgcaggtgacgccgctgcacgtggccagcgccatgctgcagcagcaggcgccgacggggctgctgcgcgccgcgtgcctgcagtcgcactcgcacccgctgcagtgcaaggccctggagctctgcttcaacgtcgcgctcaaccgcctgccggcctcggcctcgccgctcctcggcggccacggccacgtctactacccgccgtcgctctccaacgcgctcgtcgccgcattcaagcgcgcgcaggcgcaccagcgccggggctccgtcgacacgcagcagcagcagcagccgcccgtgctcgccgtcaagatcgagctggagcagctcgtcatctccatcctcgatgaccccagcatcagccgcgtcatgcgcgaggccggcttctccagcacccatgtcaaggccaacgtcgagcaggcagtctcttccatcgaggcaaacaactcggcctccgccgccgcaaccaaaaaccctaaccctagcgcatctccacccgaagagaccaagcctgcaggcaagctgctgctacccctcgatcaagcgcgcgacgaggacgtcgccgtcgtcctggactgcctggcgtcccgaagcaagaagcgcgtcatggtcgtcgccgagtgcgcggcctcggccgaggcgccggtgctggcggcggtcgagaggatcaagcgcggcgaggccctgcgcggcgcgcaggtggtcagcgtcagcgtgtccaggttccgcgacctgccgagggacgaggcggagagggtgctcgtggagctccggtgcgcggtgaaggcgggcggcagggcgggcggcgtggtgctggtcgtggaggacctcgggtgggcggccgagttctgggccgggcgcggagagtccgggagggccaggtggccgtctgcctgctgctactactgcgccgtcgagcacgccgtcgccgaggtgcgcgccctggcgtgccgcggcggcgacggcgtctggctcgttggatacgggtcgtaccagagctacatgaggtgcagggccgggcagccctcgctggagactctctggggcctccagacgctcgccgtccccgctggcagcctcgccttcagcctcaacttcgtcggcgacagtgcaactgcaatgacaatcaatcaccagtcgatcagctgcaagatggcaaagtgcgacgacgacagaagtgggaacgggtcggcggcgccacgttgcctgtcgcttttggacgccggcggttccggccgcttgacggccgtttcgagcttctgcgccgccgactgctccgcaaccaagtgcgacgcgacggtgaagtcgagtatccccccttggcttcagcattgccgggatcatcaggagccttcccgttgtaagaaaagctcgacatgcggcggctcgccgtctcatcatcaccggacggccctaaacttctccacggtggtgtcgccgtcctcctcggtctcgtcgtacgagcagcactaccacctgcggcaccagtcgtaccagccatggcttctcgtggctgacggcgcccgcgaggccgagcacccgtgtaacaaggccaggtgctctgccgccgtccagctacacgtcgtggacgacgaggacgggaagcctctaagcgcgataaaggtcaagtcccacgactcgagcgcgtccaatggctccgtggagtgccgctcgcggttcaaggagctgagcgccgagaaccttaaggtcctctgctccgcgctcgagaaagaggtgccgtggcaggcggagatcgtgcctgagatcgcgagcacggtcctgcagtgccgttccggcatggcgaggaggcgcgaagccgctgtttcgagctcgagaccgtcgtcaacacaggcgtgtgccaaggaggacacgtggatgctcttccacggtggcgacgccgagggcaaggcgagggtggccagggagctggcccgcctcgtcttcggctcgcgcaagagcttcgtatccatcggcggcagccgcaccaccgcgtcgtctccggcttgttggtccgacggctcttccgagcagcagcgcaagcggcctcggttgacggaggcgagcaaccacggctgtcgtcacgagagcctctacgaggccgtacgcgacaacccgcaccgcgtcatcctggtacaggacgtcgagcagggtggctgctggcggtgccagagggacattttggaggccatccaaagcggcttggtccggagccgtgccggcgacgacgacgcagcactcggcgacgccatcgtcgttctgagctgccagagccttgacgcgtggtcgacaaccacctcgccactaacgaccaagaaggcgaaggcggagagcaaggaggagccggaagaggaagagagcgcaggtgaccaccgccgcaaagaagccataactgctgccgctgcgtcgccgtcatcttcactttgctttgatctgaacatggacgttgagaaccacgacacggagagttgcttcacagatgctagtctgctcaaggcagtggatcgaacgttcttcttcagacgacctgatgagagtagcgattagcttagtgacaaatgacctatctctcttttgttcttctctgtaacattggtcagtttcttgtagtttgttcctaagatgtttgtgttggaagaatggagcgtgcatgtggtactcttctggattgaacctgcgtggaaattaattaaaggcaagtttggatgag

SEQ ID NO: 50416 - DNA, 2417 bp, Zea Mays
tcagcgagagcgagagagaccacccatcgtctcatcgtcttcgccttcgcttaatcggatttattagggatcatcatcagggatgagagccgggggctgcacggtgcagcaggcgctgtcgccggaggccgcggtggtggtgaagcaggccgtgagcctggcgcggcgccgcgggaacgcgcaggtgacgccgctgcacgtggccagcgccatgctgcagcagcaggcgccgacggggctgctgcgcgccgcgtgcctgcagtcgcactcgcacccgctgcagtgcaaggccctggagctctgcttcaacgtcgcgctcaaccgcctgccggcctcggcctcgccgctcctcggcggccacggccacgtctactacccgccgtcgctctccaacgcgctccacgccgtcgccgaggtgcgcgccctggcgtgccgcggcggcgacggcgtctggctcgttggatacgggtcgtaccagagctacatgaggtgcagggccgggcagccctcgctggagactctctggggcctccagacgctcgccgtccccgctggcagcctcgccttcagcctcaacttcgtcggcgacaggtaaccattcataagaatcataattaatcgaacactcagtaacttgttatttgtatcaatatcactgccgaccatttcttcattttcgcatgtcccatctcaatttgattcaaatttgagacaatgcgtggcaaacaatagtctcgattgatcatggattcatggggtacgtgactgacgaaaatacttaactatttaacttatcactttgggttctccgtctggcagtgcaactgcaatgacaatcaatcaccagtcgatcagctgcaagatggcaaagtgcgacgacgacagaagtgggaacgggtcggcggcgccacgttgcctgtcgcttttggacgccggcggttccggccgcttgacggccgtttcgagcttctgcgccgccgactgctccgcaaccaagtgcgacgcgacggtgaagtcgagtatccccccttggcttcagcattgccgggatcatcaggagccttcccgttgtaagaaaagctcgacatgcggcggctcgccgtctcatcatcaccggacggccctaaacttctccacggtggtgtcgccgtcctcctcggtctcgtcgtacgagcagcactaccacctgcggcaccagtcgtaccagccatggcttctcgtggctgacggcgcccgcgaggccgagcacccgtgtaacaaggccaggtgctctgccgccgtccagctacacgtcgtggacgacgaggacgggaagcctctaagcgcgataaaggtcaagtcccacgactcgagcgcgtccaatggctccgtggagtgccgctcgcggttcaaggagctgagcgccgagaaccttaaggtcctctgctccgcgctcgagaaagaggtgccgtggcaggcggagatcgtgcctgagatcgcgagcacggtcctgcagtgccgttccggcatggcgaggaggcgcgaagccgctgtttcgagctcgagaccgtcgtcaacacaggcgtgtgccaaggaggacacgtggatgctcttccacggtggcgacgccgagggcaaggcgagggtggccagggagctggcccgcctcgtcttcggctcgcgcaagagcttcgtatccatcggcggcagccgcaccaccgcgtcgtctccggcttgttggtccgacggctcttccgagcagcagcgcaagcggcctcggttgacggaggcgagcaaccacggctgtcgtcacgagagcctctacgaggccgtacgcgacaacccgcaccgcgtcatcctggtacaggacgtcgagcagggtggctgctggcggtgccagagggacattttggaggccatccaaagcggcttggtccggagccgtgccggcgacgacgacgcagcactcggcgacgccatcgtcgttctgagctgccagagccttgacgcgtggtcgacaaccacctcgccactaacgaccaagaaggcgaaggcggagagcaaggaggagccggaagaggaagagagcgcaggtgaccaccgccgcaaagaagccataactgctgccgctgcgtcgccgtcatcttcactttgctttgatctgaacatggacgttgagaaccacgacacggagagttgcttcacagatgctagtctgctcaaggcagtggatcgaacgttcttcttcagacgacctgatgagagtagcgattagcttagtgacaaatgacctatctctcttttgttcttctctgtaacattggtcagtttcttgtagtttgttcctaagatgtttgtgttggaagaatggagcgtgcatgtggtactcttctggattgaacctgcgtggaaattaattaaaggcaagtttggatgag

SEQ ID NO: 50417 - DNA, 2956 bp, Zea Mays
atcactctcactgccatgccgaccccacagcaagagccagccacggattgacggatgggatacctccaagtcggaacgcggcttccttcctccggcggtccggcccgaatcaacgcgtggcgtcggagctccgtggcgtcgtcgtcctctcccctctctttcccaacacctcgcgtgttgtctagcactctagctgcttctctcggttctcgcgactcccaaacggcaaaacgccaaaaccctagccgcggccattccggaattggccatggaggcgagggcgtcgccgcgtccgtcggtctccatcggtggcggcggcggcttcggagctgggcggggtgacgacagcgccttctcgtttctctcaaaggggtggcgcgaggtgcgggattccgccaccgccgacctgcgcctcatgcgtgcgagggctgattccctccgcacgctcgcggaccgcgagctcgagcacatcctcgcgtccgcctccactgcgctgacctccgcgccgccgccgccgctcgccgcgggggcgcccatagccgagctcgagttcgtgcgcacacggatccagcccaagatctccgaactgcggcgccggtacgtgtcgcaggagcgggagctcggccgcagggtgctcgaggggtgggcgccgcgcggggcggggaaacccgcgcgcgcacgtgttgacctctctgggatcaccgccatccgcaacgccatcgtctctgaagtggatggcggggagcgctggaggcggaagaggggaaagaatgggaggtgctcaggatgatacgggacggcatcaaagagttcgagcgccggagccagaccaaggagatttttgagggattgcgcagtaccggcgagctcgtcgagaaattcaagtccagcctgaaatcattcaacatggagtctcaaggatccaaggaaatccaaccactggatctacctgaaatactggcaaatcttgtaaggcagtctgaaccatttttggatcaacttggtgtacggagagatcagtgtgacaaactagtggaggcattgtgtaggaaacaaaatcattccctttcagaaaacacatccttgcctgtaaatgataagtcatcagacgaacttgacttgagaatcgcaagcgtgcttcaaagttctggttatcatgctgatgatggtttctggagtgaacctacaaagtctgaggtctcagacgataaaagacatgtggctatagtcaccacagcaagtttaccatggatgacaggaacagcagttaatccattgttccgtgcagcatatctcgcaaaaggtactagacaagatgtgacactggtagtgccttggctttgcaaatcagaccaagaactggtatacccaaatagcatgacgttcagttcaccagaagagcaggaaacttatataaggagctggctggaggaaagactaggatttgaatcaaacttcaagatatccttttatcctggcaagttctcaaaagagcggcgtagcatcattccagctggtgatacgtctcagttcataccgtcaagagaagctgatatagcaatattggaagaaccagaacatctcaattggtatcatcatgggaaacgctggactgacaagttcaaccatgttgttggtgtagttcatacaaactacctggaatatatcaagagagagaagaatggagctcttcaggcctttctagttaaacacatcaacaattgggtgaccagagcatactgtgacaaggtcttacgtctttctgcagcaactcaagatttaccaaagtctattgtttgcaatgttcatggtgttaacccaaagttcctgaagattggagaagaaataactgccaatagggggagtggggagcctccattttccaagggagcatattttcttgggaagatggtttgggccaaaggttatagggaactcatagatttgatggctaaacataaaagcgacttagaaggattcaagttagatgtatacggaagtggtgaggactcgcaagaagttcaatccactgccaggaggttagatttgagtctcaattttttcaagggaagggatcatgctgataattcactccatgggtacaaggttttcataaatccgagcattagtgatgtcctgtgcacagcaacggcagaggctcttgcaatggggaaattcgtgatctgcgcagaacatccatcaaatgagtttttcatgtcatttccgaactgtttgacatacaagacttcagaggagtttgttgcgagagtgaaagaggcaatggatagagaaccccaaccgctaacccctgagcaaagatacaacctttcgtgggaggcagcgactgagagattcatggagtactcagaccttgacaaggttctgaacaatgaggctgctcagcctggacaaggtaggaaaagaaagaataaaagaacctcacagcctaatttgtccgacataatggatggcggtctagcgttggcccatcgatgcttaactggcaatgaggttctcaggctggcaaccggagccattcctggtacccgggactacgataagcagcactgtgtggatatgggtctcttgcctcctcaagtacagcaccctgtatatggctggtgatatggccggtgatgactgatgagcacccaaagctaatcgtaggtatatatgtacataatacaccatgtcgcccttatgtcgaccaatgtttggagtattgtaattgtagcatgcatgacgacctttgcccattgttttgtactctgtaataaggttctctccttaaattggagttttatcgcagaaatgtgtagtacatggacatcaaaagttcatgactccagaagactgtcagcacaatatttgtctgcttttgccattgaattagagaaacatagtcttaaaaagttaagagcatctctagtggtaggaggaaatgtttttttgttgg

SEQ ID NO: 50418 - DNA, 2951 bp, Zea Mays
atcactctcactgccatgccgaccccacagcaagagccagccacggattgacggatgggatacctccaagtcggaacgcggcttccttcctccggcggtccggcccgaatcaacgcgtggcgtcggagctccgtggcgtcgtcgtcctctcccctctctttcccaacacctcgcgtgttgtctagcactctagctgcttctctcggttctcgcgactcccaaacggcaaaacgccaaaaccctagccgcggccattccggaattggccatggaggcgagggcgtcgccgcgtccgtcggtctccatcggtggcggcggcggcttcggagctgggcggggtgacgacagcgccttctcgtttctctcaaaggggtggcgcgaggtgcgggattccgccaccgccgacctgcgcctcatgcgtgcgagggctgattccctccgcacgctcgcggaccgcgagctcgagcacatcctcgcgtccgcctccactgcgctgacctccgcgccgccgccgccgctcgccgcgggggcgcccatagccgagctcgagttcgtgcgcacacggatccagcccaagatctccgaactgcggcgccggtacgtgtcgcaggagcgggagctcggccgcagggtgctcgaggggtgggcgccgcgcggggcggggaaacccgcgcgcgcacgtgttgacctctctgggatcaccgccatccgcaacgccatcgtctctgaagtggatggcggggagcgctggaggcggaagaggggaaagaatgggaggtgctcaggatgatacgggacggcatcaaagagttcgagcgccggagccagaccaaggagatttttgagggattgcgcagtaccggcgagctcgtcgagaaattcaagtccagcctgaaatcattcaacatggagtctcaaggatccaaggaaatccaaccactggatctacctgaaatactggcaaatcttgtaaggcagtctgaaccatttttggatcaacttggtgtacggagagatcagtgtgacaaactagtggaggcattgtgtaggaaacaaaatcattccctttcagaaaacacatccttgcctgtaaatgataagtcatcagacgaacttgacttgagaatcgcaagcgtgcttcaaagttctggttatcatgctgatgatggtttctggagtgaacctacaaagtctgaggtctcagacgataaaagacatgtggctatagtcaccacagcaagtttaccatggatgacaggaacagcagttaatccattgttccgtgcagcatatctcgcaaaaggtactagacaagatgtgacactggtagtgccttggctttgcaaatcagaccaagaactggtatacccaaatagcatgacgttcagttcaccagaagagcaggaaacttatataaggagctggctggaggaaagactaggatttgaatcaaacttcaagatatccttttatcctgttctcaaaagagcggcgtagcatcattccagctggtgatacgtctcagttcataccgtcaagagaagctgatatagcaatattggaagaaccagaacatctcaattggtatcatcatgggaaacgctggactgacaagttcaaccatgttgttggtgtagttcatacaaactacctggaatatatcaagagagagaagaatggagctcttcaggcctttctagttaaacacatcaacaattgggtgaccagagcatactgtgacaaggtcttacgtctttctgcagcaactcaagatttaccaaagtctattgtttgcaatgttcatggtgttaacccaaagttcctgaagattggagaagaaataactgccaatagggggagtggggagcctccattttccaagggagcatattttcttgggaagatggtttgggccaaaggttatagggaactcatagatttgatggctaaacataaaagcgacttagaaggattcaagttagatgtatacggaagtggtgaggactcgcaagaagttcaatccactgccaggaggttagatttgagtctcaattttttcaagggaagggatcatgctgataattcactccatgggtacaaggttttcataaatccgagcattagtgatgtcctgtgcacagcaacggcagaggctcttgcaatggggaaattcgtgatctgcgcagaacatccatcaaatgagtttttcatgtcatttccgaactgtttgacatacaagacttcagaggagtttgttgcgagagtgaaagaggcaatggatagagaaccccaaccgctaacccctgagcaaagatacaacctttcgtgggaggcagcgactgagagattcatggagtactcagaccttgacaaggttctgaacaatgaggctgctcagcctggacaaggtaggaaaagaaagaataaaagaacctcacagcctaatttgtccgacataatggatggcggtctagcgttggcccatcgatgcttaactggcaatgaggttctcaggctggcaaccggagccattcctggtacccgggactacgataagcagcactgtgtggatatgggtctcttgcctcctcaagtacagcaccctgtatatggctggtgatatggccggtgatgactgatgagcacccaaagctaatcgtaggtatatatgtacataatacaccatgtcgcccttatgtcgaccaatgtttggagtattgtaattgtagcatgcatgacgacctttgcccattgttttgtactctgtaataaggttctctccttaaattggagttttatcgcagaaatgtgtagtacatggacatcaaaagttcatgactccagaagactgtcagcacaatatttgtctgcttttgccattgaattagagaaacatagtcttaaaaagttaagagcatctctagtggtaggaggaaatgtttttttgttgg

SEQ ID NO: 50419 - DNA, 2953 bp, Zea Mays
ctcactgccatgccgaccccacagcaagagccagccacggattgacggatgggatacctccaagtcggaacgcggcttccttcctccggcggtccggcccgaatcaacgcgtggcgtcggagctccgtggcgtcgtcgtcctctcccctctctttcccaacacctcgcgtgttgtctagcactctagctgcttctctcggttctcgcgactcccaaacggcaaaacgccaaaaccctagccgcggccattccggaattggccatggaggcgagggcgtcgccgcgtccgtcggtctccatcggtggcggcggcggcttcggagctgggcggggtgacgacagcgccttctcgtttctctcaaaggggtggcgcgaggtgcgggattccgccaccgccgacctgcgcctcatgcgtgcgagggctgattccctccgcacgctcgcggaccgcgagctcgagcacatcctcgcgtccgcctccactgcgctgacctccgcgccgccgccgccgctcgccgcgggggcgcccatagccgagctcgagttcgtgcgcacacggatccagcccaagatctccgaactgcggcgccggtacgtgtcgcaggagcgggagctcggccgcagggtgctcgaggggtgggcgccgcgcggggcggggaaacccgcgcgcgcacgtgttgacctctctgggatcaccgccatccgcaacgccatcgtctctgaagtggatggcggggagcgctggaggcgcgtggtgtggaacggggaggcggaagaggggaaagaatgggaggtgctcaggatgatacgggacggcatcaaagagttcgagcgccggagccagaccaaggagatttttgagggattgcgcagtaccggcgagctcgtcgagaaattcaagtccagcctgaaatcattcaacatggagtctcaaggatccaaggaaatccaaccactggatctacctgaaatactggcaaatcttgtaaggcagtctgaaccatttttggatcaacttggtgtacggagagatcagtgtgacaaactagtggaggcattgtgtaggaaacaaaatcattccctttcagaaaacacatccttgcctgtaaatgataagtcatcagacgaacttgacttgagaatcgcaagcgtgcttcaaagttctggttatcatgctgatgatggtttctggagtgaacctacaaagtctgaggtctcagacgataaaagacatgtggctatagtcaccacagcaagtttaccatggatgacaggaacagcagttaatccattgttccgtgcagcatatctcgcaaaaggtactagacaagatgtgacactggtagtgccttggctttgcaaatcagaccaagaactggtatacccaaatagcatgacgttcagttcaccagaagagcaggaaacttatataaggagctggctggaggaaagactaggatttgaatcaaacttcaagatatccttttatcctggcaagttctcaaaagagcggcgtagcatcattccagctggtgatacgtctcagttcataccgtcaagagaagctgatatagcaatattggaagaaccagaacatctcaattggtatcatcatgggaaacgctggactgacaagttcaaccatgttgttggtgtagttcatacaaactacctggaatatatcaagagagagaagaatggagctcttcaggcctttctagttaaacacatcaacaattgggtgaccagagcatactgtgacaagcaactcaagatttaccaaagtctattgtttgcaatgttcatggtgttaacccaaagttcctgaagattggagaagaaataactgccaatagggggagtggggagcctccattttccaagggagcatattttcttgggaagatggtttgggccaaaggttatagggaactcatagatttgatggctaaacataaaagcgacttagaaggattcaagttagatgtatacggaagtggtgaggactcgcaagaagttcaatccactgccaggaggttagatttgagtctcaattttttcaagggaagggatcatgctgataattcactccatgggtacaaggttttcataaatccgagcattagtgatgtcctgtgcacagcaacggcagaggctcttgcaatggggaaattcgtgatctgcgcagaacatccatcaaatgagtttttcatgtcatttccgaactgtttgacatacaagacttcagaggagtttgttgcgagagtgaaagaggcaatggatagagaaccccaaccgctaacccctgagcaaagatacaacctttcgtgggaggcagcgactgagagattcatggagtactcagaccttgacaaggttctgaacaatgaggctgctcagcctggacaaggtaggaaaagaaagaataaaagaacctcacagcctaatttgtccgacataatggatggcggtctagcgttggcccatcgatgcttaactggcaatgaggttctcaggctggcaaccggagccattcctggtacccgggactacgataagcagcactgtgtggatatgggtctcttgcctcctcaagtacagcaccctgtatatggctggtgatatggccggtgatgactgatgagcacccaaagctaatcgtaggtatatatgtacataatacaccatgtcgcccttatgtcgaccaatgtttggagtattgtaattgtagcatgcatgacgacctttgcccattgttttgtactctgtaataaggttctctccttaaattggagttttatcgcagaaatgtgtagtacatggacatcaaaagttcatgactccagaagactgtcagcacaatatttgtctgcttttgccattgaattagagaaacatagtcttaaaaagttaagagcatctctagtggtaggaggaaatgtttttttgttgg

SEQ ID NO: 50420 - DNA, 2638 bp, Zea Mays
cccaacacctcgcgtgttgtctagcactctagctgcttctctcggttctcgcgactcccaaacggcaaaacgccaaaaccctagccgcggccattccggaattggccatggaggcgagggcgtcgccgcgtccgtcggtctccatcggtggcggcggcggcttcggagctgggcggggtgacgacagcgccttctcgtttctctcaaaggggtggcgcgaggtgcgggattccgccaccgccgacctgcgcctcatgcgtgcgagggctgattccctccgcacgctcgcggaccgcgagctcgagcacatcctcgcgtccgcctccactgcgctgacctccgcgccgccgccgccgctcgccgcgggggcgcccatagccgagctcgagttcgtgcgcacacggatccagcccaagatctccgaactgcggcgccggtacgtgtcgcaggagcgggagctcggccgcagggtgctcgaggggtgggcgccgcgcggggcggggaaacccgcgcgcgcacgtgttgacctctctgggatcaccgccatccgcaacgccatcgtctctgaagtggatggcggggagcgctggaggcgcgtggtgtggaacggggaggcggaagaggggaaagaatgggaggtgctcaggatgatacgggacggcatcaaagagttcgagcgccggagccagaccaaggagatttttgagggattgcgcagtaccggcgagctcgtcgagaaattcaagtccagcctgaaatcattcaacatggagtctcaaggatccaaggaaatccaaccactggatctacctgaaatactggcaaatcttgtaaggcagtctgaaccatttttggatcaacttggtgtacggagagatcagtgtgacaaactagtggaggcattgtgtaggaaacaaaatcattccctttcagaaaacacatccttgcctgtaaatgataagtcatcagacgaacttgacttgagaatcgcaagcgtgcttcaaagttctggttatcatgctgatgatggtttctggagtgaacctacaaagtctgaggtctcagacgataaaagacatgtggctatagtcaccacagcaagtttaccatggatgacaggaacagcagttaatccattgttccgtgcagcatatctcgcaaaagttctcaaaagagcggcgtagcatcattccagctggtgatacgtctcagttcataccgtcaagagaagctgatatagcaatattggaagaaccagaacatctcaattggtatcatcatgggaaacgctggactgacaagttcaaccatgttgttggtgtagttcatacaaactacctggaatatatcaagagagagaagaatggagctcttcaggcctttctagttaaacacatcaacaattgggtgaccagagcatactgtgacaaggtcttacgtctttctgcagcaactcaagatttaccaaagtctattgtttgcaatgttcatggtgttaacccaaagttcctgaagattggagaagaaataactgccaatagggggagtggggagcctccattttccaagggagcatattttcttgggaagatggtttgggccaaaggttatagggaactcatagatttgatggctaaacataaaagcgacttagaaggattcaagttagatgtatacggaagtggtgaggactcgcaagaagttcaatccactgccaggaggttagatttgagtctcaattttttcaagggaagggatcatgctgataattcactccatgggtacaaggttttcataaatccgagcattagtgatgtcctgtgcacagcaacggcagaggctcttgcaatggggaaattcgtgatctgcgcagaacatccatcaaatgagtttttcatgtcatttccgaactgtttgacatacaagacttcagaggagtttgttgcgagagtgaaagaggcaatggatagagaaccccaaccgctaacccctgagcaaagatacaacctttcgtgggaggcagcgactgagagattcatggagtactcagaccttgacaaggttctgaacaatgaggctgctcagcctggacaaggtaggaaaagaaagaataaaagaacctcacagcctaatttgtccgacataatggatggcggtctagcgttggcccatcgatgcttaactggcaatgaggttctcaggctggcaaccggagccattcctggtacccgggactacgataagcagcactgtgtggatatgggtctcttgcctcctcaagtacagcaccctgtatatggctggtgatatggccggtgatgactgatgagcacccaaagctaatcgtaggtatatatgtacataatacaccatgtcgcccttatgtcgaccaatgtttggagtattgtaattgtagcatgcatgacgacctttgcccattgttttgtactctgtaataaggttctctccttaaattggagttttatcgcagaaatgtgtagtacatggacatcaaaagttcatgactccagaagactgtcagcacaatatttgtctgcttttgccattgaattagagaaacatagtcttaaaaagttaagagcatctctagtggtaggaggaaatgtttttttgttgg

SEQ ID NO: 50421 - DNA, 2118 bp, Zea Mays
tttttttgttttattggtggaggtgatttctaaaaactgcatgggcaccgatactttccttttacgcgatattatctatgtgttggatcttgaagacatatactttattttgtgttggatatgaacactgaactgtgaaacttttcaaaagaaaggagcaaccatttgtctagatatttgatcttgatgctacctgataatgcaaacgcaaagatatttcattgcgaagtatatattattggtaacctaaccttagtgtttgatgcaggaaatccaaccactggatctacctgaaatactggcaaatcttgtaaggcagtctgaaccatttttggatcaacttggtgtacggagagatcagtgtgacaaactagtggaggcattgtgtaggaaacaaaatcattccctttcagaaaacacatccttgcctgtaaatgataagtcatcagacgaacttgacttgagaatcgcaagcgtgcttcaaagttctggttatcatgctgatgatggtttctggagtgaacctacaaagtctgaggtctcagacgataaaagacatgtggctatagtcaccacagcaagtttaccatggatgacaggaacagcagttaatccattgttccgtgcagcatatctcgcaaaagttctcaaaagagcggcgtagcatcattccagctggtgatacgtctcagttcataccgtcaagagaagctgatatagcaatattggaagaaccagaacatctcaattggtatcatcatgggaaacgctggactgacaagttcaaccatgttgttggtgtagttcatacaaactacctggaatatatcaagagagagaagaatggagctcttcaggcctttctagttaaacacatcaacaattgggtgaccagagcatactgtgacaaggtcttacgtctttctgcagcaactcaagatttaccaaagtctattgtttgcaatgttcatggtgttaacccaaagttcctgaagattggagaagaaataactgccaatagggggagtggggagcctccattttccaagggagcatattttcttgggaagatggtttgggccaaaggttatagggaactcatagatttgatggctaaacataaaagcgacttagaaggattcaagttagatgtatacggaagtggtgaggactcgcaagaagttcaatccactgccaggaggttagatttgagtctcaattttttcaagggaagggatcatgctgataattcactccatgggtacaaggttttcataaatccgagcattagtgatgtcctgtgcacagcaacggcagaggctcttgcaatggggaaattcgtgatctgcgcagaacatccatcaaatgagtttttcatgtcatttccgaactgtttgacatacaagacttcagaggagtttgttgcgagagtgaaagaggcaatggatagagaaccccaaccgctaacccctgagcaaagatacaacctttcgtgggaggcagcgactgagagattcatggagtactcagaccttgacaaggttctgaacaatgaggctgctcagcctggacaaggtaggaaaagaaagaataaaagaacctcacagcctaatttgtccgacataatggatggcggtctagcgttggcccatcgatgcttaactggcaatgaggttctcaggctggcaaccggagccattcctggtacccgggactacgataagcagcactgtgtggatatgggtctcttgcctcctcaagtacagcaccctgtatatggctggtgatatggccggtgatgactgatgagcacccaaagctaatcgtaggtatatatgtacataatacaccatgtcgcccttatgtcgaccaatgtttggagtattgtaattgtagcatgcatgacgacctttgcccattgttttgtactctgtaataaggttctctccttaaattggagttttatcgcagaaatgtgtagtacatggacatcaaaagttcatgactccagaagactgtcagcacaatatttgtctgcttttgccattgaattagagaaacatagtcttaaaaagttaagagcatctctagtggtaggaggaaatgtttttttgttgg

SEQ ID NO: 50422 - DNA, 1820 bp, Zea Mays
gtcggcccaatcacacggcgggcggcccagcccaccagacccgcttccccaccagcccacccgtgggttcggaagcttcttcgtccgtcccctcctctcccgtgctcaccacctcccccattttcgccgccccctccgatctcgccgttctcgtctccttccgttggattagggctcttcatctgttcgccgcacttcgtcagtcgcccatggcggatgaggaggtcactgatccaaaggcgctcctagaggatcgttcaaaggctaagtgtgtgtcgcagtggtatgattatcagaaatgtgttaaaaggattgaggacgatgagactgggcacaagcactgtaccggtcagtactttgattactggaaatgtgttgacaagaatgttgcagagaaactctttgagatgttaaaatgacaatttttccctccatttatccacttaaagttggtaataattgtatcacttgtgaggcctatagactattaaggcacttaatatttgtcagagaacttttgcctcttgggtaacacaaattttccactgccagtttgcatttcatttctgctactagtattgaaccagcaaggtttcctccattgctggataaaaatcaatggaatattcccaagattgtggctgagcgttaaatgctataatgtaccttaattgcttttatggtgtattttgacgaggacatagctaatcattcaggtccataacttggatgagatggaataacatgtgtacattacttctagctggtggtaatgatttatcatgagaagtttgtagtatcattggaatgaaacattggcacaatatagtttttttcccagatgtcgtgagttgacacatggatgctgttatgaggagagcttgtggttatatattccagcatctcttgcattctttttgtttgtgtggttccccatcattgtatgtttactgttcattgcatatggggctatctggtgcattatggcggggtaaaatctgatggaacatttttatctttgccatccagtggtttggttatgttcactgtcgctttgtgtttgtctcatgttctgtttgccatgcttggtgttgtgctatggcgacaactgacaagagctcacttcttgctatgttgtatcatcagacgtggaatgctcaaccagttatctgctgtgcgtgccacgaatttgttgcatcggtgcattctgactggattaaatagactggatgttctcctttgctttggatgatggtgatcaatgtgtcctgacctggcctagcgaaaatctacctgaaaggtttttcagattcgtgcagtgcttgcaccgtaacaatgccatcatgtagtcgatacatgtgtactagaatattcccaaaggactcccacccagccatccctggcctgctctcctaccgtacctctcgcgtggcatgcggtgtgactcccggcggcctgtgactctcggcctccggcgaaccttcggttcctgatggctggctcaaggacttacaaacttggagcatgattgccaggcgcaatagcacatgtggtctctacccattcttcccaccggttagcatcactgcactttccaccatcgtgtcctcctcctccctctagcatcgttgccttggtacatcttggtcatgatgccctatgcaagctcattaggtccaatgctattttttttgtaataagcgcacagatgatcttatatgtcatgcttgtcaattaggtcatcacacatgtattccttttagcatgtaaaattctcgtgtgctacaccattttgatttaatatattgtgatctttgaac

SEQ ID NO: 50423 - DNA, 1811 bp, Zea Mays
gtcggcccaatcacacggcgggcggcccagcccaccagacccgcttccccaccagcccacccgtgggttcggaagcttcttcgtccgtcccctcctctcccgtgctcaccacctcccccattttcgccgccccctccgatctcgccgttctcgtctccttccgggctcttcatctgttcgccgcacttcgtcagtcgcccatggcggatgaggaggtcactgatccaaaggcgctcctagaggatcgttcaaaggctaagtgtgtgtcgcagtggtatgattatcagaaatgtgttaaaaggattgaggacgatgagactgggcacaagcactgtaccggtcagtactttgattactggaaatgtgttgacaagaatgttgcagagaaactctttgagatgttaaaatgacaatttttccctccatttatccacttaaagttggtaataattgtatcacttgtgaggcctatagactattaaggcacttaatatttgtcagagaacttttgcctcttgggtaacacaaattttccactgccagtttgcatttcatttctgctactagtattgaaccagcaaggtttcctccattgctggataaaaatcaatggaatattcccaagattgtggctgagcgttaaatgctataatgtaccttaattgcttttatggtgtattttgacgaggacatagctaatcattcaggtccataacttggatgagatggaataacatgtgtacattacttctagctggtggtaatgatttatcatgagaagtttgtagtatcattggaatgaaacattggcacaatatagtttttttcccagatgtcgtgagttgacacatggatgctgttatgaggagagcttgtggttatatattccagcatctcttgcattctttttgtttgtgtggttccccatcattgtatgtttactgttcattgcatatggggctatctggtgcattatggcggggtaaaatctgatggaacatttttatctttgccatccagtggtttggttatgttcactgtcgctttgtgtttgtctcatgttctgtttgccatgcttggtgttgtgctatggcgacaactgacaagagctcacttcttgctatgttgtatcatcagacgtggaatgctcaaccagttatctgctgtgcgtgccacgaatttgttgcatcggtgcattctgactggattaaatagactggatgttctcctttgctttggatgatggtgatcaatgtgtcctgacctggcctagcgaaaatctacctgaaaggtttttcagattcgtgcagtgcttgcaccgtaacaatgccatcatgtagtcgatacatgtgtactagaatattcccaaaggactcccacccagccatccctggcctgctctcctaccgtacctctcgcgtggcatgcggtgtgactcccggcggcctgtgactctcggcctccggcgaaccttcggttcctgatggctggctcaaggacttacaaacttggagcatgattgccaggcgcaatagcacatgtggtctctacccattcttcccaccggttagcatcactgcactttccaccatcgtgtcctcctcctccctctagcatcgttgccttggtacatcttggtcatgatgccctatgcaagctcattaggtccaatgctattttttttgtaataagcgcacagatgatcttatatgtcatgcttgtcaattaggtcatcacacatgtattccttttagcatgtaaaattctcgtgtgctacaccattttgatttaatatattgtgatctttgaac

SEQ ID NO: 50424 - DNA, 2602 bp, Zea Mays
gtccacgtggacgaaatatgaccgggcccacctgtcagttaaccccatcgaggagagaacccgaccagtacgaggaaagagggagaaagacccccgatccggccggcggcgcacgagatataaaaacagacggccagggtcggctccttcggtgggaagggcagacgaagccattcaatccgggaccggggagcgtcgcgctcgcacaccagtgaccagtgacagagggtcggttttctggaggcacttgctggtcccggcgatcgacgacggagcagaattcttctccgatcggctgcccgggcgggagggtccctctgttcggcgatctgcggttctaccaccatcgatttatactgtggctatgtggaggtgtcatcctacacggtgataggttttcttagtacatagcagcttgaggaaaatgtccgatttcgatgaacaggatgacatattcttggagacatctgatgatacaagaagttcggcatatttttcagctaggtgcagcacaagtgaacaattatcagcatcatggggacctgaggatgagctctggacaagtgaattgctgagtgtcaatgaaaggcggcatagattcctggttcggatgggctttgctaaacctattcctactggaatcaccttttcacagtggcagggagaaattttggctgatcgtgcatttcgcgacctggaggacagaattaacagcatctgttcttcatatcggccgtctttttctcatggcgcatctgcaccagatagtactaggaacagcgtcgtgcttgagcttgatgaaatcgagcaccatgaactgaccggaatacttgatgagaagggcagtggtcgtagtccggcaaggggaatggaaatagaattcagtgagaagcaaaatgatcccaagagcttttgtggaaggttcaaaagaaaggaggaggaagatataatctgtatgcacgacacacgtatgaaaagcctgaagagtggaacattgtttgcaacaaaagttgatcagcaaaacaagaagtggatggacttctctgctctgtacatgtgccaagaaatccatgcccacggcggttcaatcagcgtcatgaagttcagtacatctgggaggtatttagcgagtgtgggcgaagactgcgttgtgcgcatctggaggatacacgaagttgaatcctctcctgatctgtacatcagagagacgcctgtcaaatccatggacagaaatatgggcctgaaaatgaaggtgggaaaaggccggggacgtgccctagccataatacccaggaaagttttcaacatcgctgagacaccactgcatgagtttcatggccacacaagtgatatcttggatatgacatggtcaaaatcaaattttctcttgacttcatctaaagacaagactgtacgcatgtggaaagttggctgtgatgactgtctagcagtattcaagcacagagattatgagaggcgagtagttgactgggccgatgcaaaggatatcataactgccgtgggttaccagccagatggacagggtcttatcgttggcatcgctgcagggaggtgccggttctataaccatgcaggtgaaaacgtggaactggagaaagtactgaaggtaacgaagaagaaatctgctggtagacagatcaccagcctgcagttttcgtgcggcgatcctgctcggatcctgatcgcatcagcaggttctaagatacgagtatctgatggaggagctaagatcaaccgaaagtttgaaggacgtcgaggctccaaggtcctggtgccgccgtctctgacctccgacgggcagtacctcgtgtccgcaggtgccgactccaacgtctacatctgggacttggacagaccagcaaggggcaaaagccgcaccagaggaccaagaagggtgcgttcctgcgagcacttcttctcggagggcgtcacgtccgtggcgacatggccgggtctggcgcaccaacaagaagacctccagtcgccggagaagggggccgcccccacgctctgccgcgaccgcgagctctgctcgttcgggacgtggttctcggcagacggcgcgaggggcgccgcgacgtggcccgaggaaaagctgctgccgtccctcaggtacgtcaactgcgccgggatggacgactgccgcgccaaggtgtcggccgcctggaacaaggtcgtcgtcaccggcggcagcgacggggtcatccggtgcttccacaactatggactgccagtgaagctataggcttgcgagatcagagctgtattactgttccttactttcttgtactgtacagttcatgaaagttctaggacgaggaggggtgtacattggtttgcttgctgacttgctgtgaacgagccgttaattaacagggatcttggtacattgagttgatcgagcatggagtttccaaatggtttccgtgtagccggaaagcgtagtcgatgttgaagccgttatagtttttgtaaccatctctcttaatttttttattcaaaatcgtaatttgaggtttttgaattaaaactttgcataacgtgctgtgaccaacttgtagttttaaatggttaaagagag

SEQ ID NO: 50425 - DNA, 2531 bp, Zea Mays
gtccacgtggacgaaatatgaccgggcccacctgtcagttaaccccatcgaggagagaacccgaccagtacgaggaaagagggagaaagacccccgatccggccggcggcgcacgagatataaaaacagacggccagggtcggctccttcggtgggaagggcagacgaagccattcaatccgggaccggggagcgtcgcgctcgcacaccagtgaccagtgacagagggtcggttttctggaggcacttgctggtcccggcgatcgacgacggagcagaattcttctccgatcggctgcccgggcgggagggtccctctgttcggcgatctgcggttctaccaccatcgatttatactgtggctatgtggaggtgtcatcctacacggtgataggttttcttagtacatagcagcttgaggaaaatgtccgatttcgatgaacaggatgacatattcttggagacatctgatgatacaagaagttcggcatatttttcagctaggtgcagcacaagtgaacaattatcagcatcatggggacctgaggatgagctctggacaagtgaattgctgagtgtcaatgaaaggcggcatagattcctggttcggatgggctttgctaaacctattcctactggaatcaccttttcacagtggcagggagaaattttggctgatcgtgcatttcgcgacctggaggacagaattaacagcatctgttcttcatatcggccgtctttttctcatggcgcatctgcaccagatagtactaggaacagcgtcgtgcttgagcttgatgaaatcgagcaccatgaactgaccggaatacttgatgagaagggcagtggtcgtagtccggcaaggggaatggaaatagaattcagtgagaagcaaaatgatcccaagagcttttgtggaaggttcaaaagaaaggaggaggaagatataatctgtatgcacgacacacgtatgaaaagcctgaagagtggaacattgtttgcaacaaaagttgatcagcaaaacaagaagtggatggacttctctgctctgtacatgtgccaagaaatccatgcccacggcggttcaatcagcgtcatgaagttcagtacatctgggaggtatttagcgagtgtgggcgaagactgcgttgtgcgcatctggaggatacacgaagttgaatcctctcctgatctgtacatcagagagacgcctgtcaaatccatggacagaaatatgggcctgaaaatgaaggtgggaaaaggccggggacgtgccctagccataatacccaggaaagttttcaacatcgctgagacaccactgcatgagtttcatggccacacaagtgatatcttggatatgacatggtcaaaatcaaattttctcttgacttcatctaaagacaagactgtacgcatgtggaaagttggctgtgatgactgtctagcagtattcaagcacagagattatgggtcttatcgttggcatcgctgcagggaggtgccggttctataaccatgcaggtgaaaacgtggaactggagaaagtactgaaggtaacgaagaagaaatctgctggtagacagatcaccagcctgcagttttcgtgcggcgatcctgctcggatcctgatcgcatcagcaggttctaagatacgagtatctgatggaggagctaagatcaaccgaaagtttgaaggacgtcgaggctccaaggtcctggtgccgccgtctctgacctccgacgggcagtacctcgtgtccgcaggtgccgactccaacgtctacatctgggacttggacagaccagcaaggggcaaaagccgcaccagaggaccaagaagggtgcgttcctgcgagcacttcttctcggagggcgtcacgtccgtggcgacatggccgggtctggcgcaccaacaagaagacctccagtcgccggagaagggggccgcccccacgctctgccgcgaccgcgagctctgctcgttcgggacgtggttctcggcagacggcgcgaggggcgccgcgacgtggcccgaggaaaagctgctgccgtccctcaggtacgtcaactgcgccgggatggacgactgccgcgccaaggtgtcggccgcctggaacaaggtcgtcgtcaccggcggcagcgacggggtcatccggtgcttccacaactatggactgccagtgaagctataggcttgcgagatcagagctgtattactgttccttactttcttgtactgtacagttcatgaaagttctaggacgaggaggggtgtacattggtttgcttgctgacttgctgtgaacgagccgttaattaacagggatcttggtacattgagttgatcgagcatggagtttccaaatggtttccgtgtagccggaaagcgtagtcgatgttgaagccgttatagtttttgtaaccatctctcttaatttttttattcaaaatcgtaatttgaggtttttgaattaaaactttgcataacgtgctgtgaccaacttgtagttttaaatggttaaagagag

SEQ ID NO: 50426 - DNA, 2675 bp, Zea Mays
gtccacgtggacgaaatatgaccgggcccacctgtcagttaaccccatcgaggagagaacccgaccagtacgaggaaagagggagaaagacccccgatccggccggcggcgcacgagatataaaaacagacggccagggtcggctccttcggtgggaagggcagacgaagccattcaatccgggaccggggagcgtcgcgctcgcacaccagtgaccagtgacagagggtcggttttctggaggcacttgctggtcccggcgatcgacgacggagcagaattcttctccgatcggctgcccgggcgggagggtccctctgttcggcgatctgcggttctaccaccatcgatttatactgtggctatgtggaggtgtcatcctacacggtgataggttttcttagtacatagcagcttgaggaaaatgtccgatttcgatgaacaggatgacatattcttggagacatctgatgatacaagaagttcggcatatttttcagctaggtgcagcacaagtgaacaattatcagcatcatggggacctgaggatgagctctggacaagtgaattgctgagtgtcaatgaaaggcggcatagattcctggttcggatgggctttgctaaacctattcctactggaatcaccttttcacagtggcagggagaaattttggctgatcgtgcatttcgcgacctggaggacagaattaacagcatctgttcttcatatcggccgtctttttctcatggcgcatctgcaccagatagtactaggaacagcgtcgtgcttgagcttgatgaaatcgagcaccatgaactgaccggaatacttgatgagaagggcagtggtcgtagtccggcaaggggaatggaaatagaattcagtgagaagcaaaatgatcccaagagcttttgtggaaggttcaaaagaaaggaggaggaagatataatctgtatgcacgacacacgtatgaaaagcctgaagagtggaacattgtttgcaacaaaagttgatcagcaaaacaagaagtggatggacttctctgctctgtacatgtgccaagaaatccatgcccacggcggttcaatcagcgtcatgaagttcagtacatctgggaggtatttagcgagtgtgggcgaagactgcgttgtgcgcatctggaggatacacgaagttgaatcctctcctgatctgtacatcagagagacgcctgtcaaatccatggacagaaatatgggcctgaaaatgaaggtgggaaaaggccggggacgtgccctagccataatacccaggaaagttttcaacatcgctgagacaccactgcatgagtttcatggccacacaagtgatatcttggatatgacatggtcaaaatcaaattttctcttgacttcatctaaagacaagactgtacgcatgtggaaagttggctgtgatgactgtctagcagtattcaagcacagagattatgttcaatcctgttgacgaaggatactttgttagcggctcaatagacggtaaagtccgtgtctgggatgtttcagagaggcgagtagttgactgggccgatgcaaaggatatcataactgccgtgggttaccagccagatggacagggtcttatcgttggcatcgctgcagggaggtgccggttctataaccatgcaggtgaaaacgtggaactggagaaagtactgaaggtaacgaagaagaaatctgctggtagacagatcaccagcctgcagttttcgtgcggcgatcctgctcggatcctgatcgcatcagcaggttctaagatacgagtatctgatggaggagctaagatcaaccgaaagtttgaaggacgtcgaggctccaaggtcctggtgccgccgtctctgacctccgacgggcagtacctcgtgtccgcaggtgccgactccaacgtctacatctgggacttggacagaccagcaaggggcaaaagccgcaccagaggaccaagaagggtgcgttcctgcgagcacttcttctcggagggcgtcacgtccgtggcgacatggccgggtctggcgcaccaacaagaagacctccagtcgccggagaagggggccgcccccacgctctgccgcgaccgcgagctctgctcgttcgggacgtggttctcggcagacggcgcgaggggcgccgcgacgtggcccgaggaaaagctgctgccgtccctcaggtacgtcaactgcgccgggatggacgactgccgcgccaaggtgtcggccgcctggaacaaggtcgtcgtcaccggcggcagcgacggggtcatccggtgcttccacaactatggactgccagtgaagctataggcttgcgagatcagagctgtattactgttccttactttcttgtactgtacagttcatgaaagttctaggacgaggaggggtgtacattggtttgcttgctgacttgctgtgaacgagccgttaattaacagggatcttggtacattgagttgatcgagcatggagtttccaaatggtttccgtgtagccggaaagcgtagtcgatgttgaagccgttatagtttttgtaaccatctctcttaatttttttattcaaaatcgtaatttgaggtttttgaattaaaactttgcataacgtgctgtgaccaacttgtagttttaaatggttaaagagag

SEQ ID NO: 50427 - DNA, 2576 bp, Zea Mays
gtccacgtggacgaaatatgaccgggcccacctgtcagttaaccccatcgaggagagaacccgaccagtacgaggaaagagggagaaagacccccgatccggccggcggcgcacgagatataaaaacagacggccagggtcggctccttcggtgggaagggcagacgaagccattcaatccgggaccggggagcgtcgcgctcgcacaccagtgaccagtgacagagggtcggttttctggaggcacttgctggtcccggcgatcgacgacggagcagaattcttctccgatcggctgcccgggcgggagggtccctctgttcggcgatctgcggttctaccaccatcgatttatactgtggctatgtggaggtgtcatcctacacgctaggtgcagcacaagtgaacaattatcagcatcatggggacctgaggatgagctctggacaagtgaattgctgagtgtcaatgaaaggcggcatagattcctggttcggatgggctttgctaaacctattcctactggaatcaccttttcacagtggcagggagaaattttggctgatcgtgcatttcgcgacctggaggacagaattaacagcatctgttcttcatatcggccgtctttttctcatggcgcatctgcaccagatagtactaggaacagcgtcgtgcttgagcttgatgaaatcgagcaccatgaactgaccggaatacttgatgagaagggcagtggtcgtagtccggcaaggggaatggaaatagaattcagtgagaagcaaaatgatcccaagagcttttgtggaaggttcaaaagaaaggaggaggaagatataatctgtatgcacgacacacgtatgaaaagcctgaagagtggaacattgtttgcaacaaaagttgatcagcaaaacaagaagtggatggacttctctgctctgtacatgtgccaagaaatccatgcccacggcggttcaatcagcgtcatgaagttcagtacatctgggaggtatttagcgagtgtgggcgaagactgcgttgtgcgcatctggaggatacacgaagttgaatcctctcctgatctgtacatcagagagacgcctgtcaaatccatggacagaaatatgggcctgaaaatgaaggtgggaaaaggccggggacgtgccctagccataatacccaggaaagttttcaacatcgctgagacaccactgcatgagtttcatggccacacaagtgatatcttggatatgacatggtcaaaatcaaattttctcttgacttcatctaaagacaagactgtacgcatgtggaaagttggctgtgatgactgtctagcagtattcaagcacagagattatgtaacatgcattcagttcaatcctgttgacgaaggatactttgttagcggctcaatagacggtaaagtccgtgtctgggatgtttcagagaggcgagtagttgactgggccgatgcaaaggatatcataactgccgtgggttaccagccagatggacagggtcttatcgttggcatcgctgcagggaggtgccggttctataaccatgcaggtgaaaacgtggaactggagaaagtactgaaggtaacgaagaagaaatctgctggtagacagatcaccagcctgcagttttcgtgcggcgatcctgctcggatcctgatcgcatcagcaggttctaagatacgagtatctgatggaggagctaagatcaaccgaaagtttgaaggacgtcgaggctccaaggtcctggtgccgccgtctctgacctccgacgggcagtacctcgtgtccgcaggtgccgactccaacgtctacatctgggacttggacagaccagcaaggggcaaaagccgcaccagaggaccaagaagggtgcgttcctgcgagcacttcttctcggagggcgtcacgtccgtggcgacatggccgggtctggcgcaccaacaagaagacctccagtcgccggagaagggggccgcccccacgctctgccgcgaccgcgagctctgctcgttcgggacgtggttctcggcagacggcgcgaggggcgccgcgacgtggcccgaggaaaagctgctgccgtccctcaggtacgtcaactgcgccgggatggacgactgccgcgccaaggtgtcggccgcctggaacaaggtcgtcgtcaccggcggcagcgacggggtcatccggtgcttccacaactatggactgccagtgaagctataggcttgcgagatcagagctgtattactgttccttactttcttgtactgtacagttcatgaaagttctaggacgaggaggggtgtacattggtttgcttgctgacttgctgtgaacgagccgttaattaacagggatcttggtacattgagttgatcgagcatggagtttccaaatggtttccgtgtagccggaaagcgtagtcgatgttgaagccgttatagtttttgtaaccatctctcttaatttttttattcaaaatcgtaatttgaggtttttgaattaaaactttgcataacgtgctgtgaccaacttgtagttttaaatggttaaagagag

SEQ ID NO: 50428 - DNA, 2454 bp, Zea Mays
gcgaggttcgatgtatcccatcccatcagcatcgacgtcgccacccgcaggccgcacccgcacgtcgccgagaagcggtccccatcaggcatcagccgggctccctgcctggctgccttctctctctcaacactctgctcacctcctgccccggccggaataagtgttgtggacgtgcgtgccgcgcacactccccgccgcccccagcgacgccaaatgctctgcaccgaatcccaatcatcgtcctccctgcgccgcaacttggcaacttgtgcttcgtcacgttgccattgccaccaccaaccgagcctagagggaaagaaatcttggaaaggtgtggtgtgacccctgctgctgctggtgccagatttgctcgcgttcgaggcctccttttgtttccgctagattctgccaagatcagcgattccctccgccagcagaatcgctcgctctctttccatcgagcgtgcattcttttctgctgctgagtcgggcaggatcggcgtaacccctccaaaccccagacctttgtccagcagcctcgcgccctcgccgcgttggtatggtttttccttgccccccgtcctagttgctctgttcgcttgatttcctggtcgaggttctcgtgcgctgttccaatttcgagctaatcgtcctgctcctgcctagcattaatccccttctgttcttggagttcacacacatcccgtgcgcgcggattgctggtgcagcagtcggcggcgccgcgtgcattttgcaaccgctttccaagcaccagctgcaagctttggccttttgcccttttcctcctcccgtccccgaaatcccgcaagaaactcgtcccttctcacgagtcacgagtttggtgaggctttgaagcgagcacagttctcgtgaatatcgcagtgggggttggaatccggcatctctgtcggtcaggctggggtgggagtttcctcgtcggagatggatgggaatttgccgccgcgcaccctgatgccaggcggaggtccaggccacttcgatctggggcagccgttccacttcgccgcccagccccaggcggtccgggttcaccagggcgtcttcgccgtccccgccgcgaaccagatgccggagctcggcaatgtggtgaaggcatcgctgagcgacgaggaggaggaggacgacgacggccacctcgaccacggcaaggcggcggccgcctcccagtggcaccgggtcaagtggaccagcggcatggtcaagctgctcgtgtcggccgtgtcctacatcgacgaggacgtcgacgcggactacgggaccagcagcgggaggaggaagcacgccatgctcaagaggatgggcaagtggaagctggtctcctcggccatgaccgagagggggctcgcggtgtcgccgcagcagtgcgaggacaagttcaacgacctcaacaagaggtacaagaggctgaccgagatcctcggccgcggaagggcttgccagatcgtcgagaagccagagctccttgaacaggtgagcctatctgcgaagctcagggaggaggccaagaagcatctcaactccaagcatctgcactacgaggagatgtgctcctaccacaacaggaaccgctactgcctgcttgatgatcctgccctccagaggtccctgcggatggctcttagggctccagacgaacagggaaagaagtgctcctttggctatgatgatgaggatgaccagatgttgctttctgatgatgacgatgatgattatgatgacgatgagttgcatgatgatctggaggtcagtgctgaggatcatggccctcacagtcacagagttcatgccaccaagaaactgaagcatggccatgaggagggacattgtgggtctcatctttcagaagttgcagctattgacatgaacagtatgttctctgaaggatctggtggtccatctgctgagaagaatttaagttatatgcgtgctcaaatcgagacacaacgtctgaatataaaatctcagaagctgagaactgagcagaggcatttcaaatggctgaagttcagcagggagaaggacagggagttgcagaaaatgaagctggagaatgaaaagatggagctggagaatgagcgactggagctggagctgaagcttaaggaaattgagatgggcatcaaaccaaagaggatttagtgattgaaggatgtaagctgtagagctagaggactcttagagtttctgaatgttgtgtgtcagggcctaagaggcccacggaggggctgcggcagcagcaaccatggtccctatggtccctccaagggagattagataaggatagttagagataagattagaagattatttgagattatttagaagattagttgagattatctaggaaggttatcaattagtttgttaataggttttaagagaattttacggagataaagatctctagct

SEQ ID NO: 50429 - DNA, 2835 bp, Zea Mays
gcgaggttcgatgtatcccatcccatcagcatcgacgtcgccacccgcaggccgcacccgcacgtcgccgagaagcggtccccatcaggcatcagccgggctccctgcctggctgccttctctctctcaacactctgctcacctcctgccccggccggaataagtgttgtggacgtgcgtgccgcgcacactccccgccgcccccagcgacgccaaatgctctgcaccgaatcccaatcatcgtcctccctgcgccgcaacttggcaacttgtgcttcgtcacgttgccattgccaccaccaaccgagcctagagggaaagaaatcttggaaaggtgtggtgtgacccctgctgctgctggtgccagatttgctcgcgttcgaggcctccttttgtttccgctagattctgccaagatcagcgattccctccgccagcagaatcgctcgctctctttccatcgagcgtgcattcttttctgctgctgagtcgggcaggatcggcgtaacccctccaaaccccagacctttgtccagcagcctcgcgccctcgccgcgttggtatggtttttccttgccccccgtcctagttgctctgttcgcttgatttcctggtcgaggttctcgtgcgctgttccaatttcgagctaatcgtcctgctcctgcctagcattaatccccttctgttcttggagttcacacacatcccgtgcgcgcggattgctggtgcagcagtcggcggcgccgcgtgcattttgcaaccgctttccaagcaccagctgcaagctttggccttttgcccttttcctcctcccgtccccgaaatcccgcaagaaactcgtcccttctcacgagtcacgagtttggtgaggctttgaagcgagcacagttctcgtgaatatcgcagtgggggttggaatccggcatctctgtcggtcaggctggggtgggagtttcctcgtcggagatggatgggaatttgccgccgcgcaccctgatgccaggcggaggtccaggccacttcgatctggggcagccgttccacttcgccgcccagccccaggcggtccgggttcaccagggcgtcttcgccgtccccgccgcgaaccagatgccggagctcggcaatgtggtgaaggcatcgctgagcgacgaggaggaggaggacgacgacggccacctcgaccacggcaaggcggcggccgcctcccagtggcaccgggtcaagtggaccagcggcatggtcaagctgctcgtgtcggccgtgtcctacatcgacgaggacgtcgacgcggactacgggaccagcagcgggaggaggaagcacgccatgctcaagaggatgggcaagtggaagctggtctcctcggccatgaccgagagggggctcgcggtgtcgccgcagcagtgcgaggacaagttcaacgacctcaacaagaggtacaagaggctgaccgagatcctcggccgcggaagggcttgccagatcgtcgagaagccagagctccttgaacaggtgagcctatctgcgaagctcagggaggaggccaagaagcatctcaactccaagcatctgcactacgaggagatgtgctcctaccacaacaggaaccgctactgcctgcttgatgatcctgccctccagaggtccctgcggatggctcttagggctccagacgaacagggaaagaagtgctcctttggctatgatgatgaggatgaccagatgttgctttctgatgatgacgatgatgattatgatgacgatgagttgcatgatgatctggaggtcagtgctgaggatcatggccctcacagtcacagagttcatgccaccaagaaactgaagcatggccatgaggagggacattgtgggtctcatctttcagaagttgcagctattgacatgaacagtatgttctctgaaggatctggtggtccatctgctgagaagaatttaagttatatgcgtgctcaaatcgagacacaacgtctgaatataaaatctcagaagctgagaactgagcagaggcatttcaaatggctgaagttcagcagggagaaggacagggagttgcagaaaatgaagctggagaatgaaaagatggagctggagaatgagcgactggagctggagctgaagcttaaggaaattgagatgggcatcaaaccaaagaggatttagtgattgaaggatgtaagctgtagagctagaggactcttagagtttctggtaatccttttgtctattgcagtagcttacaaattaggatatattacacagtttcatctttgctaactgcatgccggttaagttaataagtacagtttgacatctgaatatggtgcttaaagataccattgcatatttatccggttggctctgtgttatgctttgattgagcgttgtgtatttcctgttctgtttcgctattgtgatatctttgcactattttaggttctgacctctctggtatagccactgcaggataagatgctgtgttgtctcagtgtgctttgtgaataccattattacatcatatcaacaaagagtttgttgtcttcatccgtgctttccaggttaatttgatctaaaggtaatctgatttttcagaatgttgtgtgtcagggcctaagaggcccacggaggggctgcggcagcagcaaccatggtccctatggtccctccaagggagattagataaggatagttagagataagattagaagattatttgagattatttagaagattagttgagattatctaggaaggttatcaattagtttgttaataggttttaagagaattttacggagataaagatctctagct

SEQ ID NO: 50430 - DNA, 3048 bp, Zea Mays
ttgaattattattattctcctctttgcaggggctggctggcttcctcctcttccacctccctccatgcatgcagaggagcagcaccttcattactccacattactctccctccactccgactccgggagaagtcacccaccacagtctcacatctctggtacatgtacatccacagttctgcaagcaaaccattcactcctccctctgcctgtattcttcgtttcgcccctgggatcctcgtcacgactcacgccatccgcccccaccgccaccaccagccacaccatctctgttctccagtcacgccagacggccagaacccacaattttcatcacaccaaaccatccactcctcacctttccccccaaacaagtccaatctttacaacgacattgtcgccaactacaacccctttcccttctgggtgcctcaccagattacccactcaaatccagctaccaagcacaaaagctgcggcatttgccatactgtttcatccgcggaacccaatcttgccgcccgatccttcgcaaaatccaccgtacgtgcttgctgcccctgttccagtccagactctagacaatgctgtctgcgccgtggaatccgagcgttgccagctaattccgctcgggaacacgcacgaggagatccgccagttcgcaagaagcgatatccatccacggcgttgccctggctgctcgcgctccgccagctcccatgtcggacacggagctgtcccagagcacggtggtgtttgggctccgcatgtgggtgctcgtcggcatcggcgtcggtgccgccttcgtgctactgctcgtcctcatctccgtcctctgcctcctcgccttccgccgtcgccgtcgccggcggcagcggccggccaaccccgcgcagcagctccccaccaccgccccgcccaagaatcccacgaatgccaaggcgcccaaggacatccaagaagtcccctcccacgccgccgccgccgccccagcgaagacgccgcttgcgctcgcgcaggtgctccagctccccacgccaccggtctccgagcagctcgtgaccggcaaggagcaccacgtcacgcacccggagcagcagcagcaccccagccaccggagcgacgggccttcgccgcacggcaacggcgagagccgcggtggcgccgcggagcgcgcgcccccggcggtgcccgaggtgtcccatctggggtggggccactggtacacgctcaaggagctggagaccgcgaccgggatgttcgccgacgggaacgtgatcggcgagggcgggtacgggatcgtgtaccgtggcgtgctcgaaaacggcacgcaggtcgccgtcaagaacttgctaaacaacagggggcaggcagagaaggaattcaaggttgaggtcgaagcgatcgggcgtgtgcgacacaagaaccttgtgcgccttctaggatactgtgctgagggtaatcagaggtatgtcttgtcaggatgcttgtatatgagtatgttgataatgggaacttagaacaatggctgcacggggatgttgggcccagaagccctctcgcctgggatgacaggatgaagatcatactgggaacagcaaaagggttaatgtatttgcacgaggggcttgaaccaaaggtggttcaccgtgatgtcaagtcaagcaacatccttctggacaagcaatggaatgctaagctctcggatttcggacttgcgaagcttcttggttcagaaaggagttatgtcaccacaagagttatgggaactttcggagtacgcagggactgggatgttgaatgaaacaagcgacatatatagttttgggattcttataatggagataatatccggtagggtaccagtggattataataggccaccaggagaggttaatttagttgattggcttaagacgatggtaagcacccgaaactcggatggggttgtggatccaaagatacccaagaaaccttcctcaagagcactgaagaaggctttgctagtggcgctgagatgcgtagaccctgatgctcttaagagaccaaagattagtcatgtcattcacatgcttgaagtcgatgatttcccatacagagatgtaagtcaatgaagcctattctatattcttcagttacatttcagaaaagtttatagtgtgtgcttctgaattaatgctgcttctgtgccggtatcaactatccctgtggccacttctgtcatatgtgataaaagtcttctgatcatataatgacaccatgtgggaatctgattcaatcattatgctctttgtctgcaccagtcccatgcttcgatgctaagtgtactttgttaatgttcccactttccagcaaaagtttacccatgtcaaccactctgcattaggcacgtctcgacaaatacctcagaaatatgtcattttgaaacagttgcaactcctcaaggcccatcggcatatcctgatcagttcatcagtttgtctctgtcttcttgcattcgcgttaacttattgtcgctaactttaggatcgccgaggcactagagcaccaggacaagcaaggttaccagaaacaccggcaggcggatcaggtcgacctgagactgacagcagtggaaacggcggttccacacaagctgaacccttcagatggagaaacccagaggcttagtgttcatcggactactgaaaggaaagccaagccctcttgatttgtgaagcaacaagccaacaatggtgtccactgaagtcgtgaaactctcatcttgctgatgataggcaaaggcatccatggatactgttagatcatctgtaaatgtaaaaaaaaagtaatttagccctagtaattctttcctgcttatatttatataggtggaggtatctatctatgacaaacccgttccattaaaggcaaaaataactttatttaaatctctggggtgcctctggttaacaaatggtctgcatctgctcagcatagctgaacttgtcatttatgtaaattttttaacaccgactcggcaacttcggtgtgaatatgttttgtttt

SEQ ID NO: 50431 - DNA, 2617 bp, Zea Mays
ttgaattattattattctcctctttgcaggggctggctggcttcctcctcttccacctccctccatgcatgcagaggagcagcaccttcattactccacattactctccctccactccgactccgggagaagtcacccaccacagtctcacatctctggtacatgtacatccacagttctgcaagcaaaccattcactcctccctctgcctgtattcttcgtttcgcccctgggatcctcgtcacgactcacgccatccgcccccaccgccaccaccagccacaccatctctgttctccagtcacgccagacggccagaacccacaattttcatcacaccaaaccatccactcctcacctttccccccaaacaagtccaatctttacaacgacattgtcgccaactacaacccctttcccttctgggtgcctcaccagattacccactcaaatccagctaccaagcacaaaagctgcggcatttgccatactgtttcatccgcggaacccaatcttgccgcccgatccttcgcaaaatccaccgtacgtgcttgctgcccctgttccagtccagactctagacaatgctgtctgcgccgtggaatccgagcgttgccagctaattccgctcgggaacacgcacgaggagatccgccagttcgcaagaagcgatatccatccacggcgttgccctggctgctcgcgctccgccagctcccatgtcggacacggagctgtcccagagcacggtggtgtttgggctccgcatgtgggtgctcgtcggcatcggcgtcggtgccgccttcgtgctactgctcgtcctcatctccgtcctctgcctcctcgccttccgccgtcgccgtcgccggcggcagcggccggccaaccccgcgcagcagctccccaccaccgccccgcccaagaatcccacgaatgccaaggcgcccaaggacatccaagaagtcccctcccacgccgccgccgccgccccagcgaagacgccgcttgcgctcgcgcaggtgctccagctccccacgccaccggtctccgagcagctcgtgaccggcaaggagcaccacgtcacgcacccggagcagcagcagcaccccagccaccggagcgacgggccttcgccgcacggcaacggcgagagccgcggtggcgccgcggagcgcgcgcccccggcggtgcccgaggtgtcccatctggggtggggccactggtacacgctcaaggagctggagaccgcgaccgggatgttcgccgacgggaacgtgatcggcgagggcgggtacgggatcgtgtaccgtggcgtgctcgaaaacggcacgcaggtcgccgtcaagaacttgctaaacaacaggcagagaaggaattcaaggttgaggtcgaagcgatcgggcgtgtgcgacacaagaaccttgtgcgccttctaggatactgtgctgagggtaatcagaggatgcttgtatatgagtatgttgataatgggaacttagaacaatggctgcacggggatgttgggcccagaagccctctcgcctgggatgacaggatgaagatcatactgggaacagcaaaagggttaatgtatttgcacgaggggcttgaaccaaaggtggttcaccgtgatgtcaagtcaagcaacatccttctggacaagcaatggaatgctaagctctcggatttcggacttgcgaagcttcttggttcagaaaggagttatgtcaccacaagagttatgggaactttcgggtatgttgctccagagtacgcagggactgggatgttgaatgaaacaagcgacatatatagttttgggattcttataatggagataatatccggtagggtaccagtggattataataggccaccaggagaggttaatttagttgattggcttaagacgatggtaagcacccgaaactcggatggggttgtggatccaaagatacccaagaaaccttcctcaagagcactgaagaaggctttgctagtggcgctgagatgcgtagaccctgatgctcttaagagaccaaagattagtcatgtcattcacatgcttgaagtcgatgatttcccatacagagatgatcgccgaggcactagagcaccaggacaagcaaggttaccagaaacaccggcaggcggatcaggtcgacctgagactgacagcagtggaaacggcggttccacacaagctgaacccttcagatggagaaacccagaggcttagtgttcatcggactactgaaaggaaagccaagccctcttgatttgtgaagcaacaagccaacaatggtgtccactgaagtcgtgaaactctcatcttgctgatgataggcaaaggcatccatggatactgttagatcatctgtaaatgtaaaaaaaaagtaatttagccctagtaattctttcctgcttatatttatataggtggaggtatctatctatgacaaacccgttccattaaaggcaaaaataactttatttaaatctctggggtgcctctggttaacaaatggtctgcatctgctcagcatagctgaacttgtcatttatgtaaattttttaacaccgactcggcaacttcggtgtgaatatgttttgtttt

SEQ ID NO: 50432 - DNA, 3948 bp, Zea Mays
cccgacccaagcagcagccagcaggtagagccgtagaggcattggatccacgtgcggattcacgcgcgcaaccggaaactggtactccgacccaccaaaagcagcgaccattagttcccccctcctttttattaattccctggtttaaaccaagcagcaaattcttgccgtagaaattagaactcccaacagaaataggtgcgtcatcgcgttcttgtaatctagtaaaagtcttccatttttctgtgatccttccccttctcccgcatcgatcgtctctcaagaacagagggtagaatcacaggtagaaagaaacaagaactgaattagccagtggtaattccggcctggcagctgaatcgtgactcaattcctgacgaatttctcgtggattccgtggagaaaaagtgtgacctttccgatgcagtacaaccaccgcagccgcttgccgccgccgccgctgccgttcggccgcggagggcatcctcgcggccccaagcagccatgctacgctccgcttcctccgccaccgtttcctccggcgccgccgccgccgccgccgtcgctagagcgcaagtacgaggtgcttatggaggccggtcgcctcgccaccgagtatctggtcgcccagggcgtgctccccccggccgctctgcagcgcggcgccggcatctctggcgcgtggcctgatcatcctcttcctccgccaccgcagctgcaacagcaggaaccccgggggggttatggccggaggcggtacaaagatgaatacaacaataatcctaggcgagccaatgacactagtagtagcaccagtagcagagatgattgcagccgtggcagctacaatggaagagggaagatgaagtatgggaaatacaggagggggtatttggattcagggagggacagggagaaggagaggagaaggccatttccaaatggccggcgctacgaggaggataaggatgaagatggggcacctgggtttcggagggagcgacacggcaatcgggggagtgatgaggtgaggcctcatgatacagaggcactgagggaagggacaccattgacagcgaaggctgtagaagggttctgcatggaggatgcaacgtcaaagattatgagctctttcaaagatactattaaggattctaatgatgcgccaaaggtgccggaggagactgaggaaggcgaggtggaggatgacagggagacgcagaattcagaaactgaggtagtgaagcaagggatagataccgatgtaaatcatgcttcttgttatgttattacagagtcaaatcccaaccagttatcagatggtaagattcaagatgagattcctgacgaggaagctgaagatgacaaaaaagttatggatgaggctactttggatcacaacacttgtgatggtgaggtgacaaatatggaagttgagatgcacgttggtaaggagagtttgattgactattgtaacttcacgagaaccccaacaaggcctaggtcagcacgtgcacacagaaatgcagcatctatcccaggagaacctgcagtagttgaaacatttgatttagtttcttctggtcaagcttcacatatggtaagcgctgaatctgctgagagattttttactaaaattgtgtcagaaaacacagaagataaattttgccaagaaaacactagctctggtgatgtccgtgctccaccaaaggagctgatgcttcttcaagaaaatggaataacagttgtgactgaaaacatggcagaagataatgttgatgcagaaccacatgtggtcgtccagcaatataaggaagaaactaacctatctccgttaacagatgccctcgagaagagcttgaggcaggaaatcacattatctccatttgcagcttctcacaaggatagcttgatgcaagagggtggcttgatgcaagaagttgatttatctccgttgacagctaatcacagggagagcttcactgaagaaaccgaattgccaccatcaacagcttctcacaaggacagcttgattgagggaactgacttaactcagacaatatcttcttataataataacttgaaattgcaatttaaggaaggaacacaggtatgcgatattgatatgctgccacaagatgtgaacctcattgagttgcccgatcaaaggaaaatcattggtcgtgatgttggtgctaaagctgtcaccggaatggaagaaggaaagctggatcaatctagctcactaaatctatcggatgttgacctagttggtggtacagaggttgccgctatacacaataatccagtgttggtccagctgtctgcagctggatcttccacagagtcaaataataaacagcaacaagatcctgaaacttttacaggtgccaatgccagtcctacagatgatttatgccagcttccattagataataaggatgttcaggtagttaatatagaatgtggcacaccagttgaagttggtggatttggtttgtcaaaatcaatacacaataatccagtgttggtccagatgtctgtagctggatcttctgcagagttaattaataaacagcaagaagatcctgaaacttttacaggtgccaatgctaatcctacagatgatttatgccagcttccattagacaataaggatgttcaagtaattgacatagaatgtggcacaccagttgaagttggtggatttgatttgtcaaagtcaaaaaataagatggtatgctctagcatggatagcatcatggaccctggcgatggaatacatacggatgttattcctgttgttcaagatggctacagccttgcattttcagattttctcagttctgatataccatgctacccgtcaatgcaatcagatcttcatgctggaataagtgccaacgactcagagggtattaccgttatggatgatcctatatatgggtctctcgctgatattggtttcatggacatgtgggggcagcccactcaagactacgacaaattcttctaggctgccgccgaaggcccaagttcatgaatttgacaaggaaaattagttgagttagctcagtacaggcgacaataaatagatcgggttatatcagataaattagttgagtttagcagcaagatcggccgggccaatgcagcccgcctctccgacttgtcctcggacagaaggtttggattggatggagccacccgttggcccgtgaccgtcctggccgcggcgcaaggtcgcagccgccatgcccaataaggccttagttcggtttgagatggattaaagagatccacctctaaccgaacaagccgacatggaggaaagtcctaagccgacatggcgacacagccgcaggatttacggtgcctcgtctcatctgccaccgtcttcgtccggccctagcccctagcacagcacgtagccggacttgtgtccaccaaagcatcagtttttaaaactggattaacgtagacataggcgctactagatgacggacatgcgtaaaaggtgcgttttgcagtacttgttgcctatgaatcccgtgaaaacagacatcgcttttttctcgcgacaaaagaatcaagagatgtcacctttcagtactgtttcattatgttgagttcaattttatttcggtgtaatcatgagtttcagtgtcactcgaatcagacaaccagagtggcagcggactgcactggggagagggagccgcgccaaacggcgatgcgcaaacaagcgctcttcgcgtatggggattcgcagctctacatgtttaaagatcatgtttaaaggatctttgttcggttctaccccaatccatatggattgagtgggtttcaatcctagagtcaaaatttgttctcatccatatcaatcctcttcaatttatatggattgaaaaaaccgaacaagtactaaggtgggtgtggttataaatc

SEQ ID NO: 50433 - DNA, 3972 bp, Zea Mays
agagccgtagaggcattggatccacgtgcggattcacgcgcgcaaccggaaactggtactccgacccaccaaaagcagcgaccattagttcccccctcctttttattaattccctggtttaaaccaagcagcaaattcttgccgtagaaattagaactcccaacagaaataggtgcgtcatcgcgttcttgtaatctagtaaaagtcttccatttttctgtgatccttccccttctcccgcatcgatcgtctctcaagaacagagggtagaatcacaggtagaaagaaacaagaactgaattagccagtggtaattccggcctggcagctgaatcgtgactcaattcctgacgaatttctcgtggattccgtggagaaaaagtgtgacctttccgatgcagtacaaccaccgcagccgcttgccgccgccgccgctgccgttcggccgcggagggcatcctcgcggccccaagcagccatgctacgctccgcttcctccgccaccgtttcctccggcgccgccgccgccgccgccgtcgctagagcgcaagtacgaggtgcttatggaggccggtcgcctcgccaccgagtatctggtcgcccagggcgtgctccccccggccgctctgcagcgcggcgccggcatctctggcgcgtggcctgatcatcctcttcctccgccaccgcagctgcaacagcaggaaccccgggggggttatggccggaggcggtacaaagatgaatacaacaataatcctaggcgagccaatgacactagtagtagcaccagtagcagagatgattgcagccgtggcagctacaatggaagagggaagatgaagtatgggaaatacaggagggggtatttggattcagggagggacagggagaaggagaggagaaggccatttccaaatggccggcgctacgaggaggataaggatgaagatggggcacctgggtttcggagggagcgacacggcaatcgggggagtgatgaggtgaggcctcatgatacagaggcactgagggaagggacaccattgacagcgaaggctgtagaagggttctgcatggaggatgcaacgtcaaagattatgagctctttcaaagatactattaaggattctaatgatgcgccaaaggtgccggaggagactgaggaaggcgaggtggaggatgacagggagacgcagaattcagaaactgaggtagtgaagcaagggatagataccgatgtaaatcatgcttcttgttatgttattacagagtcaaatcccaaccagttatcagatggtaagattcaagatgagattcctgacgaggaagctgaagatgacaaaaaagttatggatgaggctactttggatcacaacacttgtgatggtgaggtgacaaatatggaagttgagatgcacgttggtaaggagagtttgattgactattgtaacttcacgagaaccccaacaaggcctaggtcagcacgtgcacacagaaatgcagcatctatcccaggagaacctgcagtagttgaaacatttgatttagtttcttctggtcaagcttcacatatggtaagcgctgaatctgctgagagattttttactaaaattgtgtcagaaaacacagaagataaattttgccaagaaaacactagctctggtgatgtccgtgctccaccaaaggagctgatgcttcttcaagaaaatggaataacagttgtgactgaaaacatggcagaagataatgttgatgcagaaccacatgtggtcgtccagcaatataaggaagaaactaacctatctccgttaacagatgccctcgagaagagcttgaggcaggaaatcacattatctccatttgcagcttctcacaaggatagcttgatgcaagagggtggcttgatgcaagaagttgatttatctccgttgacagctaatcacagggagagcttcactgaagaaaccgaattgccaccatcaacagcttctcacaaggacagcttgattgagggaactgacttaactcagacaatatcttcttataataataacttgaaattgcaatttaaggaaggaacacaggtatgcgatattgatatgctgccacaagatgtgaacctcattgagttgcccgatcaaaggaaaatcattggtcgtgatgttggtgctaaagctgtcaccggaatggaagaaggaaagctggatcaatctagctcactaaatctatcggatgttgacctagttggtggtacagaggttgccgctatacacaataatccagtgttggtccagctgtctgcagctggatcttccacagagtcaaataataaacagcaacaagatcctgaaacttttacaggtgccaatgccagtcctacagatgatttatgccagcttccattagataataaggatgttcaggtagttaatatagaatgtggcacaccagttgaagttggtggatttggtttgtcaaaatcaatacacaataatccagtgttggtccagatgtctgtagctggatcttctgcagagttaattaataaacagcaagaagatcctgaaacttttacaggtgccaatgctaatcctacagatgatttatgccagcttccattagacaataaggatgttcaagtaattgacatagaatgtggcacaccagttgaagttggtggatttgatttgtcaaagtcaaaaaataagatggtatgctctagcatggatagcatcatggaccctggcgatggaatacatacggatgttattcctgttgttcaagatggctacagccttgcattttcagattttctcagttctgatataccatgctacccgtcaatgcaatcagatcttcatgctggaataagtgccaacgactcagaggtttcatggacatgtgggggcagcccactcaagactacgacaaattcttctaggctgccgccgaaggcccaagttcatgaatttgacaaggaaaattagttgagttagctcagtacaggcgacaataaatagatcgggttatatcagataaattagttgagtttagcagcaagatcggccgggccaatgcagcccgcctctccgacttgtcctcggacagaaggtttggattggatggagccacccgttggcccgtgaccgtcctggccgcggcgcaaggtcgcagccgccatgcccaataaggccttagttcggtttgagatggattaaagagatccacctctaaccgaacaagccgacatggaggaaagtcctaagccgacatggcgacacagccgcaggatttacggtgcctcgtctcatctgccaccgtcttcgtccggccctagcccctagcacagcacgtagccggacttgtgtccaccaaagcatcagttgtaattagttgcagtccatgataattcttaatcccgttgttagcccgactgtggagataatttgcaatagttgaccacctgatttgttcatgacagcagtttaaaactggattaacgtagacataggcgctactagatgacggacatgcgtaaaaggtgcgttttgcagtacttgttgcctatgaatcccgtgaaaacagacatcgcttttttctcgcgacaaaagaatcaagagatgtcacctttcagtactgtttcattatgttgagttcaattttatttcggtgtaatcatgagtttcagtgtcactcgaatcagacaaccagagtggcagcggactgcactggggagagggagccgcgccaaacggcgatgcgcaaacaagcgctcttcgcgtatggggattcgcagctctacatgtttaaagatcatgtttaaaggatctttgttcggttctaccccaatccatatggattgagtgggtttcaatcctagagtcaaaatttgttctcatccatatcaatcctcttcaatttatatggattgaaaaaaccgaacaagtactaaggtgggtgtggttataaatc

SEQ ID NO: 50434 - DNA, 3446 bp, Zea Mays
attggatccacgtgcggattcacgcgcgcaaccggaaactggtactccgacccaccaaaagcagcgaccattagttcccccctcctttttattaattccctggtttaaaccaagcagcaaattcttgccgtagaaattagaactcccaacagaaataggtgcgtcatcgcgttcttgtaatctagtaaaagtcttccatttttctgtgatccttccccttctcccgcatcgatcgtctctcaagaacagagggtagaatcacaggtagaaagaaacaagaactgaattagccagtggtaattccggcctggcagctgaatcgtgactcaattcctgacgaatttctcgtggattccgtggagaaaaagtgtgacctttccgatgcagtacaaccaccgcagccgcttgccgccgccgccgctgccgttcggccgcggagggcatcctcgcggccccaagcagccatgctacgctccgcttcctccgccaccgtttcctccggcgccgccgccgccgccgccgtcgctagagcgcaagtacgaggtgcttatggaggccggtcgcctcgccaccgagtatctggtcgcccagggcgtgctccccccggccgctctgcagcgcggcgccggcatctctggcgcgtggcctgatcatcctcttcctccgccaccgcagctgcaacagcaggaaccccgggggggttatggccggaggcggtacaaagatgaatacaacaataatcctaggcgagccaatgacactagtagtagcaccagtagcagagatgattgcagccgtggcagctacaatggaagagggaagatgaagtatgggaaatacaggagggggtatttggattcagggagggacagggagaaggagaggagaaggccatttccaaatggccggcgctacgaggaggataaggatgaagatggggcacctgggtttcggagggagcgacacggcaatcgggggagtgatgaggtgaggcctcatgatacagaggcactgagggaagggacaccattgacagcgaaggctgtagaagggttctgcatggaggatgcaacgtcaaagattatgagctctttcaaagatactattaaggattctaatgatgcgccaaaggtgccggaggagactgaggaaggcgaggtggaggatgacagggagacgcagaattcagaaactgaggtagtgaagcaagggatagataccgatgtaaatcatgcttcttgttatgttattacagagtcaaatcccaaccagttatcagatggtaagattcaagatgagattcctgacgaggaagctgaagatgacaaaaaagttatggatgaggctactttggatcacaacacttgtgatggtgaggtgacaaatatggaagttgagatgcacgttggtaaggagagtttgattgactattgtaacttcacgagaaccccaacaaggcctaggtcagcacgtgcacacagaaatgcagcatctatcccaggagaacctgcagtagttgaaacatttgatttagtttcttctggtcaagcttcacatatggtaagcgctgaatctgctgagagattttttactaaaattgtgtcagaaaacacagaagataaattttgccaagaaaacactagctctggtgatgtccgtgctccaccaaaggagctgatgcttcttcaagaaaatggaataacagttgtgactgaaaacatggcagaagataatgttgatgcagaaccacatgtggtcgtccagcaatataaggaagaaactaacctatctccgttaacagatgccctcgagaagagcttgaggcaggaaatcacattatctccatttgcagcttctcacaaggatagcttgatgcaagagggtggcttgatgcaagaagttgatttatctccgttgacagctaatcacagggagagcttcactgaagaaaccgaattgccaccatcaacagcttctcacaaggacagcttgattgagggaactgacttaactcagacaatatcttcttataataataacttgaaattgcaatttaaggaaggaacacaggtatgcgatattgatatgctgccacaagatgtgaacctcattgagttgcccgatcaaaggaaaatcattggtcgtgatgttggtgctaaagctgtcaccggaatggaagaaggaaagctggatcaatctagctcactaaatctatcggatgttgacctagttggtggtacagaggttgccgctatacacaataatccagtgttggtccagctgtctgcagctggatcttccacagagtcaaataataaacagcaacaagatcctgaaacttttacaggtgccaatgccagtcctacagatgatttatgccagcttccattagataataaggatgttcaggtagttaatatagaatgtggcacaccagttgaagttggtggatttggtttgtcaaaatcaatacacaataatccagtgttggtccagatgtctgtagctggatcttctgcagagttaattaataaacagcaagaagatcctgaaacttttacaggtgccaatgctaatcctacagatgatttatgccagcttccattagacaataaggatgttcaagtaattgacatagaatgtggcacaccagttgaagttggtggatttgatttgtcaaagtcaaaaaataagatggtatgctctagcatggatagcatcatggaccctggcgatggaatacatacggatgttattcctgttgttcaagatggctacagccttgcattttcagattttctcagttctgatataccatgctacccgtcaatgcaatcagatcttcatgctggaataagtgccaacgactcagagacgcgtgccaccaagtgcatcctctcccccgagcagtcgagcaccctacaaccacctgtgccgttgctcctgcaggcgctgaaacggttgcagccagaagggatggcccggcgggccacccagcagccaccagaacgtgaccagcttttgtaggctcacttgccccaggtggagcagcagatgctccgccatgcctgcgcctgcagccggacggtttgtcagcagcaccagcgagctgttgtgtctctggccgcgatagaagagaagccaaggaaccgagaggaaatgggcctgcagaccaagactagaattgaggacgacttaatacgtgctgaatgaatatacgagcggcaacgagcgcacactaccggacggaggaagaagaaggagatgacaggtaggccaaggaagaagactgaaagacctgctaccggatttgtttcgaaccgttttggacctaatagagacccgagcagcgattaagactttaagagacacattttaaaactttatggaccgggttgacacaccggcgcaagttaagggaccggaaatgcactttactcaataac

SEQ ID NO: 50435 - DNA, 3512 bp, Zea Mays
attggatccacgtgcggattcacgcgcgcaaccggaaactggtactccgacccaccaaaagcagcgaccattagttcccccctcctttttattaattccctggtttaaaccaagcagcaaattcttgccgtagaaattagaactcccaacagaaataggtgcgtcatcgcgttcttgtaatctagtaaaagtcttccatttttctgtgatccttccccttctcccgcatcgatcgtctctcaagaacagagggtagaatcacaggtagaaagaaacaagaactgaattagccagtggtaattccggcctggcagctgaatcgtgactcaattcctgacgaatttctcgtggattccgtggagaaaaagtgtgacctttccgatgcagtacaaccaccgcagccgcttgccgccgccgccgctgccgttcggccgcggagggcatcctcgcggccccaagcagccatgctacgctccgcttcctccgccaccgtttcctccggcgccgccgccgccgccgccgtcgctagagcgcaagtacgaggtgcttatggaggccggtcgcctcgccaccgagtatctggtcgcccagggcgtgctccccccggccgctctgcagcgcggcgccggcatctctggcgcgtggcctgatcatcctcttcctccgccaccgcagctgcaacagcaggaaccccgggggggttatggccggaggcggtacaaagatgaatacaacaataatcctaggcgagccaatgacactagtagtagcaccagtagcagagatgattgcagccgtggcagctacaatggaagagggaagatgaagtatgggaaatacaggagggggtatttggattcagggagggacagggagaaggagaggagaaggccatttccaaatggccggcgctacgaggaggataaggatgaagatggggcacctgggtttcggagggagcgacacggcaatcgggggagtgatgaggtgaggcctcatgatacagaggcactgagggaagggacaccattgacagcgaaggctgtagaagggttctgcatggaggatgcaacgtcaaagattatgagctctttcaaagatactattaaggattctaatgatgcgccaaaggtgccggaggagactgaggaaggcgaggtggaggatgacagggagacgcagaattcagaaactgaggtagtgaagcaagggatagataccgatgtaaatcatgcttcttgttatgttattacagagtcaaatcccaaccagttatcagatggtaagattcaagatgagattcctgacgaggaagctgaagatgacaaaaaagttatggatgaggctactttggatcacaacacttgtgatggtgaggtgacaaatatggaagttgagatgcacgttggtaaggagagtttgattgactattgtaacttcacgagaaccccaacaaggcctaggtcagcacgtgcacacagaaatgcagcatctatcccaggagaacctgcagtagttgaaacatttgatttagtttcttctggtcaagcttcacatatggtaagcgctgaatctgctgagagattttttactaaaattgtgtcagaaaacacagaagataaattttgccaagaaaacactagctctggtgatgtccgtgctccaccaaaggagctgatgcttcttcaagaaaatggaataacagttgtgactgaaaacatggcagaagataatgttgatgcagaaccacatgtggtcgtccagcaatataaggaagaaactaacctatctccgttaacagatgccctcgagaagagcttgaggcaggaaatcacattatctccatttgcagcttctcacaaggatagcttgatgcaagagggtggcttgatgcaagaagttgatttatctccgttgacagctaatcacagggagagcttcactgaagaaaccgaattgccaccatcaacagcttctcacaaggacagcttgattgagggaactgacttaactcagacaatatcttcttataataataacttgaaattgcaatttaaggaaggaacacaggtatgcgatattgatatgctgccacaagatgtgaacctcattgagttgcccgatcaaaggaaaatcattggtcgtgatgttggtgctaaagctgtcaccggaatggaagaaggaaagctggatcaatctagctcactaaatctatcggatgttgacctagttggtggtacagaggttgccgctatacacaataatccagtgttggtccagctgtctgcagctggatcttccacagagtcaaataataaacagcaacaagatcctgaaacttttacaggtgccaatgccagtcctacagatgatttatgccagcttccattagataataaggatgttcaggtagttaatatagaatgtggcacaccagttgaagttggtggatttggtttgtcaaaatcaatacacaataatccagtgttggtccagatgtctgtagctggatcttctgcagagttaattaataaacagcaagaagatcctgaaacttttacaggtgccaatgctaatcctacagatgatttatgccagcttccattagacaataaggatgttcaagtaattgacatagaatgtggcacaccagttgaagttggtggatttgatttgtcaaagtcaaaaaataagatggtatgctctagcatggatagcatcatggaccctggcgatggaatacatacggatgttattcctgttgttcaagatggctacagccttgcattttcagattttctcagttctgatataccatgctacccgtcaatgcaatcagatcttcatgctggaataagtgccaacgactcagagggtattaccgttatggatgatcctatatatgggtctctcgctgatattggtttcatggacatgtgggggcagcccactcaagactacgacaaattcttctaggctgccgccgaaggcccaagttcatgaatttgacaaggaaaattacagtttaaaactggattaacgtagacataggcgctactagatgacggacatgcgtaaaaggtgcgttttgcagtacttgttgcctatgaatcccgtgaaaacagacatcgcttttttctcgcgacaaaagaatcaagagatgtcacctttcagtactgtttcattatgttgagttcaattttatttcggtgtaatcatgagtttcagtgtcactcgaatcagacaaccagagtggcagcggactgcactggggagagggagccgcgccaaacggcgatgcgcaaacaagcgctcttcgcgtatggggattcgcagctctacatgtttaaagatcatgtttaaaggatctttgttcggttctaccccaatccatatggattgagtgggtttcaatcctagagtcaaaatttgttctcatccatatcaatcctcttcaatttatatggattgaaaaaaccgaacaagtactaaggtgggtgtggttataaatc

SEQ ID NO: 50436 - DNA, 4553 bp, Zea Mays
attggatccacgtgcggattcacgcgcgcaaccggaaactggtactccgacccaccaaaagcagcgaccattagttcccccctcctttttattaattccctggtttaaaccaagcagcaaattcttgccgtagaaattagaactcccaacagaaataggtgcgtcatcgcgttcttgtaatctagtaaaagtcttccatttttctgtgatccttccccttctcccgcatcgatcgtctctcaagaacagagggtagaatcacaggtagaaagaaacaagaactgaattagccagtggtaattccggcctggcagctgaatcgtgactcaattcctgacgaatttctcgtggattccgtggagaaaaagtgtgacctttccgatgcagtacaaccaccgcagccgcttgccgccgccgccgctgccgttcggccgcggagggcatcctcgcggccccaagcagccatgctacgctccgcttcctccgccaccgtttcctccggcgccgccgccgccgccgccgtcgctagagcgcaagtacgaggtgcttatggaggccggtcgcctcgccaccgagtatctggtcgcccagggcgtgctccccccggccgctctgcagcgcggcgccggcatctctggcgcgtggcctgatcatcctcttcctccgccaccgcagctgcaacagcaggaaccccgggggggttatggccggaggcggtacaaagatgaatacaacaataatcctaggcgagccaatgacactagtagtagcaccagtagcagagatgattgcagccgtggcagctacaatggaagagggaagatgaagtatgggaaatacaggagggggtatttggattcagggagggacagggagaaggagaggagaaggccatttccaaatggccggcgctacgaggaggataaggatgaagatggggcacctgggtttcggagggagcgacacggcaatcgggggagtgatgaggtgaggcctcatgatacagaggcactgagggaagggacaccattgacagcgaaggctgtagaagggttctgcatggaggatgcaacgtcaaagattatgagctctttcaaagatactattaaggattctaatgatgcgccaaaggtgccggaggagactgaggaaggcgaggtggaggatgacagggagacgcagaattcagaaactgaggtagtgaagcaagggatagataccgatgtaaatcatgcttcttgttatgttattacagagtcaaatcccaaccagttatcagatggtaagattcaagatgagattcctgacgaggaagctgaagatgacaaaaaagttatggatgaggctactttggatcacaacacttgtgatggtgaggtgacaaatatggaagttgagatgcacgttggtaaggagagtttgattgactattgtaacttcacgagaaccccaacaaggcctaggtcagcacgtgcacacagaaatgcagcatctatcccaggagaacctgcagtagttgaaacatttgatttagtttcttctggtcaagcttcacatatggtaagcgctgaatctgctgagagattttttactaaaattgtgtcagaaaacacagaagataaattttgccaagaaaacactagctctggtgatgtccgtgctccaccaaaggagctgatgcttcttcaagaaaatggaataacagttgtgactgaaaacatggcagaagataatgttgatgcagaaccacatgtggtcgtccagcaatataaggaagaaactaacctatctccgttaacagatgccctcgagaagagcttgaggcaggaaatcacattatctccatttgcagcttctcacaaggatagcttgatgcaagagggtggcttgatgcaagaagttgatttatctccgttgacagctaatcacagggagagcttcactgaagaaaccgaattgccaccatcaacagcttctcacaaggacagcttgattgagggaactgacttaactcagacaatatcttcttataataataacttgaaattgcaatttaaggaaggaacacaggtatgcgatattgatatgctgccacaagatgtgaacctcattgagttgcccgatcaaaggaaaatcattggtcgtgatgttggtgctaaagctgtcaccggaatggaagaaggaaagctggatcaatctagctcactaaatctatcggatgttgacctagttggtggtacagaggttgccgctatacacaataatccagtgttggtccagctgtctgcagctggatcttccacagagtcaaataataaacagcaacaagatcctgaaacttttacaggtgccaatgccagtcctacagatgatttatgccagcttccattagataataaggatgttcaggtagttaatatagaatgtggcacaccagttgaagttggtggatttggtttgtcaaaatcaatacacaataatccagtgttggtccagatgtctgtagctggatcttctgcagagttaattaataaacagcaagaagatcctgaaacttttacaggtgccaatgctaatcctacagatgatttatgccagcttccattagacaataaggatgttcaagtaattgacatagaatgtggcacaccagttgaagttggtggatttgatttgtcaaagtcaaatgtcatggcatttcagctaaaagttatacaatttgattcaaccagaaataagatggtatgctctagcatggatagcatcatggaccctggcgatggaatacatacggatgttattcctgttgttcaagatggctacagccttgcattttcagattttctcagttctgatataccatgctacccgtcaatgcaatcagatcttcatgctggaataagtgccaacgactcagagacgcgtgccaccaagtgcatcctctcccccgagcagtcgagcaccctacaaccacctgtgccgttgctcctgcaggcgctgaaacggttgcagccagaagggatggcccggcgggccacccagcagccaccagaacgtgaccagcttttgtaggctcacttgccccaggtggagcagcagatgctccgccatgcctgcgcctgcagccggacggtttgtcagcagcaccagcgagctgttgtgtctctggccgcgatagaagagaagccaaggaaccgagaggaaatgggcctgcagaccaagactagaattgaggacgacttaatacgtgctgaatgaatatacgagcggcaacgagcgcacactaccggacggaggaagaagaaggagatgacaggtaggccaaggaagaagactgaaagacctgctaccggatttgtttcgaaccgttttggacctaatagagacccgagcagcgattaagactttaagagacacattttaaaactttatggaccgggttgacacaccggcgcaagttaagggaccggaaatgcactttactcaataacatattcaaacaattctcccttctttcagggtattaccgttatggatgatcctatatatgggtctctcgctgatattggtttcatggacatgtgggggcagcccactcaagactacgacaaattcttctaggctgccgccgaaggcccaagttcatgaatttgacaaggaaaattagttgagttagctcagtacaggcgacaataaatagatcgggttatatcagataaattagttgagtttagcagcaagatcggccgggccaatgcagcccgcctctccgacttgtcctcggacagaaggtttggattggatggagccacccgttggcccgtgaccgtcctggccgcggcgcaaggtcgcagccgccatgcccaataaggccttagttcggtttgagatggattaaagagatccacctctaaccgaacaagccgacatggaggaaagtcctaagccgacatggcgacacagccgcaggatttacggtgcctcgtctcatctgccaccgtcttcgtccggccctagcccctagcacagcacgtagccggacttgtgtccaccaaagcatcagtttttaaaactggattaacgtagacataggcgctactagatgacggacatgcgtaaaaggtgcgttttgcagtacttgttgcctatgaatcccgtgaaaacagacatcgcttttttctcgcgacaaaagaatcaagagatgtcacctttcagtactgtttcattatgttgagttcaattttatttcggtgtaatcatgagtttcagtgtcactcgaatcagacaaccagagtggcagcggactgcactggggagagggagccgcgccaaacggcgatgcgcaaacaagcgctcttcgcgtatggggattcgcagctctacatgtttaaagatcatgtttaaaggatctttgttcggttctaccccaatccatatggattgagtgggtttcaatcctagagtcaaaatttgttctcatccatatcaatcctcttcaatttatatggattgaaaaaaccgaacaagtactaaggtgggtgtggttataaatc

SEQ ID NO: 50437 - DNA, 4008 bp, Zea Mays
attggatccacgtgcggattcacgcgcgcaaccggaaactggtactccgacccaccaaaagcagcgaccattagttcccccctcctttttattaattccctggtttaaaccaagcagcaaattcttgccgtagaaattagaactcccaacagaaataggtgcgtcatcgcgttcttgtaatctagtaaaagtcttccatttttctgtgatccttccccttctcccgcatcgatcgtctctcaagaacagagggtagaatcacaggtagaaagaaacaagaactgaattagccagtggtaattccggcctggcagctgaatcgtgactcaattcctgacgaatttctcgtggattccgtggagaaaaagtgtgacctttccgatgcagtacaaccaccgcagccgcttgccgccgccgccgctgccgttcggccgcggagggcatcctcgcggccccaagcagccatgctacgctccgcttcctccgccaccgtttcctccggcgccgccgccgccgccgccgtcgctagagcgcaagtacgaggtgcttatggaggccggtcgcctcgccaccgagtatctggtcgcccagggcgtgctccccccggccgctctgcagcgcggcgccggcatctctggcgcgtggcctgatcatcctcttcctccgccaccgcagctgcaacagcaggaaccccgggggggttatggccggaggcggtacaaagatgaatacaacaataatcctaggcgagccaatgacactagtagtagcaccagtagcagagatgattgcagccgtggcagctacaatggaagagggaagatgaagtatgggaaatacaggagggggtatttggattcagggagggacagggagaaggagaggagaaggccatttccaaatggccggcgctacgaggaggataaggatgaagatggggcacctgggtttcggagggagcgacacggcaatcgggggagtgatgaggtgaggcctcatgatacagaggcactgagggaagggacaccattgacagcgaaggctgtagaagggttctgcatggaggatgcaacgtcaaagattatgagctctttcaaagatactattaaggattctaatgatgcgccaaaggtgccggaggagactgaggaaggcgaggtggaggatgacagggagacgcagaattcagaaactgaggtagtgaagcaagggatagataccgatgtaaatcatgcttcttgttatgttattacagagtcaaatcccaaccagttatcagatggtaagattcaagatgagattcctgacgaggaagctgaagatgacaaaaaagttatggatgaggctactttggatcacaacacttgtgatggtgaggtgacaaatatggaagttgagatgcacgttggtaaggagagtttgattgactattgtaacttcacgagaaccccaacaaggcctaggtcagcacgtgcacacagaaatgcagcatctatcccaggagaacctgcagtagttgaaacatttgatttagtttcttctggtcaagcttcacatatggtaagcgctgaatctgctgagagattttttactaaaattgtgtcagaaaacacagaagataaattttgccaagaaaacactagctctggtgatgtccgtgctccaccaaaggagctgatgcttcttcaagaaaatggaataacagttgtgactgaaaacatggcagaagataatgttgatgcagaaccacatgtggtcgtccagcaatataaggaagaaactaacctatctccgttaacagatgccctcgagaagagcttgaggcaggaaatcacattatctccatttgcagcttctcacaaggatagcttgatgcaagagggtggcttgatgcaagaagttgatttatctccgttgacagctaatcacagggagagcttcactgaagaaaccgaattgccaccatcaacagcttctcacaaggacagcttgattgagggaactgacttaactcagacaatatcttcttataataataacttgaaattgcaatttaaggaaggaacacaggtatgcgatattgatatgctgccacaagatgtgaacctcattgagttgcccgatcaaaggaaaatcattggtcgtgatgttggtgctaaagctgtcaccggaatggaagaaggaaagctggatcaatctagctcactaaatctatcggatgttgacctagttggtggtacagaggttgccgctatacacaataatccagtgttggtccagctgtctgcagctggatcttccacagagtcaaataataaacagcaacaagatcctgaaacttttacaggtgccaatgccagtcctacagatgatttatgccagcttccattagataataaggatgttcaggtagttaatatagaatgtggcacaccagttgaagttggtggatttggtttgtcaaaatcaatacacaataatccagtgttggtccagatgtctgtagctggatcttctgcagagttaattaataaacagcaagaagatcctgaaacttttacaggtgccaatgctaatcctacagatgatttatgccagcttccattagacaataaggatgttcaagtaattgacatagaatgtggcacaccagttgaagttggtggatttgatttgtcaaagtcaaaaaataagatggtatgctctagcatggatagcatcatggaccctggcgatggaatacatacggatgttattcctgttgttcaagatggctacagccttgcattttcagattttctcagttctgatataccatgctacccgtcaatgcaatcagatcttcatgctggaataagtgccaacgactcagaggggtattaccgttatggatgatcctatatatgggtctctcgctgatattggtttcatggacatgtgggggcagcccactcaagactacgacaaattcttctaggctgccgccgaaggcccaagttcatgaatttgacaaggaaaattagttgagttagctcagtacaggcgacaataaatagatcgggttatatcagataaattagttgagtttagcagcaagatcggccgggccaatgcagcccgcctctccgacttgtcctcggacagaaggtttggattggatggagccacccgttggcccgtgaccgtcctggccgcggcgcaaggtcgcagccgccatgcccaataaggccttagttcggtttgagatggattaaagagatccacctctaaccgaacaagccgacatggaggaaagtcctaagccgacatggcgacacagccgcaggatttacggtgcctcgtctcatctgccaccgtcttcgtccggccctagcccctagcacagcacgtagccggacttgtgtccaccaaagcatcagttgtaattagttgcagtccatgataattcttaatcccgttgttagcccgactgtggagataatttgcaatagttgaccacctgatttgttcatgacagcagtttaaaactggattaacgtagacataggcgctactagatgacggacatgcgtaaaaggtgcgttttgcagtacttgttgcctatgaatcccgtgaaaacagacatcgcttttttctcgcgacaaaagaatcaagagatgtcacctttcagtactgtttcattatgttgagttcaattttatttcggtgtaatcatgagtttcagtgtcactcgaatcagacaaccagagtggcagcggactgcactggggagagggagccgcgccaaacggcgatgcgcaaacaagcgctcttcgcgtatggggattcgcagctctacatgtttaaagatcatgtttaaaggatctttgttcggttctaccccaatccatatggattgagtgggtttcaatcctagagtcaaaatttgttctcatccatatcaatcctcttcaatttatatggattgaaaaaaccgaacaagtactaaggtgggtgtggttataaatc

SEQ ID NO: 50438 - DNA, 246 bp, Zea Mays
atgagctcttcccaacgctcctcaataagatccattatagcaacagattgctcaggtgttgcaagggaagaaagtatagcaatcatgtttccaagtgcgaaccatcggaagtccatcctggcaggactgacattaccaatgaaaaacccaccctgacaaggcataaagtcaaatagccaatccggaattgaatcaggaatgacattgaatttgttgacagcagtgtgggaatattcttctgtcttg

SEQ ID NO: 50439 - DNA, 608 bp, Zea Mays
gactggccaacggtgtggcgagctgcccggcgatttgggggaagccggcggggccgcgcggcagccgccgtcggatctcgtgggatctgcttggcttatttttggctagtgatcgtcttaatctatggctccttgtgcatcctcaacctgattgagacattgattgatagattgatgtgcctatggatatgcttaatactttgaagtgttattcggtggtatatatgcgtggccgcgatggcaagtctatcgtttccttggagaaaaaactgaatcaaacagtcacgcatatcaacgtggaaatatggttgaacatatgtgagaaaggcggtggcaatttcttgttttttttgtcaacggaaggggaaaaatgctcggtaagaggcatgtttcacgcagctctttgggcggaccttcctgcttggtacatctacctaaaaaagggaacagctttagaaactgtgtatcaaaagtagttttagctgcagtcaaagatttggcttttatccaagaacttgtttggcgttgctccatatatatagttatatatattgtactgttttacactatttataactaatttgttaactccattttccgaataattt

SEQ ID NO: 50440 - DNA, 1279 bp, Zea Mays
cggcaagacaaggcttcctcgcacactggcagttgacttgtctccgctcgtcccacctcatcctcctccctgatttttgccacgagctcgtcctagctaggtatgtatttcctctgaggatgatctcgtccacgcatcgtatgtctaggatatctcgcttggttattgtcccgcctccaaatcaaacgcatcctaagtgacacaggcatagagaagctttgctagcgaagtccagtagtgcaactcaccccttcctggtcctgctgctccgccctctccacctagctaccactcccttagagcgccactgccaagccatggcgggaggaggggcggcctaccagagctcgtcggcgtcgccggactggctgaacaagggcgacaatgcgtggcagatgacgtccgcgacgctggtgggcctgcagagcatgcccgggctggtgatcctgtacggcagcatcgtgaagaagaagtgggccatcaactcggcgttcatggcgctgtacgccttcgccgccgtctggctctgctgggtggtgtgggcctacaacatgtcgttcggcgaccggctgctgcccttctggggcaaggcgaggccggcgctcgggcagcgcttcctggtggcgcagtcccagctcacggccaccgccgtgcggtaccgcgacgggtcgctcgaggcggagatgctccaccccttctacccggccgccaccatggtgtacttccagtgcgtgttcgccagcatcaccgtcatcatcctcgccggctcgctgctgggccgcatggacatcaaggcctggatggccttcgtcccgctctggatcaccttctcctacaccgtctccgccttctcgctctggggcggcggcttcctcttccagtggggcgtcatcgactactccggcggctacgtcatccacctctcctcgggaatcgccggcctcaccgccgcttactgggtagggccaaggtcggcgtcggacagggagcggttccctcccaacaacatactgctggtgctggcgggggcaggcctgctgtggctcggatggactggcttcaacggcggcgacccgtactcggccaacatcgactcgtccatggcggtgctcaacacgcacatctgcgcctccaccagcctcctcatgtggaccctccttgacgtcttcttcttcgggaagccgtcggtgatcggtgctgtgcagggcatgatcaccggccttgtgtgcatcacgcctggcgcagtggaaagaaagcaaactaaggaaaacaaagtcag

SEQ ID NO: 50441 - DNA, 2164 bp, Zea Mays
tgtaacgtttctatacattcaagaacggaaaaccagggaagcaaaattagaaaggataacagcatatgctttctgtcagttcaagacatcgtattattaacagacatcggtattcctatgtcaaaatccaatgagcagagtaaacctgcagcaagagagaaaaaaatatatagagagagaaatggccaagcaaaactgaagctccagcctgaacctctcaaaatgctatgtgggaaatgggaaaagaaatttcacgggcaggcatgttttcatgtcgtgccgcctcggcgtttcagattatgcagatgcagtcttcttctgctggaaaacaacagcatacacagggactccaatgccagtgcccaccgcagccagcacagcgaggcacaccttaagctgctggtgcttcatcctgtgcaggttgtacatgtgcttggcgtggacgtagtatggctcatcatgagcgtgcgcccccatcctccttgtgccagtagaatggaatgcacgagaagctgcgaaaatatgacatggagtcagagaagtaaaataatggaaggtacatcacataggaaggatagatgtaatgcatgaaaagttttgagatgtagaatatggcaacttcagaaatataattatcaaaatgcatgccacatagaaaaatcaatatccaattccaaagagtacactcatgctgcaagttgctttgccaactctattaatgtagtacacagaaaatttgtgtccatttcaacattcacagtgataatgtaacgaaccaacgataccgtatgattaacaaattgatgtccattgcatacggattggtgaacatgaaaaatttgtacacaggtaaatacgactgatactgctcatgcattgaaaggttgatgaagaatccagattagttacatggagaagaaaggcagtcaatctcaataacatggcaagtgggcattgtgacagagaaacaagaatgttgacgatgaatagtgcgtttaaagtaatgcaaactgacagtttcatttgaatattataaatttacggggcgtttggatcccttcattttagaggaattggaattcactcaataaagtaacttttttagtttggaatttgacattccaccactttccaaagtttagatataagtctatctcaaattcatgtggtagaggatgggaaatgattttattcattagcagaatttgtttctactctgtaacttacatgacactattcgtctcactcctctatagtaaaaatatagcacataaacatctccaacatcttgctaatatcagtatacaaatatattttgcataaaaccgaattagcttaattgatatatgcctaaattactattattagaatggaattcaattccaattatcaaaacggggcgttaatgtaattttcttctccacatgccctgggtcaacatctacatccatacaaaatactgaaataggacagccataactactctacaccacatttgacaacagataactagaacatccatggacaacgaagcattgcagctgctccaaagctggggcttgtgtgttatataggctcagaaaaatcttaccattattggcaaaggaacccgatcaaacctacaactatgaactaacaacacgcgggagaataacgaaattgtagcataattatacaggctgtagagctcggaacaaatgcaagacaacatattcattttggcagtatcatttgccaccattgttaacagacaagacaaaaaattaggcatccatccaatgcaacaagagtttcttttccttggttaaaaaaacacaacaacatcagagctcgtggagttcattctgactgaaacgaattgcaatctacagaaatgcagggggaattaaacatgcacccccagaatcatctcctggttggcgcaatcctgatgtttgcatgagctgcgtatttgcatcagatcaaaatacaggctacccaaaacggctacacgcttcgcgaatgctagccatattttccctacaaagtcaaagcgaacatttaaagctttgccatgcgaatctagcaccgcgagaaatagattccttcggatgcgacggatgcgtcagatctaatagggcagtgaggcaatcggatcgcatgacagagatacaccgatgggatc

SEQ ID NO: 50442 - DNA, 2199 bp, Zea Mays
gttctttctatgcatccatcctgcagcgtttctgcaggcattatgtatgctaatctgctagcagtccacacgagagagaaccgttgtttgtttcccatcccattccattcctgaacccatggccacctgctctctgctgcctccgtcctgaattctctggaacccacagccacagcttcacagccgcgtctgcttctgcgcgtccactctgtccaccacgtcctccagcgccttgatccggtcgatgtcgaagccgacggcgacgggcgacgaggcggcggccgacctgcccgtcgccagcgggaagaccctgccgccgtgctcccgcgacgacgggccgctcttgctcagcctgtcgttcctgctcagcgccaccctgttgccgcgggccgccgccagctcctggctcttgctcttcccggccccgggggaccgccgccgggtgtaggcgtcctgcagcatctcgcgctcttctcgggtgagcccagcggggcgcccggaagtggctgctgctgctaccaccacccgcggggccgcgtgggtcggggaacggacgggggatcggctcggcgacctgtttgccggcctgctgtagctgatcaggatgtggagccacaccaccaggtccagtacgcatgcgtcggccttctccttgtccgcgtggtacagcgtctcgatcttcagcgcgccaggttgcccggcctgcttctgcgccgggtcgttcctgcacagaccggccggagagttcttcagctttggcgcccacacgtcgagcttagtaataatataatgctcttaaaagaagatctcatgagtgtcttaccctgtgttcgcccactcgccaacccatccgaacccatggtgtgccctggccgtgttattggcaaccgggacaatccattgcaaagtcttctccattgaactcctggttctagtgatcggaacctgaggcagaagaaagtagcagtcagggaaataaagctcccgagtggatgttgtcgatgtggacaatggaacatcattcccaagcaccagactacctcttgagactctgtcggagttatcagccttgttcgaagagcagacttgacgttcgggggcagactttgatagagcgcatctctggtgctctgaggggggacggagcttcgggaaaccttaaattaagcaatggatatcggtcagcaaacagttccccagtaaattgtagttggagacagaattttgttgcaagtacgttccaattatgctcactagctagcagcatgaggtttgtaaatatgacaacattactctttttttttgagtaaccacgagatacttacaatattgtcaatctgagaaatgatattagcgtagtgaagagagagaccagcagaccccaaagtttgacggctctcttgtgattcgctcgactctccaactacaggaacaaaaaagaaaaagcgcataacagacaagtcagtactgatcactaggtggtaaaaccatgactggtttgatggcaagtatagaagtgagcgagcaagcttaccacaaggcccaaaagtatcttggatctcgacatgtaagaagtggacaatatctacaagcttctccatgacctacaaataggagatgcagtttgcatcattcatcttgcccgttgaaaacagatcatttggagaagaagaagaaaaaaaatgtcatctgtgcacttcatcgtgtgcatgatttgaatatgaactactcacagagtcaagaggcttagaccaaagagactttttcttcaaattgtgtacatgcttcctctggctcttcagctcttgtctgatgatctgaacagtgtcccctgttcattcatgggagtcggttattaagtgtgatgaggatcagggaactggactggcagaaaaaatagcatctgaagcgacaagggtgatacatggatgaccatcgacatacccctttcagatgtaactgatcttttctcttcctccaactttcggcgataatcttgctcaaatctatctagtgcgtgtaattcatggtagagatcctatggggcaaagtggaacagcaacaacatcaggaatggctacatgaatcatactgattgcatgacatgcaaaggtgagcaaaatgtagtctaacacaatttattttctgtaagaacactagagatttttgtcaacatgtgtgatactcacaccagtgtgg

SEQ ID NO: 50443 - DNA, 1751 bp, Zea Mays
cgccagcccccattgttccgctccgcaccacggaagacgaagcgcagcagccacgccccgaaaaaggcagaagaaacgcggtgcctcgagccatcagatgccccaccccaccccaccccaccgtgttgatctaggagttggagtcggacggcgctgggagtcgccgagtcggggcatggcatccatagccatacatctcctcgcggagcctggggcggagctgtcaccaccatgcccaatcctatcgcaccaaggaggactctgcctcgtgctcctcgtagtcttcgtacccacccctccacgcttcccctttccttgcacggtcccgatccctagccctgcccctctcctccagcgccgctcgccagctctctgcccccgccgcgcccagagatgcagatcccccaccgccgttaccgctgggtgaaggagtgggtctcgcaagaactggtcgtcgccggaggcccctgcgtgctgtacaagtgggtgcgagactagcagctttgaaggctaaggacaagaagcatggggcagaatctgcaactcctgaacccaactctgaggttctcttcctgtgcagctacgaaggatgtgggaagacattttttgatgcaggggctcttaggaagcatgctcacgtccatggggagaggcaatatatctgtcactatgagaactgtggcaagaaattcttagatagttctaagttgaagagacattttcttattcatacaggagaaaagaattttgtgtgcccacatgaaggttgtgggaaggctttttcgttggattttaatttaaaggcacacatgaaaacacattctgcagataactatcatgtgtgccagtacccagaatgtggccgaagatttacacaagaatcaaaactaagagctcatatcagggcacaacatgagaaaaatccaggtgcttcggctatgaaccatagtgcaattggagaacagcatcagccccctaagccagcaaaggtctcagcaacgcctccagctccctcagctgagcgcccttacgtctgcccctacgatggttgcgacaaggcatacatccacgagtacaagctgaacctccatttgaaaaaggagcatcccaaccactaccaggatggtggtccacaaggcgctgccccttcaaagcgcagcatctcgaagagttcccataggagcagaccggacatcactgctagaatgccaccagccaaggtctccaagcgcaaaggagggtacgcagcgccatcgccagctgtgaacctccctgaggagcaccttcccgaggagcagcagtggccaaggaaagtgatgtacgaggatgacagcgaggagaccgaggaagaagaggggggcaacaatgtcgaggatagatggaactacaacagagttgctagtagcgatgacgaggaaaccgaagacgaacaatgagcttctagcaggcgtccatctgttctgtagttgtgcatataccataaattttaaactttgagggttatagcttttgcatacatgtaaaattttaaaataaggcggacttgttgtagacagcataggttgtaggtggtctgccccttctcaatcagacatgccatgagttcagaaaggataatggatcattgttctcgtttcgcttgtttttgtgtttgtgtttgtgccttttggttcgttatcacagatgagttattactgtaaccctgatttcagtgtttggcaatcaatctcgtcagccttacatttgtaaga

SEQ ID NO: 50444 - DNA, 1699 bp, Zea Mays
cgccagcccccattgttccgctccgcaccacggaagacgaagcgcagcagccacgccccgaaaaaggcagaagaaacgcggtgcctcgagccatcagatgccccaccccaccccaccccaccgtgttgatctaggagttggagtcggacggcgctgggagtcgccgagtcggggcatggcatccatagccatacatctcctcgcggagcctggggcggagctgtcaccaccatgcccaatcctatcgcaccaaggaggactctgcctcgtgctcctcgtagtcttcgtacccacccctccacgcttcccctttccttgcacggtcccgatccctagccctgcccctctcctccagcgccgctcgccagctctctgcccccgccgcgcccagagatgcagatcccccaccgccgttaccgctgggtgaaggagtgaggacagactagcagctttgaaggctaaggacaagaagcatggggcagaatctgcaactcctgaacccaactctgaggttctcttcctgtgcagctacgaaggatgtgggaagacattttttgatgcaggggctcttaggaagcatgctcacgtccatggggagaggcaatatatctgtcactatgagaactgtggcaagaaattcttagatagttctaagttgaagagacattttcttattcatacaggagaaaagaattttgtgtgcccacatgaaggttgtgggaaggctttttcgttggattttaatttaaaggcacacatgaaaacacattctgcagataactatcatgtgtgccagtacccagaatgtggccgaagatttacacaagaatcaaaactaagagctcatatcagggcacaacatgagaaaaatccaggtgcttcggctatgaaccatagtgcaattggagaacagcatcagccccctaagccagcaaaggtctcagcaacgcctccagctccctcagctgagcgcccttacgtctgcccctacgatggttgcgacaaggcatacatccacgagtacaagctgaacctccatttgaaaaaggagcatcccaaccactaccaggatggtggtccacaaggcgctgccccttcaaagcgcagcatctcgaagagttcccataggagcagaccggacatcactgctagaatgccaccagccaaggtctccaagcgcaaaggagggtacgcagcgccatcgccagctgtgaacctccctgaggagcaccttcccgaggagcagcagtggccaaggaaagtgatgtacgaggatgacagcgaggagaccgaggaagaagaggggggcaacaatgtcgaggatagatggaactacaacagagttgctagtagcgatgacgaggaaaccgaagacgaacaatgagcttctagcaggcgtccatctgttctgtagttgtgcatataccataaattttaaactttgagggttatagcttttgcatacatgtaaaattttaaaataaggcggacttgttgtagacagcataggttgtaggtggtctgccccttctcaatcagacatgccatgagttcagaaaggataatggatcattgttctcgtttcgcttgtttttgtgtttgtgtttgtgccttttggttcgttatcacagatgagttattactgtaaccctgatttcagtgtttggcaatcaatctcgtcagccttacatttgtaaga

SEQ ID NO: 50445 - DNA, 1706 bp, Zea Mays
cgccagcccccattgttccgctccgcaccacggaagacgaagcgcagcagccacgccccgaaaaaggcagaagaaacgcggtgcctcgagccatcagatgccccaccccaccccaccccaccgtgttgatctaggagttggagtcggacggcgctgggagtcgccgagtcggggcatggcatccatagccatacatctcctcgcggagcctggggcggagctgtcaccaccatgcccaatcctatcgcaccaaggaggactctgcctcgtgctcctcgtagtcttcgtacccacccctccacgcttcccctttccttgcacggtcccgatccctagccctgcccctctcctccagcgccgctcgccagctctctgcccccgccgcgcccagagatgcagatcccccaccgccgttaccgctgggtgaaggagtgggtctcgcaagaactggtcgtcgccggaggcccctgcgtgctgtacaagtgggtgcgagaggacagactagcagctttgaaggctaaggacaagaagcatggggcagaatctgcaactcctgaacccaactctgaggttctcttcctgtgcagctacgaaggatgtgggaagacattttttgatgcaggggctcttaggaagcatgctcacgtccatggggagaggcaatatatctgtcactatgagaactgtggcaagaaattcttagatagttctaagttgaagagacattttcttattcatacaggagaaaagaattttgtgtgcccacatgaaggttgtgggaagataactatcatgtgtgccagtacccagaatgtggccgaagatttacacaagaatcaaaactaagagctcatatcagggcacaacatgagaaaaatccaggtgcttcggctatgaaccatagtgcaattggagaacagcatcagccccctaagccagcaaaggtctcagcaacgcctccagctccctcagctgagcgcccttacgtctgcccctacgatggttgcgacaaggcatacatccacgagtacaagctgaacctccatttgaaaaaggagcatcccaaccactaccaggatggtggtccacaaggcgctgccccttcaaagcgcagcatctcgaagagttcccataggagcagaccggacatcactgctagaatgccaccagccaaggtctccaagcgcaaaggagggtacgcagcgccatcgccagctgtgaacctccctgaggagcaccttcccgaggagcagcagtggccaaggaaagtgatgtacgaggatgacagcgaggagaccgaggaagaagaggggggcaacaatgtcgaggatagatggaactacaacagagttgctagtagcgatgacgaggaaaccgaagacgaacaatgagcttctagcaggcgtccatctgttctgtagttgtgcatataccataaattttaaactttgagggttatagcttttgcatacatgtaaaattttaaaataaggcggacttgttgtagacagcataggttgtaggtggtctgccccttctcaatcagacatgccatgagttcagaaaggataatggatcattgttctcgtttcgcttgtttttgtgtttgtgtttgtgccttttggttcgttatcacagatgagttattactgtaaccctgatttcagtgtttggcaatcaatctcgtcagccttacatttgtaaga

SEQ ID NO: 50446 - DNA, 2470 bp, Zea Mays
taataaataaaatataagcaacacaattaaaatgtaaaagtaaaaaaaaaatctgacggtctccatacaggctacagcctgaagtctgctcagcgtgttgtaggcttgtagctttcctcaaaaacctcgggcttcccctggcttccatgcagcagtccccccttcgtgtcgcactcgcacagtcgcactccataaggcaaggaggaaaacagagagacgaccaccgctccgcgccggccggccattccatccggcaatggcctccgccgccggtgctgcgttcgccgccatcaccctcctcatcctcgtacccctcaccgccgcttcggactccgaccacaagtaccaagcagcggagcctgtgacgctctgggtgaacaaggttggtccgtacaacaatccgcaggagacatacaactactacagcctcccattttgccatgcgtcagaaaaccatgtgcataagtggggaggactcggcgaggtccttggtgggaatgagctcattgacagccagatcgacataaagtttggaaagaatgttgataaggccacaatttgttcgctagacctcgatcttgtcaaggctaagcaattgtcggatgcgattgagaactcatattggtttgaatttttcattggttttgttggagaggcagacagaaacaatgataacaaatatttcctattcacgcacaagaatattgtcatcagatacaatggcaatcagattatccatgttaatcttactcaagaaagcccaaagcttattgatgtgaataaggcattggatatgacatattctgtcaaatgggaaccaacaaacataacatttgctcaccgttttgatgtgtatctggactatcctttctttgaacaccagattcattggttctcaattttcaattctttcatgatggttatctttctcactggactagtgtcaatgatactgatgcggactctaagaaatgattatgcaaagtatgcccgtgatgatgatgatattgaaactctggaacgagatgtcaatgaagaatctggatggaagcttgtacatggtgatgttttccggcctccttgcaatctagttcttctttcagctcttgttggtattggtacacagttggcagcactgattctactagtgattttgttggcaatcattggaatgctgtacattgggcgaggagctattgtcacaacattcattgtttgctatgctcttacttcattcatctctggatatgtcagtggtgcattatactcacgtcatggagggaaaaactggatcaaggcaatggccatgacagcatcacttttcccatttatgtgctttggaattggcctggtgcttaacactattgctattttctatggatcgttagctgccataccatttggtacgatggtggttgttttcatcctgtgggccttcatctctttccctcttgcacttttgggaactgttgttggtagaaattggagtggtgctccaaacaatccctgtagggtgaagactattcctcgccctattcctgagaagaaatggtacctcacaccatctgtcattgcgcttatgggaggactgcttccttttggtagtatctttattgagatgtactttgtcttcacatcgttctggaactataaggtctactatgtttatgggttcatgttgctggtctttctgatactcatcattgtcaccatatgtgtaacaattgtcggtacatatttcttgctaaatgcggagaactaccactggcaatggacttcattcttctctgctgcttccactgcggtgtatgtttacctctactccatatattattaccacatgaagaccaagatgtctggattcttccagaccagcttctatttcggctacactctaatgttctgcctaggcttaggaacactatgcggtgccgtcgggtatcttggatcgacattgtttgtgaggaggatctacaggaacataaagtgtgactaagtgaagataatatcgccccattttgggtcagcgcagagaaaatgtatggcagagccttatttgattgagcgatcactgattctaaaaccaagaacgcaggtcattttgtgaaatatgatcgttgcttggcgccgagctgaaagccatgtttttctattcttgtcctcgtttctctctgatttcttctggacttggacaggcaacaaattttcatgttgaattagttatatatatagcggtggttgtagttgttgagtagttctgtagtatataccacaattgttatccttggccccaatgatacctcagattgatgggtataaactgtaacatttacattacctgatgtttgacgatgaacacagttccaaataatcatgttcggtactggaggatcgagatttttgagaggcaacatcaaagaaaaaatgtttgatattataccgaaatggaaacttagatcgtaaatgtttc

SEQ ID NO: 50447 - DNA, 2377 bp, Zea Mays
ctttcctcaaaaacctcgggcttcccctggcttccatgcagcagtccccccttcgtgtcgcactcgcacagtcgcactccataaggcaaggaggaaaacagagagacgaccaccgctccgcgccggccggccattccatccggcaatggcctccgccgccggtgctgcgttcgccgccatcaccctcctcatcctcgtacccctcaccgccgcttcggactccgaccacaagtaccaagcagcggagcctgtgacgctctgggtgaacaaggttggtccgtacaacaatccgcaggagacatacaactactacagcctcccattttgccatgcgtcagaaaaccatgtgcataagtggggaggactcggcgaggtccttggtgggaatgagctcattgacagccagatcgacataaagtttggaaagaatgttgataaggccacaatttgttcgctagacctcgatcttgtcaaggctaagcaattgtcggatgcgattgagaactcatattggtttgaatttttcattgatgatttgcctttgtggggttttgttggagaggcagacagaaacaatgataacaaatatttcctattcacgcacaagaatattgtcatcagatacaatggcaatcagattatccatgttaatcttactcaagaaagcccaaagcttattgatgtgaataaggcattggatatgacatattctgtcaaatgggaaccaacaaacataacatttgctcaccgttttgatgtgtatctggactatcctttctttgaacaccagattcattggttctcaattttcaattctttcatgatggttatctttctcactggactagtgtcaatgatactgatgcggactctaagaaatgattatgcaaagtatgcccgtgatgatgatgatattgaaactctggaacgagatgtcaatgaagaatctggatggaagcttgtacatggtgatgttttccggcctccttgcaatctagttcttctttcagctcttgttggtattggtacacagttggcagcactgattctactagtgattttgttggcaatcattggaatgctgtacattgggcgaggagctattgtcacaacattcattgtttgctatgctcttacttcattcatctctggatatgtcagtggtgcattatactcacgtcatggagggaaaaactggatcaaggcaatggccatgacagcatcacttttcccatttatgtgctttggaattggcctggtgcttaacactattgctattttctatggatcgttagctgccataccatttggtacgatggtggttgttttcatcctgtgggccttcatctctttccctcttgcacttttgggaactgttgttggtagaaattggagtggtgctccaaacaatccctgtagggtgaagactattcctcgccctattcctgagaagaaatggtacctcacaccatctgtcattgcgcttatgggaggactgcttccttttggtagtatctttattgagatgtactttgtcttcacatcgttctggaactataaggtctactatgtttatgggttcatgttgctggtctttctgatactcatcattgtcaccatatgtgtaacaattgtcggtacatatttcttgctaaatgcggagaactaccactggcaatggacttcattcttctctgctgcttccactgcggtgtatgtttacctctactccatatattattaccacatgaagaccaagatgtctggattcttccagaccagcttctatttcggctacactctaatgttctgcctaggcttaggaacactatgcggtgccgtcgggtatcttggatcgacattgtttgtgaggaggatctacaggaacataaagtgtgactaagtgaagataatatcgccccattttgggtcagcgcagagaaaatgtatggcagagccttatttgattgagcgatcactgattctaaaaccaagaacgcaggtcattttgtgaaatatgatcgttgcttggcgccgagctgaaagccatgtttttctattcttgtcctcgtttctctctgatttcttctggacttggacaggcaacaaattttcatgttgaattagttatatatatagcggtggttgtagttgttgagtagttctgtagtatataccacaattgttatccttggccccaatgatacctcagattgatgggtataaactgtaacatttacattacctgatgtttgacgatgaacacagttccaaataatcatgttcggtactggaggatcgagatttttgagaggcaacatcaaagaaaaaatgtttgatattataccgaaatggaaacttagatcgtaaatgtttc

SEQ ID NO: 50448 - DNA, 2476 bp, Zea Mays
caaaaacctcgggcttcccctggcttccatgcagcagtccccccttcgtgtcgcactcgcacagtcgcactccataaggcaaggaggaaaacagagagacgaccaccgctccgcgccggccggccattccatccggcaatggcctccgccgccggtgctgcgttcgccgccatcaccctcctcatcctcgtacccctcaccgccgcttcggactccgaccacaagtaccaagcagcggagcctgtgacgctctgggtgaacaaggttggtccgtacaacaatccgcaggagacatacaactactacagcctcccattttgccatgcgtcagaaaaccatgtgcataagtggggaggactcggcgaggtccttggtgggaatgagctcattgacagccagatcgacataaagtttggaaagaatgttgataaggccacaatttgttcgctagacctcgatcttgtcaaggctaagcaattgtcggatgcgattgagaactcatattggtttgaatttttcattggttttgttggagaggcagacagaaacaatgataacaaatatttcctattcacgcacaagaatattgtcatcagatacaatggcaatcagattatccatgttaatcttactcaagaaagcccaaagcttattgatgtgaataaggcattggatatgacatattctgtcaaatgggaaccaacaaacataacatttgctcaccgttttgatgtgtatctggactatcctttctttgaacaccagattcattggttctcaattttcaattctttcatgatggttatctttctcactggactagtgtcaatgatactgatgcggactctaagaaatgattatgcaaagtatgcccgtgatgatgatgatattgaaactctggaacgagatgtcaatgaagaatctggatggaagcttgtacatggtgatgttttccggcctccttgcaatctagttcttctttcagctcttgttggtattggtacacagttggcagcactgattctactagtgattttgttggcaatcattggaatgctgtacattggaaagtgtttatttgattacatcaaaaggctcatccaattgaaagatggtgctcctattctctctgttgaacaatttgtcaaaatattatcgccatctatgtctgatctcatcctccttcaagaggcgaggagctattgtcacaacattcattgtttgctatgctcttacttcattcatctctggatatgtcagtggtgcattatactcacgtcatggagggaaaaactggatcaaggcaatggccatgacagcatcacttttcccatttatgtgctttggaattggcctggtgcttaacactattgctattttctatggatcgttagctgccataccatttggtacgatggtggttgttttcatcctgtgggccttcatctctttccctcttgcacttttgggaactgttgttggtagaaattggagtggtgctccaaacaatccctgtagggtgaagactattcctcgccctattcctgagaagaaatggtacctcacaccatctgtcattgcgcttatgggaggactgcttccttttggtagtatctttattgagatgtactttgtcttcacatcgttctggaactataaggtctactatgtttatgggttcatgttgctggtctttctgatactcatcattgtcaccatatgtgtaacaattgtcggtacatatttcttgctaaatgcggagaactaccactggcaatggacttcattcttctctgctgcttccactgcggtgtatgtttacctctactccatatattattaccacatgaagaccaagatgtctggattcttccagaccagcttctatttcggctacactctaatgttctgcctaggcttaggaacactatgcggtgccgtcgggtatcttggatcgacattgtttgtgaggaggatctacaggaacataaagtgtgactaagtgaagataatatcgccccattttgggtcagcgcagagaaaatgtatggcagagccttatttgattgagcgatcactgattctaaaaccaagaacgcaggtcattttgtgaaatatgatcgttgcttggcgccgagctgaaagccatgtttttctattcttgtcctcgtttctctctgatttcttctggacttggacaggcaacaaattttcatgttgaattagttatatatatagcggtggttgtagttgttgagtagttctgtagtatataccacaattgttatccttggccccaatgatacctcagattgatgggtataaactgtaacatttacattacctgatgtttgacgatgaacacagttccaaataatcatgttcggtactggaggatcgagatttttgagaggcaacatcaaagaaaaaatgtttgatattataccgaaatggaaacttagatcgtaaatgtttc

SEQ ID NO: 50449 - DNA, 2591 bp, Zea Mays
caaaaacctcgggcttcccctggcttccatgcagcagtccccccttcgtgtcgcactcgcacagtcgcactccataaggcaaggaggaaaacagagagacgaccaccgctccgcgccggccggccattccatccggcaatggcctccgccgccggtgctgcgttcgccgccatcaccctcctcatcctcgtacccctcaccgccgcttcggactccgaccacaagtaccaagcagcggagcctgtgacgctctgggtgaacaaggttggtccgtacaacaatccgcaggagacatacaactactacagcctcccattttgccatgcgtcagaaaaccatgtgcataagtggggaggactcggcgaggtccttggtgggaatgagctcattgacagccagatcgacataaagtttggaaagaatgttgataaggccacaatttgttcgctagacctcgatcttgtcaaggctaagcaattgtcggatgcgattgagaactcatattggtttgaatttttcattgatgatttgcctttgtggggttttgttggagaggcagacagaaacaatgataacaaatatttcctattcacgcacaagaatattgtcatcagatacaatggcaatcagattatccatgttaatcttactcaagaaagcccaaagcttattgatgtgaataaggcattggatatgacatattctgtcaaatgggaaccaacaaacataacatttgctcaccgttttgatgtgtatctggactatcctttctttgaacaccagattcattggttctcaattttcaattctttcatgatggttatctttctcactggactagtgtcaatgatactgatgcggactctaagaaatgattatgcaaagtatgcccgtgatgatgatgatattgaaactctggaacgagatgtcaatgaagaatctggatggaagcttgtacatggtgatgttttccggcctccttgcaatctagttcttctttcagctcttgttggtattggtacacagttggcagcactgattctactagtgattttgttggcaatcattggaatgctgtacattgggcgaggagctattgtcacaacattcattgtttgctatgctcttacttcattcatctctggatatgtcagtggtgcattatactcacgtcatggagggaaaaactggatcaaggcaatggccatgacagcatcacttttcccatttatgtgctttggaattggcctggtgcttaacactattgctattttctatggatcgttagctgccataccatttggtacgatggtggttgttttcatcctgtgggccttcatctctttccctcttgcacttttgggaactgttgttggtagaaattggagtggtgctccaaacaatccctgtagggtgaagactattcctcgccctattcctgagaagaaatggtacctcacaccatctgtcattgcgcttatgggaggactgcttccttttggtagtatctttattgagatgtactttgtcttcacatcgttctggaactataaggtatggtagacaggcctgtgttttttttttttaaatctctaagcttcatactaaggctgtcctcatcagtgggtataatggatgtgcaaaacactgttttggtactgtacatggactgtggatagagcggtgcttgaaatagttcctcattggtgaggatagcctaaggaggcattggagttgacattgatgtctcatcctttttgattaaccactgacaggtctactatgtttatgggttcatgttgctggtctttctgatactcatcattgtcaccatatgtgtaacaattgtcggtacatatttcttgctaaatgcggagaactaccactggcaatggacttcattcttctctgctgcttccactgcggtgtatgtttacctctactccatatattattaccacatgaagaccaagatgtctggattcttccagaccagcttctatttcggctacactctaatgttctgcctaggcttaggaacactatgcggtgccgtcgggtatcttggatcgacattgtttgtgaggaggatctacaggaacataaagtgtgactaagtgaagataatatcgccccattttgggtcagcgcagagaaaatgtatggcagagccttatttgattgagcgatcactgattctaaaaccaagaacgcaggtcattttgtgaaatatgatcgttgcttggcgccgagctgaaagccatgtttttctattcttgtcctcgtttctctctgatttcttctggacttggacaggcaacaaattttcatgttgaattagttatatatatagcggtggttgtagttgttgagtagttctgtagtatataccacaattgttatccttggccccaatgatacctcagattgatgggtataaactgtaacatttacattacctgatgtttgacgatgaacacagttccaaataatcatgttcggtactggaggatcgagatttttgagaggcaacatcaaagaaaaaatgtttgatattataccgaaatggaaacttagatcgtaaatgtttc

SEQ ID NO: 50450 - DNA, 2362 bp, Zea Mays
ctggcttccatgcagcagtccccccttcgtgtcgcactcgcacagtcgcactccataaggcaaggaggaaaacagagagacgaccaccgctccgcgccggccggccattccatccggcaatggcctccgccgccggtgctgcgttcgccgccatcaccctcctcatcctcgtacccctcaccgccgcttcggactccgaccacaagtaccaagcagcggagcctgtgacgctctgggtgaacaaggttggtccgtacaacaatccgcaggagacatacaactactacagcctcccattttgccatgcgtcagaaaaccatgtgcataagtggggaggactcggcgaggtccttggtgggaatgagctcattgacagccagatcgacataaagtttggaaagaatgttgataaggccacaatttgttcgctagacctcgatcttgtcaaggctaagcaattgtcggatgcgattgagaactcatattggtttgaatttttcattgatgatttgcctttgtggggtgttttgttggagaggcagacagaaacaatgataacaaatatttcctattcacgcacaagaatattgtcatcagatacaatggcaatcagattatccatgttaatcttactcaagaaagcccaaagcttattgatgtgaataaggcattggatatgacatattctgtcaaatgggaaccaacaaacataacatttgctcaccgttttgatgtgtatctggactatcctttctttgaacaccagattcattggttctcaattttcaattctttcatgatggttatctttctcactggactagtgtcaatgatactgatgcggactctaagaaatgattatgcaaagtatgcccgtgatgatgatgatattgaaactctggaacgagatgtcaatgaagaatctggatggaagcttgtacatggtgatgttttccggcctccttgcaatctagttcttctttcagctcttgttggtattggtacacagttggcagcactgattctactagtgattttgttggcaatcattggaatgctgtacattgggcgaggagctattgtcacaacattcattgtttgctatgctcttacttcattcatctctggatatgtcagtggtgcattatactcacgtcatggaggaggagcagggaaaaactggatcaaggcaatggccatgacagcatcacttttcccatttatgtgctttggaattggcctggtgcttaacactattgctattttctatggatcgttagctgccataccatttggtacgatggtggttgttttcatcctgtgggccttcatctctttccctcttgcacttttgggaactgttgttggtagaaattggagtggtgctccaaacaatccctgtagggtgaagactattcctcgccctattcctgagaagaaatggtacctcacaccatctgtcattgcgcttatgggaggactgcttccttttggtagtatctttattgagatgtactttgtcttcacatcgttctggaactataaggtctactatgtttatgggttcatgttgctggtctttctgatactcatcattgtcaccatatgtgtaacaattgtcggtacatatttcttgctaaatgcggagaactaccactggcaatggacttcattcttctctgctgcttccactgcggtgtatgtttacctctactccatatattattaccacatgaagaccaagatgtctggattcttccagaccagcttctatttcggctacactctaatgttctgcctaggcttaggaacactatgcggtgccgtcgggtatcttggatcgacattgtttgtgaggaggatctacaggaacataaagtgtgactaagtgaagataatatcgccccattttgggtcagcgcagagaaaatgtatggcagagccttatttgattgagcgatcactgattctaaaaccaagaacgcaggtcattttgtgaaatatgatcgttgcttggcgccgagctgaaagccatgtttttctattcttgtcctcgtttctctctgatttcttctggacttggacaggcaacaaattttcatgttgaattagttatatatatagcggtggttgtagttgttgagtagttctgtagtatataccacaattgttatccttggccccaatgatacctcagattgatgggtataaactgtaacatttacattacctgatgtttgacgatgaacacagttccaaataatcatgttcggtactggaggatcgagatttttgagaggcaacatcaaagaaaaaatgtttgatattataccgaaatggaaacttagatcgtaaatgtttc

SEQ ID NO: 50451 - DNA, 2360 bp, Zea Mays
ctggcttccatgcagcagtccccccttcgtgtcgcactcgcacagtcgcactccataaggcaaggaggaaaacagagagacgaccaccgctccgcgccggccggccattccatccggcaatggcctccgccgccggtgctgcgttcgccgccatcaccctcctcatcctcgtacccctcaccgccgcttcggactccgaccacaagtaccaagcagcggagcctgtgacgctctgggtgaacaaggttggtccgtacaacaatccgcaggagacatacaactactacagcctcccattttgccatgcgtcagaaaaccatgtgcataagtggggaggactcggcgaggtccttggtgggaatgagctcattgacagccagatcgacataaagtttggaaagaatgttgataaggccacaatttgttcgctagacctcgatcttgtcaaggctaagcaattgtcggatgcgattgagaactcatattggtttgaatttttcattgatgatttgcctttgtggggttttgttggagaggcagacagaaacaatgataacaaatatttcctattcacgcacaagaatattgtcatcagatacaatggcaatcagattatccatgttaatcttactcaagaaagcccaaagcttattgatgtgaataaggcattggatatgacatattctgtcaaatgggaaccaacaaacataacatttgctcaccgttttgatgtgtatctggactatcctttctttgaacaccagattcattggttctcaattttcaattctttcatgatggttatctttctcactggactagtgtcaatgatactgatgcggactctaagaaatgattatgcaaagtatgcccgtgatgatgatgatattgaaactctggaacgagatgtcaatgaagaatctggatggaagcttgtacatggtgatgttttccggcctccttgcaatctagttcttctttcagctcttgttggtattggtacacagttggcagcactgattctactagtgattttgttggcaatcattggaatgctgtacattgggcgaggagctattgtcacaacattcattgtttgctatgctcttacttcattcatctctggatatgtcagtggtgcattatactcacgtcatggaggaggagcagggaaaaactggatcaaggcaatggccatgacagcatcacttttcccatttatgtgctttggaattggcctggtgcttaacactattgctattttctatggatcgttagctgccataccatttggtacgatggtggttgttttcatcctgtgggccttcatctctttccctcttgcacttttgggaactgttgttggtagaaattggagtggtgctccaaacaatccctgtagggtgaagactattcctcgccctattcctgagaagaaatggtacctcacaccatctgtcattgcgcttatgggaggactgcttccttttggtagtatctttattgagatgtactttgtcttcacatcgttctggaactataaggtctactatgtttatgggttcatgttgctggtctttctgatactcatcattgtcaccatatgtgtaacaattgtcggtacatatttcttgctaaatgcggagaactaccactggcaatggacttcattcttctctgctgcttccactgcggtgtatgtttacctctactccatatattattaccacatgaagaccaagatgtctggattcttccagaccagcttctatttcggctacactctaatgttctgcctaggcttaggaacactatgcggtgccgtcgggtatcttggatcgacattgtttgtgaggaggatctacaggaacataaagtgtgactaagtgaagataatatcgccccattttgggtcagcgcagagaaaatgtatggcagagccttatttgattgagcgatcactgattctaaaaccaagaacgcaggtcattttgtgaaatatgatcgttgcttggcgccgagctgaaagccatgtttttctattcttgtcctcgtttctctctgatttcttctggacttggacaggcaacaaattttcatgttgaattagttatatatatagcggtggttgtagttgttgagtagttctgtagtatataccacaattgttatccttggccccaatgatacctcagattgatgggtataaactgtaacatttacattacctgatgtttgacgatgaacacagttccaaataatcatgttcggtactggaggatcgagatttttgagaggcaacatcaaagaaaaaatgtttgatattataccgaaatggaaacttagatcgtaaatgtttc

SEQ ID NO: 50452 - DNA, 1954 bp, Zea Mays
ttccatgcagcagtccccccttcgtgtcgcactcgcacagtcgcactccataaggcaaggaggaaaacagagagacgaccaccgctccgcgccggccggccattccatccggcaatggcctccgccgccggtgctgcgttcgccgccatcaccctcctcatcctcgtacccctcaccgccgcttcggactccgaccacaagtaccaagcagcggagcctgtgacgctctgggtgaacaaggttggtccgtacaacaatccgcaggagacatacaactactacagcctcccattttgccatgcgtcagaaaaccatgtgcataagtggggaggactcggcgaggtccttggtgggaatgagctcattgacagccagatcgacataaagtttggaaagaatgttgataaggccacaatttgttcgctagacctcgatcttgtcaaggctaagcaattgtcggatgcgattgagaactcatattggtttgaatttttcattggttttgttggagaggcagacagaaacaatgataacaaatatttcctattcacgcacaagaatattgtcatcagatacaatggcaatcagattatccatgttaatcttactcaagaaagcccaaagcttattgatgtgaataaggcattggatatgacatattctgtcaaatgggaaccaacaaacataacatttgctcaccgttttgatgtgtatctggactatcctttctttgaacaccagattcattggttctcaattttcaattctttcatgatggttatctttctcactggactagtgtcaatgatactgatgcggactctaagaaatgattatgcaaagtatgcccgtgatgatgatgatattgaaactctggaacgagatgtcaatgaagaatctggatggaagcttgtacatggtgatgttttccggcctccttgcaatctagttcttctttcagctcttgttggtattggtacacagttggcagcactgattctactagtgattttgttggcaatcattggaatgctgtacattgggcgaggagctattgtcacaacattcattgtttgctatgctcttacttcattcatctctggatatgtcagtggtgcattatactcacgtcatggaggtctactatgtttatgggttcatgttgctggtctttctgatactcatcattgtcaccatatgtgtaacaattgtcggtacatatttcttgctaaatgcggagaactaccactggcaatggacttcattcttctctgctgcttccactgcggtgtatgtttacctctactccatatattattaccacatgaagaccaagatgtctggattcttccagaccagcttctatttcggctacactctaatgttctgcctaggcttaggaacactatgcggtgccgtcgggtatcttggatcgacattgtttgtgaggaggatctacaggaacataaagtgtgactaagtgaagataatatcgccccattttgggtcagcgcagagaaaatgtatggcagagccttatttgattgagcgatcactgattctaaaaccaagaacgcaggtcattttgtgaaatatgatcgttgcttggcgccgagctgaaagccatgtttttctattcttgtcctcgtttctctctgatttcttctggacttggacaggcaacaaattttcatgttgaattagttatatatatagcggtggttgtagttgttgagtagttctgtagtatataccacaattgttatccttggccccaatgatacctcagattgatgggtataaactgtaacatttacattacctgatgtttgacgatgaacacagttccaaataatcatgttcggtactggaggatcgagatttttgagaggcaacatcaaagaaaaaatgtttgatattataccgaaatggaaacttagatcgtaaatgtttc

SEQ ID NO: 50453 - DNA, 2558 bp, Zea Mays
ttccatgcagcagtccccccttcgtgtcgcactcgcacagtcgcactccataaggcaaggaggaaaacagagagacgaccaccgctccgcgccggccggccattccatccggcaatggcctccgccgccggtgctgcgttcgccgccatcaccctcctcatcctcgtacccctcaccgccgcttcggactccgaccacaagtaccaagcagcggagcctgtgacgctctgggtgaacaaggttggtccgtacaacaatccgcaggagacatacaactactacagcctcccattttgccatgcgtcagaaaaccatgtgcataagtggggaggactcggcgaggtccttggtgggaatgagctcattgacagccagatcgacataaagtttggaaagaatgttgataaggccacaatttgttcgctagacctcgatcttgtcaaggctaagcaattgtcggatgcgattgagaactcatattggtttgaatttttcattggttttgttggagaggcagacagaaacaatgataacaaatatttcctattcacgcacaagaatattgtcatcagatacaatggcaatcagattatccatgttaatcttactcaagaaagcccaaagcttattgatgtgaataaggcattggatatgacatattctgtcaaatgggaaccaacaaacataacatttgctcaccgttttgatgtgtatctggactatcctttctttgaacaccaggtaatatagattcattggttctcaattttcaattctttcatgatggttatctttctcactggactagtgtcaatgatactgatgcggactctaagaaatgattatgcaaagtatgcccgtgatgatgatgatattgaaactctggaacgagatgtcaatgaagaatctggatggaagcttgtacatggtgatgttttccggcctccttgcaatctagttcttctttcagctcttgttggtattggtacacagttggcagcactgattctactagtgattttgttggcaatcattggaatgctgtacattgggcgaggagctattgtcacaacattcattgtttgctatgctcttacttcattcatctctggatatgtcagtggtgcattatactcacgtcatggagggaaaaactggatcaaggcaatggccatgacagcatcacttttcccatttatgtgctttggaattggcctggtgcttaacactattgctattttctatggatcgttagctgccataccatttggtacgatggtggttgttttcatcctgtgggccttcatctctttccctcttgcacttttgggaactgttgttggtagaaattggagtggtgctccaaacaatccctgtagggtgaagactattcctcgccctattcctgagaagaaatggtacctcacaccatctgtcattgcgcttatgggaggactgcttccttttggtagtatctttattgagatgtactttgtcttcacatcgttctggaactataaggtatggtagacaggcctgtgttttttttttttaaatctctaagcttcatactaaggctgtcctcatcagtgggtataatggatgtgcaaaacactgttttggtactgtacatggactgtggatagagcggtgcttgaaatagttcctcattggtgaggatagcctaaggaggcattggagttgacattgatgtctcatcctttttgattaaccactgacaggtctactatgtttatgggttcatgttgctggtctttctgatactcatcattgtcaccatatgtgtaacaattgtcggtacatatttcttgctaaatgcggagaactaccactggcaatggacttcattcttctctgctgcttccactgcggtgtatgtttacctctactccatatattattaccacatgaagaccaagatgtctggattcttccagaccagcttctatttcggctacactctaatgttctgcctaggcttaggaacactatgcggtgccgtcgggtatcttggatcgacattgtttgtgaggaggatctacaggaacataaagtgtgactaagtgaagataatatcgccccattttgggtcagcgcagagaaaatgtatggcagagccttatttgattgagcgatcactgattctaaaaccaagaacgcaggtcattttgtgaaatatgatcgttgcttggcgccgagctgaaagccatgtttttctattcttgtcctcgtttctctctgatttcttctggacttggacaggcaacaaattttcatgttgaattagttatatatatagcggtggttgtagttgttgagtagttctgtagtatataccacaattgttatccttggccccaatgatacctcagattgatgggtataaactgtaacatttacattacctgatgtttgacgatgaacacagttccaaataatcatgttcggtactggaggatcgagatttttgagaggcaacatcaaagaaaaaatgtttgatattataccgaaatggaaacttagatcgtaaatgtttc

SEQ ID NO: 50454 - DNA, 2235 bp, Zea Mays
ttccatgcagcagtccccccttcgtgtcgcactcgcacagtcgcactccataaggcaaggaggaaaacagagagacgaccaccgctccgcgccggccggccattccatccggcaatggcctccgccgccggtgctgcgttcgccgccatcaccctcctcatcctcgtacccctcaccgccgcttcggactccgaccacaagtaccaagcagcggagcctgtgacgctctgggtgaacaaggttggtccgtacaacaatccgcaggagacatacaactactacagcctcccattttgccatgcgtcagaaaaccatgtgcataagtggggaggactcggcgaggtccttggtgggaatgagctcattgacagccagatcgacataaagtttggaaagaatgttgataaggccacaatttgttcgctagacctcgatcttgtcaaggctaagcaattgtcggatgcgattgagaactcatattggtttgaatttttcattggttttgttggagaggcagacagaaacaatgataacaaatatttcctattcacgcacaagaatattgtcatcagatacaatggcaatcagattatccatgttaatcttactcaagaaagcccaaagcttattgatgtgaataaggcattggatatgacatattctgtcaaatgggaaccaacaaacataacatttgctcaccgttttgatgtgtatctggactatcctttctttgaacaccagattcattggttctcaattttcaattctttcatgatggttatctttctcactggactagtgtcaatgatactgatgcggactctaagaaatgattatgcaaagtatgcccgtgatgatgatgatattgaaactctggaacgagatgtcaatgaagaatctggatggaagcttgtacatggtgatgttttccggcctccttgcaatctagttcttctttcagctcttgttggtattggtacacagttggcagcactgattctactagtgattttgttggcaatcattggaatgctgtacattgggcgaggagctattgtcacaacattcattgtttgctatgctcttacttcattcatctctggatatgtcagtggtgcattatactcacgtcatggaggaggagcagggaaaaactggatcaaggcaatggccatgacagcatcacttttcccatttatgtgctttggaattggcctggtgcttaacactattgctattttctatggatcgttagctgccataccatttggtacgatggtggttgttttcatcctgtgggccttcatctctttccctcttgcacttttgggaactgttgttggtagaaattggagtggtgctccaaacaatccctgtagggtgaagactattcctcgccctattcctgagaagaaatggtacctcacaccatctgtcattgcgcttatgggaggactgcttccttttggtagtatctttattgagatgtactttgtcttcacatcgttctggaactataagaactaccactggcaatggacttcattcttctctgctgcttccactgcggtgtatgtttacctctactccatatattattaccacatgaagaccaagatgtctggattcttccagaccagcttctatttcggctacactctaatgttctgcctaggcttaggaacactatgcggtgccgtcgggtatcttggatcgacattgtttgtgaggaggatctacaggaacataaagtgtgactaagtgaagataatatcgccccattttgggtcagcgcagagaaaatgtatggcagagccttatttgattgagcgatcactgattctaaaaccaagaacgcaggtcattttgtgaaatatgatcgttgcttggcgccgagctgaaagccatgtttttctattcttgtcctcgtttctctctgatttcttctggacttggacaggcaacaaattttcatgttgaattagttatatatatagcggtggttgtagttgttgagtagttctgtagtatataccacaattgttatccttggccccaatgatacctcagattgatgggtataaactgtaacatttacattacctgatgtttgacgatgaacacagttccaaataatcatgttcggtactggaggatcgagatttttgagaggcaacatcaaagaaaaaatgtttgatattataccgaaatggaaacttagatcgtaaatgtttc

SEQ ID NO: 50455 - DNA, 2871 bp, Zea Mays
caactctctgtaatgatatattcagtagatgctctatccgattctgtatctcattctttatttcaaaattctctacaaacagcacagaagataatctaaaaactcgacctgcaacacaggtcgagaaaacaactgtcctagcttctgtacttaatttgcatgaaccagcgcttcccatggaaacaactgtcctgtcaaggaagcacttcagcttgtacactgggatcaagtcgatctcctctagtatttggcacaaatcttggcacgaccagcagcagattgtccacccgtttctcatgcccaccccccgccgccacctctgcttcctccgcgcactcgttgggctccgctccaccggcgctgctggcttttcctcggctcctacacgcgggtgcccactccacgccgcgctagcgcgccgcggcgcccccgcggccgccgcgctcgctctcttttccagcatccgtgccgcgacattgccgaccccctacaccttctccctcctgctcgcctccctcgccgcgtcctcctcccgctcccgcaccccctccgctgccgtctgcgatcgactcgctgcggcggggcttgcgcatgggcaggcgctcaagcacggcgcgctcgcacaccccgtcgtcaccaactgcctcctcaagctctactgcgcgctcggcatgctctccgacgcgcgcagggtgtttgatactagcggtgccacctccctggacgctttctcctggaacacgatggtgtcagggtacggcaagtgcggcgacctagaggccgcgcgggaggtattcgtcagaatgcccgagaggggcctggtttcctggagcgcaatgatcgacgcttgcatccgtgctggggagttcagtgaggcactgaggatgttcgaccagatgatgggaaatgggttcaggccagacgccgtggtgctatcgagcgtgctcaaggcttgtgcgcatctgggtgctcttgagagggggcggtgggttcataggtttctcaaagcagaggggcttgggaggagtccggataatgtcatgcttgagacggcgcttgtcgatatgtattgcaagtgcgggtgcatggatgaggcatggtgggtctttgatggagtccagagccaagatgtggtgttgtggaatgcaatgattggtgggcttgcgatgaatgggcatggaaaacgcgcacttgagttgttcagaaggatgcttgatatggggtttgtgccaaatgagtcaacgtttgttgttgttctttgtgcgtgcacccacacaggtcgtgtggacgaaggtaaggagattttcaggtccatgtgtgaccatggcatcgagccacggagggagcactacgggtgcttggctgatctccttggacgtgcaggactcctggaagaagccgaggctgtgttgctggacatgccgatggagccacatgcatcacagtggggggctctaatgtcatcatgcttgatgcacaacaatgttggtgtgggtgaacgtgtaggaaagaaacttattgagctagagccagatgatggtggacgttatgttgttctgttcaatctgtatgcagttaatggtttatgggaagatgcaaaagctcttcgtaagatgatggaagagaggggagccaagaaggagacaggtttgagctttatagagtggaatggtttagtccatgagttcagatcaggtgatacaagacacccccaaacaaggcagatctatgcattactggaagatatggagcagagattacaactgattggctatgtcaaggataccagccaagtgctcatggacatggacgacgaggaagataagggaaataccttgtcctaccacagtgagaggcttgcattagcatttggtattctaaacactccccgtcacatgcctattcgaattgtcaagaatcttcgagtgtgccgtgactgccatgtctatgccaaacttgtgtccaagctctaccaacgtgagatcattatgcgtgaccgccatcgcttccacttgttccgtggtggggtttgctcctgcaatgacttctggtgacaatgttactgactattcggtatgggcgtatggcatagttatggacatcattctaaaaacagcaactagaaaggatgatcatgacatgactattatgtatttggaggatgagatagaatgtggtcaataccacacttagaaaagttgccccacaacatcaaatataatccttggcatcgaattcaccaaaataatttgatggtcagcgccggccgtaatgcgaccaggaaagggatgacttcaattgacattcagctactagcctactatgctctgtttatgttctgaagtacacaaatgtgctgtatggactatggagtgggagagtcgcatataggcatatgagcagtatgagggaactggatttctgtcctcatgtacactaggcaaatggctaccttgttcttcaaatagatgttgaagaagatattacagcttcagagaatcagagctctcttttttggtgcttgtaatgttacaaagaagccccgacgatgatgtgaatcagagtagcacttcgtgcattctaatctgtgtactgtggttcgcgaaactaagattgaatgtgtcgagtgtttctgtgtgggcggttgtttgcctcttctgtactctgttgttcttcttctctgtttaatgaaataattcacagctctcctgcatgttatgttcgatcgagagagagagaaagagaaaaaaaatgtttgcacatagctgtgttgtgctatcatcttccatatttctgcaattctgctcctaactgggaatggttttccctgcggtgaatatgaattggccatttgggtgtgcgtggaaatat

SEQ ID NO: 50456 - DNA, 2498 bp, Zea Mays
ccatggaaacaactgtcctgtcaaggaagcacttcagcttgtacactgggatcaagtcgatctcctctagtatttggcacaaatcttggcacgaccagcagcagattgtccacccgtttctcatgcccaccccccgccgccacctctgcttcctccgcgcactcgttgggctccgctccaccggcgctgctggcttttcctcggctcctacacgcgggtgcccactccacgccgcgctagcgcgccgcggcgcccccgcggccgccgcgctcgctctcttttccagcatccgtgccgcgacattgccgaccccctacaccttctccctcctgctcgcctccctcgccgcgtcctcctcccgctcccgcaccccctccgctgccgtctgcgatcgactcgctgcggcggggcttgcgcatgggcaggcgctcaagcacggcgcgctcgcacaccccgtcgtcaccaactgcctcctcaagctctactgcgcgctcggcatgctctccgacgcgcgcagggtgtttgatactagcggtgccacctccctggacgctttctcctggaacacgatggtgtcagggtacggcaagtgcggcgacctagaggccgcgcgggaggtattcgtcagaatgcccgagaggggcctggtttcctggagcgcaatgatcgacgcttgcatccgtgctggggagttcagtgaggcactgaggatgttcgaccagatgatgggaaatgggttcaggccagacgccgtggtgctatcgagcgtgctcaaggcttgtgcgcatctgggtgctcttgagagggggcggtgggttcataggtttctcaaagcagaggggcttgggaggagtccggataatgtcatgcttgagacggcgcttgtcgatatgtattgcaagtgcgggtgcatggatgaggcatggtgggtctttgatggagtccagagccaagatgtggtgttgtggaatgcaatgattggtgggcttgcgatgaatgggcatggaaaacgcgcacttgagttgttcagaaggatgcttgatatggggtttgtgccaaatgagtcaacgtttgttgttgttctttgtgcgtgcacccacacaggtcgtgtggacgaaggtaaggagattttcaggtccatgtgtgaccatggcatcgagccacggagggagcactacgggtgcttggctgatctccttggacgtgcaggactcctggaagaagccgaggctgtgttgctggacatgccgatggagccacatgcatcacagtggggggctctaatgtcatcatgcttgatgcacaacaatgttggtgtgggtgaacgtgtaggaaagaaacttattgagctagagccagatgatggtggacgttatgttgttctgttcaatctgtatgcagttaatggtttatgggaagatgcaaaagctcttcgtaagatgatggaagagaggggagccaagaaggagacaggtttgagctttatagagtggaatggtttagtccatgagttcagatcaggtgatacaagacacccccaaacaaggcagatctatgcattactggaagatatggagcagagattacaactgattggctatgtcaaggataccagccaagtgctcatggacatggacgacgaggaagataagggaaataccttgtcctaccacagtgagaggcttgcattagcatttggtattctaaacactccccgtcacatgcctattcgaattgtcaagaatcttcgagtgtgccgtgactgccatgtctatgccaaacttgtgtccaagctctaccaacgtgagatcattatgcgtgaccgccatcgcttccacttgttccgtggtggggtttgctcctgcaatgacttctggtgacaatgttactgactattcggtatgggcgtatggcatagttatggacatcattctaaaaacagcaactagaaaggatgatcatgacatgactattatgtatttggaggatgagatagaatgtgggagagtcgcatataggcatatgagcagtatgagggaactggatttctgtcctcatgtacactaggcaaatggctaccttgttcttcaaatagatgttgaagaagatattacagcttcagagaatcagagctctcttttttggtgcttgtaatgttacaaagaagccccgacgatgatgtgaatcagagtagcacttcgtgcattctaatctgtgtactgtggttcgcgaaactaagattgaatgtgtcgagtgtttctgtgtgggcggttgtttgcctcttctgtactctgttgttcttcttctctgtttaatgaaataattcacagctctcctgcatgttatgttcgatcgagagagagagaaagagaaaaaaaatgtttgcacatagctgtgttgtgctatcatcttccatatttctgcaattctgctcctaactgggaatggttttccctgcggtgaatatgaattggccatttgggtgtgcgtggaaatat

SEQ ID NO: 50457 - DNA, 2613 bp, Zea Mays
ccatggaaacaactgtcctgtcaaggaagcacttcagcttgtacactgggatcaagtcgatctcctctagtatttggcacaaatcttggcacgaccagcagcagattgtccacccgtttctcatgcccaccccccgccgccacctctgcttcctccgcgcactcgttgggctccgctccaccggcgctgctggcttttcctcggctcctacacgcgggtgcccactccacgccgcgctagcgcgccgcggcgcccccgcggccgccgcgctcgctctcttttccagcatccgtgccgcgacattgccgaccccctacaccttctccctcctgctcgcctccctcgccgcgtcctcctcccgctcccgcaccccctccgctgccgtctgcgatcgactcgctgcggcggggcttgcgcatgggcaggcgctcaagcacggcgcgctcgcacaccccgtcgtcaccaactgcctcctcaagctctactgcgcgctcggcatgctctccgacgcgcgcagggtgtttgatactagcggtgccacctccctggacgctttctcctggaacacgatggtgtcagggtacggcaagtgcggcgacctagaggccgcgcgggaggtattcgtcagaatgcccgagaggggcctggtttcctggagcgcaatgatcgacgcttgcatccgtgctggggagttcagtgaggcactgaggatgttcgaccagatgatgggaaatgggttcaggccagacgccgtggtgctatcgagcgtgctcaaggcttgtgcgcatctgggtgctcttgagagggggcggtgggttcataggtttctcaaagcagaggggcttgggaggagtccggataatgtcatgcttgagacggcgcttgtcgatatgtattgcaagtgcgggtgcatggatgaggcatggtgggtctttgatggagtccagagccaagatgtggtgttgtggaatgcaatgattggtgggcttgcgatgaatgggcatggaaaacgcgcacttgagttgttcagaaggatgcttgatatggggtttgtgccaaatgagtcaacgtttgttgttgttctttgtgcgtgcacccacacaggtcgtgtggacgaaggtaaggagattttcaggtccatgtgtgaccatggcatcgagccacggagggagcactacgggtgcttggctgatctccttggacgtgcaggactcctggaagaagccgaggctgtgttgctggacatgccgatggagccacatgcatcacagtggggggctctaatgtcatcatgcttgatgcacaacaatgttggtgtgggtgaacgtgtaggaaagaaacttattgagctagagccagatgatggtggacgttatgttgttctgttcaatctgtatgcagttaatggtttatgggaagatgcaaaagctcttcgtaagatgatggaagagaggggagccaagaaggagacaggtttgagctttatagagtggaatggtttagtccatgagttcagatcaggtgatacaagacacccccaaacaaggcagatctatgcattactggaagatatggagcagagattacaactgattggctatgtcaaggataccagccaagtgctcatggacatggacgacgaggaagataagggaaataccttgtcctaccacagtgagaggcttgcattagcatttggtattctaaacactccccgtcacatgcctattcgaattgtcaagaatcttcgagtgtgccgtgactgccatgtctatgccaaacttgtgtccaagctctaccaacgtgagatcattatgcgtgaccgccatcgcttccacttgttccgtggtggggtttgctcctgcaatgacttctggtgacaatgttactgactattcggtatgggcgtatggcatagttatggacatcattctaaaaacagcaactagaaaggatgatcatgacatgactattatgtatttggaggatgagatagaatgtgcgccggccgtaatgcgaccaggaaagggatgacttcaattgacattcagctactagcctactatgctctgtttatgttctgaagtacacaaatgtgctgtatggactatggagtgggagagtcgcatataggcatatgagcagtatgagggaactggatttctgtcctcatgtacactaggcaaatggctaccttgttcttcaaatagatgttgaagaagatattacagcttcagagaatcagagctctcttttttggtgcttgtaatgttacaaagaagccccgacgatgatgtgaatcagagtagcacttcgtgcattctaatctgtgtactgtggttcgcgaaactaagattgaatgtgtcgagtgtttctgtgtgggcggttgtttgcctcttctgtactctgttgttcttcttctctgtttaatgaaataattcacagctctcctgcatgttatgttcgatcgagagagagagaaagagaaaaaaaatgtttgcacatagctgtgttgtgctatcatcttccatatttctgcaattctgctcctaactgggaatggttttccctgcggtgaatatgaattggccatttgggtgtgcgtggaaatat

SEQ ID NO: 50458 - DNA, 1276 bp, Zea Mays
agtaggtttgtatggggtttgcacatttggtttgcattctatatgtctctgtttgtagcgtttgcttcagtgctaaggtgggactggaggcggggcggtggcgaatgcaacgggagattgagaagagagaggtgaaaataaataatagaatatctgataattagtatagggtagagatgtaagttaaatatgattgtggaagtttgtgagatagagtagaaaatctcgctgattatgatagaatattcggtaaagtgtgatagcctaacatcattctcacgtcttttagcacttaattcgtacaccattgaatatttaacttcgtaggtgcgattataattttgattaaagggatgtcaccagtgtgtcccgttctgttcttctgctgtgttccgtaacttccgttattcctattcttttccaacgcgactacacgtctacgcctctcctctgctttcccctctggcccttccgatggactactcgagtggcgcgacggagtcggggagggtgcgagcacgttggtgctactgccgctgcttccgccgttggtgccgctgcttctgcggctgctactgctgcaactgcttccccgacgagccccacgacgaccgccgcgccgcagcgtacgcttaggctcctggactctccactcgcagtcgcagcgccggccgtaatgcgaccaggaaagggatgacttcaattgacattcagctactagcctactatgctctgtttatgttctgaagtacacaaatgtgctgtatggactatggagtgggagagtcgcatataggcatatgagcagtatgagggaactggatttctgtcctcatgtacactaggcaaatggctaccttgttcttcaaatagatgttgaagaagatattacagcttcagagaatcagagctctcttttttggtgcttgtaatgttacaaagaagccccgacgatgatgtgaatcagagtagcacttcgtgcattctaatctgtgtactgtggttcgcgaaactaagattgaatgtgtcgagtgtttctgtgtgggcggttgtttgcctcttctgtactctgttgttcttcttctctgtttaatgaaataattcacagctctcctgcatgttatgttcgatcgagagagagagaaagagaaaaaaaatgtttgcacatagctgtgttgtgctatcatcttccatatttctgcaattctgctcctaactgggaatggttttccctgcggtgaatatgaattggccatttgggtgtgcgtggaaatat

SEQ ID NO: 50459 - DNA, 627 bp, Zea Mays
agtaggtttgtatggggtttgcacatttggtttgcattctatatgtctctgtttgtagcgtttgcttcagtgctaaggtgggactggaggcggggcggtggcgaatgcaacgggagattgagaagagagagggagagtcgcatataggcatatgagcagtatgagggaactggatttctgtcctcatgtacactaggcaaatggctaccttgttcttcaaatagatgttgaagaagatattacagcttcagagaatcagagctctcttttttggtgcttgtaatgttacaaagaagccccgacgatgatgtgaatcagagtagcacttcgtgcattctaatctgtgtactgtggttcgcgaaactaagattgaatgtgtcgagtgtttctgtgtgggcggttgtttgcctcttctgtactctgttgttcttcttctctgtttaatgaaataattcacagctctcctgcatgttatgttcgatcgagagagagagaaagagaaaaaaaatgtttgcacatagctgtgttgtgctatcatcttccatatttctgcaattctgctcctaactgggaatggttttccctgcggtgaatatgaattggccatttgggtgtgcgtggaaatat

SEQ ID NO: 50460 - DNA, 443 bp, Zea Mays
tttgcaaaaccaatcccattcatccatcaggtatatcactccaattagatcagtggaagatactgaaggacaacatcaaagccataaatgaggcaatcgaggaaaatacatgatgggagccgccaagcagtcacgtgacgggcgagcttttgcttcttctctgtttgaggcctgatgtacggaagtagtttttgttgcccatatgctgccgtgttgcttttgtccatttgaccacctgctgttgtaggtggccgcatggccgaaaggtttggtttctgccccgtgctactagtaaacttaaacgtcggacggatgacgtaacttctcactattatcttgtagccaaaaacagcttgttaggattgcagaactaagatttagtgtaaaaatgatccggtttctttcttgctttattatgtgatcatcatgagagtattttgcca

SEQ ID NO: 50461 - DNA, 3808 bp, Zea Mays
ctctctgtcctacccttcccctatccgcctccgccgccctcgttcctcaacgcggcgacgaccgccgcctaccgcacgtcctagcccggcgccgcccctgactcccgcgtcccgcccgtcgccggagggaaacgggggccggtggcgcgggacccgacgactgcaacgcagcaggcattcgccgccacgcgggtcaccgaggacttgtaaggacaatggagacaagacgttcgctgactgttctattccacaagagaaatcaaacgctgagattaatgcagaactcgatctttcagatgcttcagctgatgaagcagacaatggtggatctaactccaaagcttgcaaaccaccgtcatggactcttgttaggtcaaacttgtttctgcatcgaaaccgcaggacacaatccattgatgagagcatggtgtgcaactgcaagccaccccaagatggccgaatgggttgtagagatggatgtttgaacaggatgctcaacattgaatgtgtcaagcggacatgtccatgtggagaacaatgctctaatcagaagttccagcggcgtagctatgcaaaactgagatggttccattctggcaagaaaggctatggattgcagttgcaagaagacgttactgaaggaagatttcttattgaatatgttggagaggtccttgacataacatcctatgaatcccgccaaagatattatgcttgcaaaggccagaaacatttctatttcatggctctaaatggtggtgaggtaattgatgcttgcactaagggaaacttgggccgattcatcaatcatagctgcagccctaactgttgcacagagaagtggatggtcaatggggaagtctgcattggaatatttgctttgaggagcatcaagaagggtgaagaattgacatttgattacaattatgttcgtgtatctggtgctgctcctcaaaaatgcttctgtggtactgccaaatgtcggggttacctgggtggagacatatcaattgtcgataccatcatcacccaagatgatacagaagcagatcattttgaacaaatggttgttgacaaagactccaaggagttgctgggtccaaatgagtctgattctgatggtagccacccaaatatttcagaacctgaattttctatccaaggggaagatttacatgattgctcagctgcaaaagtagaattagatctgcttgaaggaactagaggaacctcattagaaactagtgagcctgaacatcccttggaagcatggagcccaccagaagatgaagatgtcattcgtacgcctgtgcatgtgtcacggacatttgaaagttctctgcagaagttctcagtacatgacactcagtcatcagatcttttgcgtaagactgcaaattcaatggaaggatcaaaggctccaaatataacaaacggatcgacacttggttctgatttcaggggcaatctggtgcctactttcagacctgctgagagaaaaaacttaaaacaacataaaaatcagaaacgacaaccgtcttctccaattgacaatgaacatattttgggaggtactattttgcctcatgctttcctcttcccactttgaaatgtgatggtcttagtggtctctccttggtatttgtagttgaagggacactgaacagcctactggatgtggacggtggtatcagcaagcgaaaggatgctacaaagggatacttgaagctgctcgttgtgactgcagcagaagatggtagtgctgggggcacatccaaaagtctgagggatctttcgttgattcttgaggcacttctaaaaacaaaatcacattcggttctgttggatatcatcaataagaacggactgcaaatgcttcataatatattgaagcagagtagaggcatcttccaccggagacctattatacggaagcttctgaaggtacttgaatttctagctcagaaaggaattttgacatctgaacatataaatggaggtcctcggtttgctggagtcgaaagcttcagagacttgatgctgagtttaacaagacattcagacattcaggttcaacagattgctcggagcttccgtgatagatggatcccccctaataatgcaaggagtgaaccaacagaatatccacatacatcaacatttgtgcatgatatccagggaaccaatacagtctggagttctgctaggaggaaacgcaagagccgctgggactatcaacctgacgagcattataagatgccgggactaaaaatccaaaaagtttgttctggacatggtgaatttgatgttcagtttggctttatgaaaaataagttaaagaggaatcagggcgcaaacaactatcataatgatgttcttggcatggggagttcaacagagggtgaagatgatgaagcccctcctcctgggtttgagtcccagctggaccgtcggcctgcacaactttcaataggcagcgaggttgctccaggactttgcatggagaggtaccaatctagcttgagtatttcatatggggttcctgtaactcttgttcagcactttggaacccctgaatctgaaggaggccaatgccataaaaaatggaaagttgcacctggcgtgccttttagtccttttccaccattgcctccctatccgcgagggaatccttgcccctccacttcgtcttcccagatgtttcagcatgatggaataccccaagttaaacataacaattctggacaacggggaaggatcatgggccgagatgggagagtgcataggtcatggagaaatgagtcaagaacaaaatggcaataccatcatcaaggaaggagattttcgagcactcatcatagatttgaaagatccgaacctgcaagacctcaatagtgattaagggttcagggcagtgattggtaccaaccttgcagtttttgaacctcaagtagtggtggtatacatggtaattcctgcttgtcagaagtgtaacagaaactgtgtcaggctttaacgatgtttaaagagtgtaaatttcagttcattgggggtagagcgtatgctgcacataggccattttccagtgcagtgttactaattaatttggtcattgtttttctctctcccaatgagtatttttcataggaacattttttatttgatttaatcctttttacaggtgataaggataaccaagtttagcgacaatcctctgtagtctcgtttggttctttgccttttttccccttttgctttctcagtaaagcttctattttggcagtgtttatgtgtttgtttccttagctgcagcacgttattttcactccaataggtaagtcggattttttgggatcttgcacatggccttttgaatctgttcaatttcttggagtgctcctaatttttagtcctattgctttttacatttcgatgcctcctgaacttaatcttatgatataactgaagttgattcctaatcattgccctcttctactaaacgggcacacatatgaactagcactttgctacaggaattcccaggtaagttgtcctgaatccaaatctgatcacatttcccctgaatgtctcattatataagttgcatcatgcaatactggaacacgatttgctagcgttacgtggtgatatctgaccaaatctgctaatgtctcatgttttcttgacggaatttgaaaaagttatgaccttagcgtcattttgtgacatctgcccagatttgctcatgtctcgtgtttttttgttggaatttgaaacagctacttcaaagaaatcaggcagtttggta

SEQ ID NO: 50462 - DNA, 5803 bp, Zea Mays
ctctctgtcctacccttcccctatccgcctccgccgccctcgttcctcaacgcggcgacgaccgccgcctaccgcacgtcctagcccggcgccgcccctgactcccgcgtcccgcccgtcgccggagggaaacgggggccggtggcgcgggacccgacgactgcaacgcagcaggcattcgccgccacgcgggtcaccgagggttttgtaagcccggcttcggcggcgtgatcgggtgcggaggctgcggtgagggcattggatgttctagacccgtacgggaccctgctgacctcctgtcgcaatggaggagtctggcgcggccgtgcgcggcgaggaggatcgtgttgctgacgcccagcgcttggggccagcggaggtcgctctgtctactgccaccgcccctgaaccggtccatggattgggggatgccgcagtagaggtatgtcatgctccggaagctagattgtccacagagattggtgacgaagggagcaatttcgcgtttggattggtgactcctgtcgattgtgcttcttcctcccatcgaggaagaaggtttcagctaggacaggagaagggttcgagttcagagcagagggtcatggacatggatgaacggaaggaaggtagtttggctcctgcggcgtctgctgaaaatgctgctttgcagacctgtcatgaggtcaatgacaggctgtcgaataagacgataccttatcctccttgcagtgaagtggtatgttccaaggatgctggatgcctttatggcatgtttgataaaacggcagaagggagccagtttgagcatgtgggtttgacgggtgacggaggtgattgtcgtgccgtggtggaggtagtaaaggaaaccgtacaagatttactggctgctcgtaacggagcaaaatgtggttatgaaggtttgtcagtttcaatggaccatggcagcgagcaagagccacgtggcataggatctatcacgtttgctaacgatgagctgcagccaaatggtttggtatcggatattgaagctgtttcgaggccagctcatatagattcagttccttccattccagggagcattgatctttctttagatctaaaggcaggtcagtttggtggaatgtctggtgattcagggacgtgccatggggctgacagagcgatgcggaatgatgattttacccatgacagtggggacttgtcagacccagggaagcatcatttggagaaattgccatctggtgctgagggcctggcattaataactgatgctgttggcggatctgaccatttggaccaagggctcaatgcctgttatgctgctgctaatagctctgctaattttataagtaatgctaatgatggagaattacgaaacgaaaagctgacagcattgcacgtattcatacgtaggaatccaaaaagagctgtttcttcaagaagtcttaattccgagaagcaagatcaaataggcaaagggaacagtggctcacgcaaacctaaaaaagttgatattgtgagctcattacaccaaagcaccgtgaatatgttcccaaacaaaatcactaagggaagaagtggcatgaacaggccaccaaaatcctttacttggggcaatctagaacggctattagattgctgtccaagctacgggccatctacttctaattctcgtccaatttgcttggacaaaggaggatcatataacagatccgatcagagaagtcagccaagtatttggaaaagtcgaagttctagatcttcaagaagcaaacgctcttctttctctgaaatagggcatgcagctaatgaactggatgggcaaccaaccttagcaattgtggctgatatggggcatgctgctagtgaattgaatgagcaaccaaccttctcaattgcggctaatactgatatttgtttggaaagccacagaggaaacattccaaatttgtcttctgataaattgatcaatattcttgatagtactaggaaaactgcagagtctattgatagtcatcgtacagaatcaaaatgtatccagagccaaagagaaagagccttggtgagtagtggtaaagaaacatgcgctgcatacgtccacagagagtgtgctaaactgtcaacttctgaacttatggacaatgccaatggcaatgtcatgctacatgttgggttttcgccggattctgttttggagcttgcttctgttacatgtgaaggtaatgcttctgcaagccatgatgttatgttgcatgaaaacccaaccgatgctggtgcattgaatgatggtgatccatctgttttatctacttctgactatgaaaaagaacatgcttcatcattgatgaacttggagcagcatgctagaagtactttgcacgaggacaccagaaaggaagaggttggtccatctcatggcatagtagaaaatgatattgaaggaaaggcgcgggctttacagaagtcaaattctgtgagaaaaattggtattgtcagaaaggcaggttgcaaaaagaaagatggatctaaaggtgtaaaaaagaatgttataggattcagcaaagcttctccatgtgaatcttcaaaacttaggccctctaatgatccaatttcacctgggcctccagatgttgggtcttgctttgaagccttaacttcaggctcacaggatcttggtatgcatgaacatggtggcatacagagtcactctgtaatgcatggtgacaaagggcatgcatttgacagtatgaaatcaccaaggcacaagataaaggatactaatgcaagaaagaaaggtaaggtgcgagacccacataagaaagaaaaaggtaaaaagaaaaatacatcagaagagacttcccttgatcatggacttttacagttaccttctactgaacgtgcagcatctgatatgaatgaacagagtgatcttgatcctatcactgaacttccattcaagaactccagtgccatatctactaatttacctggaaatgttgcatgcaaaatggatggggcatctgtaccgccactgccaccacgtgctgcatgggtgtgttgtgatgattgccaaaagtggcggacttgtaaggacaatggagacaagacgttcgctgactgttctattccacaagagaaatcaaacgctgagattaatgcagaactcgatctttcagatgcttcagctgatgaagcagacaatggtggatctaactccaaagcttgcaaaccaccgtcatggactcttgttaggtcaaacttgtttctgcatcgaaaccgcaggacacaatccattgatgagagcatggtgtgcaactgcaagccaccccaagatggccgaatgggttgtagagatggatgtttgaacaggatgctcaacattgaatgtgtcaagcggacatgtccatgtggagaacaatgctctaatcagaagttccagcggcgtagctatgcaaaactgagatggttccattctggcaagaaaggctatggattgcagttgcaagaagacgttactgaaggaagatttcttattgaatatgttggagaggtccttgacataacatcctatgaatcccgccaaagatattatgcttgcaaaggccagaaacatttctatttcatggctctaaatggtggtgaggtaattgatgcttgcactaagggaaacttgggccgattcatcaatcatagctgcagccctaactgttgcacagagaagtggatggtcaatggggaagtctgcattggaatatttgctttgaggagcatcaagaagggtgaagaattgacatttgattacaattatgttcgtgtatctggtgctgctcctcaaaaatgcttctgtggtactgccaaatgtcggggttacctgggtggagacatatcaattgtcgataccatcatcacccaagatgatacagaagcagatcattttgaacaaatggttgttgacaaagactccaaggagttgctgggtccaaatgagtctgattctgatggtagccacccaaatatttcagaacctgaattttctatccaaggggaagatttacatgattgctcagctgcaaaagtagaattagatctgcttgaaggaactagaggaacctcattagaaactagtgagcctgaacatcccttggaagcatggagcccaccagaagatgaagatgtcattcgtacgcctgtgcatgtgtcacggacatttgaaagttctctgcagaagttctcagtacatgacactcagtcatcagatcttttgcgtaagactgcaaattcaatggaaggatcaaaggctccaaatataacaaacggatcgacacttggttctgatttcaggggcaatctggtgcctactttcagacctgctgagagaaaaaacttaaaacaacataaaaatcagaaacgacaaccgtcttctccaattgacaatgaacatattttgggagttgaagggacactgaacagcctactggatgtggacggtggtatcagcaagcgaaaggatgctacaaagggatacttgaagctgctcgttgtgactgcagcagaagatggtagtgctgggggcacatccaaaagtctgagggatctttcgttgattcttgaggcacttctaaaaacaaaatcacattcggttctgttggatatcatcaataagaacggactgcaaatgcttcataatatattgaagcagagtagaggcatcttccaccggagacctattatacggaagcttctgaaggtacttgaatttctagctcagaaaggaattttgacatctgaacatataaatggaggtcctcggtttgctggagtcgaaagcttcagagacttgatgctgagtttaacaagacattcagacattcaggttcaacagattgctcggagcttccgtgatagatggatcccccctaataatgcaaggagtgaaccaacagaatatccacatacatcaacatttgtgcatgatatccagggaaccaatacagtctggagttctgctaggaggaaacgcaagagccgctgggactatcaacctgacgagcattataagatgccgggactaaaaatccaaaaagtttgttctggacatggtgaatttgatgttcagtttggctttatgaaaaataagttaaagaggaatcagggcgcaaacaactatcataatgatgttcttggcatggggagttcaacagagggtgaagatgatgaagcccctcctcctgggtttgagtcccagctggaccgtcggcctgcacaactttcaataggcagcgaggttgctccaggactttgcatggagaggtaccaatctagcttgagtatttcatatggggttcctgtaactcttgttcagcactttggaacccctgaatctgaaggaggccaatgccataaaaaatggaaagttgcacctggcgtgccttttagtccttttccaccattgcctccctatccgcgagggaatccttgcccctccacttcgtcttcccagatgtttcagcatgatggaataccccaagttaaacataacaattctggacaacggggaaggatcatgggccgagatgggagagtgcataggtcatggagaaatgagtcaagaacaaaatggcaataccatcatcaaggaaggagattttcgagcactcatcatagatttgaaagatccgaacctgcaagacctcaatagtgattaagggttcagggcagtgattggtaccaaccttgcagtttttgaacctcaagtagtggtggtatacatgctacttcaaagaaatcaggcagtttggta

SEQ ID NO: 50463 - DNA, 3972 bp, Zea Mays
ctctctgtcctacccttcccctatccgcctccgccgccctcgttcctcaacgcggcgacgaccgccgcctaccgcacgtcctagcccggcgccgcccctgactcccgcgtcccgcccgtcgccggagggaaacgggggccggtggcgcgggacccgacgactgcaacgcagcaggcattcgccgccacgcgggtcaccgagggttttgtaagcccggcttcggcggcgtgatcgggtgcggaggctgcggtgagggcattggatgttctagacccgtacgggaccctgctgacctcctgtcgcaatggaggagtctggcgcggccgtgcgcggcgaggaggatcgtgttgctgacgcccagcgcttggggccagcggaggtcgctctgtctactgccaccgcccctgaaccggtccatggattgggggatgccgcagtagaggacttgtaaggacaatggagacaagacgttcgctgactgttctattccacaagagaaatcaaacgctgagattaatgcagaactcgatctttcagatgcttcagctgatgaagcagacaatggtggatctaactccaaagcttgcaaaccaccgtcatggactcttgttaggtcaaacttgtttctgcatcgaaaccgcaggacacaatccattgatgagagcatggtgtgcaactgcaagccaccccaagatggccgaatgggttgtagagatggatgtttgaacaggatgctcaacattgaatgtgtcaagcggacatgtccatgtggagaacaatgctctaatcagaagttccagcggcgtagctatgcaaaactgagatggttccattctggcaagaaaggctatggattgcagttgcaagaagacgttactgaaggaagatttcttattgaatatgttggagaggtccttgacataacatcctatgaatcccgccaaagatattatgcttgcaaaggccagaaacatttctatttcatggctctaaatggtggtgaggtaattgatgcttgcactaagggaaacttgggccgattcatcaatcatagctgcagccctaactgttgcacagagaagtggatggtcaatggggaagtctgcattggaatatttgctttgaggagcatcaagaagggtgaagaattgacatttgattacaattatgttcgtgtatctggtgctgctcctcaaaaatgcttctgtggtactgccaaatgtcggggttacctgggtggagacatatcaattgtcgataccatcatcacccaagatgatacagaagcagatcattttgaacaaatggttgttgacaaagactccaaggagttgctgggtccaaatgagtctgattctgatggtagccacccaaatatttcagaacctgaattttctatccaaggggaagatttacatgattgctcagctgcaaaagtagaattagatctgcttgaaggaactagaggaacctcattagaaactagtgagcctgaacatcccttggaagcatggagcccaccagaagatgaagatgtcattcgtacgcctgtgcatgtgtcacggacatttgaaagttctctgcagaagttctcagtacatgacactcagtcatcagatcttttgcgtaagactgcaaattcaatggaaggatcaaaggctccaaatataacaaacggatcgacacttggttctgatttcaggggcaatctggtgcctactttcagacctgctgagagaaaaaacttaaaacaacataaaaatcagaaacgacaaccgtcttctccaattgacaatgaacatattttgggagttgaagggacactgaacagcctactggatgtggacggtggtatcagcaagcgaaaggatgctacaaagggatacttgaagctgctcgttgtgactgcagcagaagatggtagtgctgggggcacatccaaaagtctgagggatctttcgttgattcttgaggcacttctaaaaacaaaatcacattcggttctgttggatatcatcaataagaacggactgcaaatgcttcataatatattgaagcagagtagaggcatcttccaccggagacctattatacggaagcttctgaaggtacttgaatttctagctcagaaaggaattttgacatctgaacatataaatggaggtcctcggtttgctggagtcgaaagcttcagagacttgatgctgagtttaacaagacattcagacattcaggttcaacagattgctcggagcttccgtgatagatggatcccccctaataatgcaaggagtgaaccaacagaatatccacatacatcaacatttgtgcatgatatccagggaaccaatacagtctggagttctgctaggaggaaacgcaagagccgctgggactatcaacctgacgagcattataagatgccgggactaaaaatccaaaaagtttgttctggacatggtgaatttgatgttcagtttggctttatgaaaaataagttaaagaggaatcagggcgcaaacaactatcataatgatgttcttggcatggggagttcaacagagggtgaagatgatgaagcccctcctcctgggtttgagtcccagctggaccgtcggcctgcacaactttcaataggcagcgaggttgctccaggactttgcatggagaggtaccaatctagcttgagtatttcatatggggttcctgtaactcttgttcagcactttggaacccctgaatctgaaggaggccaatgccataaaaaatggaaagttgcacctggcgtgccttttagtccttttccaccattgcctccctatccgcgagggaatccttgcccctccacttcgtcttcccagatgtttcagcatgatggaataccccaagttaaacataacaattctggacaacggggaaggatcatgggccgagatgggagagtgcataggtcatggagaaatgagtcaagaacaaaatggcaataccatcatcaaggaaggagattttcgagcactcatcatagatttgaaagatccgaacctgcaagacctcaatagtgattaagggttcagggcagtgattggtaccaaccttgcagtttttgaacctcaagtagtggtggtatacatggtaattcctgcttgtcagaagtgtaacagaaactgtgtcaggctttaacgatgtttaaagagtgtaaatttcagttcattgggggtagagcgtatgctgcacataggccattttccagtgcagtgttactaattaatttggtcattgtttttctctctcccaatgagtatttttcataggaacattttttatttgatttaatcctttttacaggtgataaggataaccaagtttagcgacaatcctctgtagtctcgtttggttctttgccttttttccccttttgctttctcagtaaagcttctattttggcagtgtttatgtgtttgtttccttagctgcagcacgttattttcactccaataggtaagtcggattttttgggatcttgcacatggccttttgaatctgttcaatttcttggagtgctcctaatttttagtcctattgctttttacatttcgatgcctcctgaacttaatcttatgatataactgaagttgattcctaatcattgccctcttctactaaacgggcacacatatgaactagcactttgctacaggaattcccaggtaagttgtcctgaatccaaatctgatcacatttcccctgaatgtctcattatataagttgcatcatgcaatactggaacacgatttgctagcgttacgtggtgatatctgaccaaatctgctaatgtctcatgttttcttgacggaatttgaaaaagttatgaccttagcgtcattttgtgacatctgcccagatttgctcatgtctcgtgtttttttgttggaatttgaaacagctacttcaaagaaatcaggcagtttggta

SEQ ID NO: 50464 - DNA, 7239 bp, Zea Mays
ctctctgtcctacccttcccctatccgcctccgccgccctcgttcctcaacgcggcgacgaccgccgcctaccgcacgtcctagcccggcgccgcccctgactcccgcgtcccgcccgtcgccggagggaaacgggggccggtggcgcgggacccgacgactgcaacgcagcaggcattcgccgccacgcgggtcaccgagggttttgtaagcccggcttcggcggcgtgatcgggtgcggaggctgcggtgagggcattggatgttctagacccgtacgggaccctgctgacctcctgtcgcaatggaggagtctggcgcggccgtgcgcggcgaggaggatcgtgttgctgacgcccagcgcttggggccagcggaggtcgctctgtctactgccaccgcccctgaaccggtccatggattgggggatgccgcagtagaggtatgtcatgctccggaagctagattgtccacagagattggtgacgaagggagcaatttcgcgtttggattggtgactcctgtcgattgtgcttcttcctcccatcgaggaagaaggtttcagctaggacaggagaagggttcgagttcagagcagagggtcatggacatggatgaacggaaggaaggtagtttggctcctgcggcgtctgctgaaaatgctgctttgcagacctgtcatgaggtcaatgacaggctgtcgaataagacgataccttatcctccttgcagtgaagtggtatgttccaaggatgctggatgcctttatggcatgtttgataaaacggcagaagggagccagtttgagcatgtgggtttgacgggtgacggaggtgattgtcgtgccgtggtggaggtagtaaaggaaaccgtacaagatttactggctgctcgtaacggagcaaaatgtggttatgaaggtttgtcagtttcaatggaccatggcagcgagcaagagccacgtggcataggatctatcacgtttgctaacgatgagctgcagccaaatggtttggtatcggatattgaagctgtttcgaggccagctcatatagattcagttccttccattccagggagcattgatctttctttagatctaaaggcaggtcagtttggtggaatgtctggtgattcagggacgtgccatggggctgacagagcgatgcggaatgatgattttacccatgacagtggggacttgtcagacccagggaagcatcatttggagaaattgccatctggtgctgagggcctggcattaataactgatgctgttggcggatctgaccatttggaccaagggctcaatgcctgttatgctgctgctaatagctctgctaattttataagtaatgctaatgatggagaattacgaaacgaaaagctgacagcattgcacgtattcatacgtaggaatccaaaaagagctgtttcttcaagaagtcttaattccgagaagcaagatcaaataggcaaagggaacagtggctcacgcaaacctaaaaaagttgatattgtgagctcattacaccaaagcaccgtgaatatgttcccaaacaaaatcactaagggaagaagtggcatgaacaggccaccaaaatcctttacttggggcaatctagaacggctattagattgctgtccaagctacgggccatctacttctaattctcgtccaatttgcttggacaaaggaggatcatataacagatccgatcagagaagtcagccaagtatttggaaaagtcgaagttctagatcttcaagaagcaaacgctcttctttctctgaaatagggcatgcagctaatgaactggatgggcaaccaaccttagcaattgtggctgatatggggcatgctgctagtgaattgaatgagcaaccaaccttctcaattgcggctaatactgatatttgtttggaaagccacagaggaaacattccaaatttgtcttctgataaattgatcaatattcttgatagtactaggaaaactgcagagtctattgatagtcatcgtacagaatcaaaatgtatccagagccaaagagaaagagccttggtgagtagtggtaaagaaacatgcgctgcatacgtccacagagagtgtgctaaactgtcaacttctgaacttatggacaatgccaatggcaatgtcatgctacatgttgggttttcgccggattctgttttggagcttgcttctgttacatgtgaaggtaatgcttctgcaagccatgatgttatgttgcatgaaaacccaaccgatgctggtgcattgaatgatggtgatccatctgttttatctacttctgactatgaaaaagaacatgcttcatcattgatgaacttggagcagcatgctagaagtactttgcacgaggacaccagaaaggaagaggttggtccatctcatggcatagtagaaaatgatattgaaggaaaggcgcgggctttacagaagtcaaattctgtgagaaaaattggtattgtcagaaaggcaggttgcaaaaagaaagatggatctaaaggtgtaaaaaagaatgttataggattcagcaaagcttctccatgtgaatcttcaaaacttaggccctctaatgatccaatttcacctgggcctccagatgttgggtcttgctttgaagccttaacttcaggctcacaggatcttggtatgcatgaacatggtggcatacagagtcactctgtaatgcatggtgacaaagggcatgcatttgacagtatgaaatcaccaaggcacaagataaaggatactaatgcaagaaagaaaggtaaggtgcgagacccacataagaaagaaaaaggtgatcttgatcctatcactgaacttccattcaagaactccagtgccatatctactaatttacctggaaatgttgcatgcaaaatggatggggcatctgtaccgccactgccaccacgtgctgcatgggtgtgttgtgatgattgccaaaagtggcggacttgtaaggacaatggagacaagacgttcgctgactgttctattccacaagagaaatcaaacgctgagattaatgcagaactcgatctttcagatgcttcagctgatgaagcagacaatggtggatctaactccaaagcttgcaaaccaccgtcatggactcttgttaggtcaaacttgtttctgcatcgaaaccgcaggacacaatccattgatgagagcatggtgtgcaactgcaagccaccccaagatggccgaatgggttgtagagatggatgtttgaacaggatgctcaacattgaatgtgtcaagcggacatgtccatgtggagaacaatgctctaatcagaagttccagcggcgtagctatgcaaaactgagatggttccattctggcaagaaaggctatggattgcagttgcaagaagacgttactgaaggaagatttcttattgaatatgttggagaggtccttgacataacatcctatgaatcccgccaaagatattatgcttgcaaaggccagaaacatttctatttcatggctctaaatggtggtgaggtaattgatgcttgcactaagggaaacttgggccgattcatcaatcatagctgcagccctaactgttgcacagagaagtggatggtcaatggggaagtctgcattggaatatttgctttgaggagcatcaagaagggtgaagaattgacatttgattacaattatgttcgtgtatctggtgctgctcctcaaaaatgcttctgtggtactgccaaatgtcggggttacctgggtggagacatatcaattgtcgataccatcatcacccaagatgatacagaagcagatcattttgaacaaatggttgttgacaaagactccaaggagttgctgggtccaaatgagtctgattctgatggtagccacccaaatatttcagaacctgaattttctatccaaggggaagatttacatgattgctcagctgcaaaagtagaattagatctgcttgaaggaactagaggaacctcattagaaactagtgagcctgaacatcccttggaagcatggagcccaccagaagatgaagatgtcattcgtacgcctgtgcatgtgtcacggacatttgaaagttctctgcagaagttctcagtacatgacactcagtcatcagatcttttgcgtaagactgcaaattcaatggaaggatcaaaggctccaaatataacaaacggatcgacacttggttctgatttcaggggcaatctggtgcctactttcagacctgctgagagaaaaaacttaaaacaacataaaaatcagaaacgacaaccgtcttctccaattgacaatgaacatattttgggagttgaagggacactgaacagcctactggatgtggacggtggtatcagcaagcgaaaggatgctacaaagggatacttgaagctgctcgttgtgactgcagcagaagatggtagtgctgggggcacatccaaaagtctgagggatctttcgttgattcttgaggcacttctaaaaacaaaatcacattcggttctgttggatatcatcaataagaacggactgcaaatgcttcataatatattgaagcagagtagaggcatcttccaccggagacctattatacggaagcttctgaaggtacttgaatttctagctcagaaaggaattttgacatctgaacatataaatggaggtcctcggtttgctggagtcgaaaggttacattatttaaacttatttttccagtgttatttggtactgattgaagggttttatattcagtttgtttctaggtagtaggtaccattactttttttttgtttttatttgtgtaatgcctttttgacgtgaaagggcttctagcgtaatggttaaggcttccaagtaacatctctaggtcctgggtttgatccccctcgggggcgaatttctagcttggttaaaaagatccgcttgctgtgccccgaccgctcccggtttacgttctgcgcgctaccctccggctgggctgttgcagtgcgggcggtgacggcccgctagtgatgggggcagggttcgggggttttctcggtcgggaccatgtttcgtctcttcttaatttaataccggaagggcggtctttccttccccgaccgagttttttaatgcctttttgacctgaactagcatgtggtcttctctaagcgaaatgaaatccttatctcagtacaaatgacattcttgcttgttactttgtggttccttaacttctaatttattctcttgttacgcgataggacagttttcaaattgtcattgtttactaaactaagccttggtcagtgcaataacagtgcatgacaatttagccttgatctagaaataactcctacttatgttccttgaagctttaatcacagttcactttttctataacttcatatggaacttgtactgcagcttcagagacttgatgctgagtttaacaagacattcagacattcaggttcaacagattgctcggagcttccgtgatagatggatcccccctaataatgcaaggagtgaaccaacagaatatccacatacatcaacatttgtgcatgatatccagggaaccaatacagtctggagttctgctaggaggaaacgcaagagccgctgggactatcaacctgacgagcattataagatgccgggactaaaaatccaaaaagtttgttctggacatggtgaatttgatgttcagtttggctttatgaaaaataagttaaagaggaatcagggcgcaaacaactatcataatgatgttcttggcatggggagttcaacagagggtgaagatgatgaagcccctcctcctgggtttgagtcccagctggaccgtcggcctgcacaactttcaataggcagcgaggttgctccaggactttgcatggagaggtaccaatctagcttgagtatttcatatggggttcctgtaactcttgttcagcactttggaacccctgaatctgaaggaggccaatgccataaaaaatggaaagttgcacctggcgtgccttttagtccttttccaccattgcctccctatccgcgagggaatccttgcccctccacttcgtcttcccagatgtttcagcatgatggaataccccaagttaaacataacaattctggacaacggggaaggatcatgggccgagatgggagagtgcataggtcatggagaaatgagtcaagaacaaaatggcaataccatcatcaaggaaggagattttcgagcactcatcatagatttgaaagatccgaacctgcaagacctcaatagtgattaagggttcagggcagtgattggtaccaaccttgcagtttttgaacctcaagtagtggtggtatacatggtaattcctgcttgtcagaagtgtaacagaaactgtgtcaggctttaacgatgtttaaagagtgtaaatttcagttcattgggggtagagcgtatgctgcacataggccattttccagtgcagtgttactaattaatttggtcattgtttttctctctcccaatgagtatttttcataggaacattttttatttgatttaatcctttttacaggtgataaggataaccaagtttagcgacaatcctctgtagtctcgtttggttctttgccttttttccccttttgctttctcagtaaagcttctattttggcagtgtttatgtgtttgtttccttagctgcagcacgttattttcactccaataggtaagtcggattttttgggatcttgcacatggccttttgaatctgttcaatttcttggagtgctcctaatttttagtcctattgctttttacatttcgatgcctcctgaacttaatcttatgatataactgaagttgattcctaatcattgccctcttctactaaacgggcacacatatgaactagcactttgctacaggaattcccaggtaagttgtcctgaatccaaatctgatcacatttcccctgaatgtctcattatataagttgcatcatgcaatactggaacacgatttgctagcgttacgtggtgatatctgaccaaatctgctaatgtctcatgttttcttgacggaatttgaaaaagttatgaccttagcgtcattttgtgacatctgcccagatttgctcatgtctcgtgtttttttgttggaatttgaaacagctacttcaaagaaatcaggcagtttggta

SEQ ID NO: 50465 - DNA, 2428 bp, Zea Mays
gtggaatcgttgcgcatatcgatcaccgggacctaaaaactcggcttctccctctcgcgcctcgggggtcgagctccagctccagctccagctcccgcggccgcggtgaggaacggagcaccagaaggcgatgcccttttggtggccgaggaggaggtccaggccgagctccaagcgcaaggacgggcccgtgccggcctctgcctcggcttcctgctcgcctcgctactctgtcgtcgttccccccaccgcgtacgcgtccgctagcgcgtcgccgtcggcccagtgggagcgggcgtggacgcgcagcctcgtctccctggcgccgcggggcgcagcagatagggctgccgccgctgccgttactctatgcggcggcggcgggtcaggacccgggggagcgacggccgggcttgggcgtgctttaccgctcccgcgccccgtgtacaaatcggcgccggtttcaagcgggagctcgtcggattcagacgaggtggtggacaacacaaatttcaggtgtgcggatccatttgtctatcctggagcaagaactgtgccacccgatgcacataagcgcacggcagaagaaaagcaccttctttcatgtagtgctccgcctccgcgtgagcaccaaaagttttttgaggtgcctgtcaccaatgccagaaaagttcatttacaaagctacgaagctgcaaccagtgggactactttgcgtggtagaatgtttcataaaaatacacgtgcaagaacaaggagtctttccccaggcccaagagggcatgattttgcttccagttttgcaagtccaagagacgttggagttagttcaagtggaaaaaggggaaggcgttaggtagcggcacatttggtcaggtttacgttggattcaacagtgaaagcgggaagttttgtgcaataaaggaggtaaaagttattttggatgattcaaagtcaaaagaacgcctcagacaattgaatcaggaagtagatatgcttaggcaactaacacaccaaaacattgtgcaatactatggaagtgaactgactgatgaggcactgtccatctatcttgagtatgtttctggaggttcaattgataaattgcttaaatactatggtccttttaaggaacctgtgattcgtaattatacgaggcagattctttctggacttgcctacttgcatggtaggaaaactgtgcacagagacgtaaaaggagcaaacgtacttgttggcccaaatggcgaagtcaaacttgctgattttggcatggctaaacatataacatctttagccgaaatacactcattgagaggaagcccatactggatggctcctgaggttataatgaataaaaatgggtacagttttgaagttgatatctggagccttgggtgcacaattattgaaatgggaactgggagacatccttggcatcagtatgaacatgtacacgcaatgtttaagatagtaaacactaaggatatgccagaaatcccagagagactttctaaagaagggaaagatttccttagtttgtgcttaaaacgtgatccggcacagcgcccatctgcaactcagttgctgcgccatccttttgttcaagacaatcaggaaatcagtggggccaaatgcaacaccactttgagaaatggactatcttcgcctgcagaggcatgtcataaaaaatccaacaaagaaccttcattgaagagaagtgttgctcctctgcgggacattggagggataagagcgcgaggttttacgggatcttcctcagcatgcgtttcaccccacaaaacttccaggcacagtaacctgcatttactgaccatccttctttccggttcatcccatcacacccagtaccttgacttctgccatcatccatcctgcagcaggcatattgatgtgagagcaaacatgtctctcccggtgtctccatgctcaagcccgttacgccagctgaagcaatggaactggagctgcgttgcttccccatcacatctggcattctcctcgggatctgtggcccacaacacagtcagtgacatgcagaaccagatgagaggaagcgacccagttccagatccatggcgcgacatcagccacagacgacaaagcccatatgactccccaaagagattctgattatgatccgtacagctgtaggagactatcacttatcggtattttcacggcaaagttaggtgatctaggagatgtttgcgttgaaaaatcctcggtaactaggaatcctcatgatctgatctattgtgtacgtagatgataaaggtgtagctgatgattgtaaactatgtgcaggtgttgtaaatgctcattgtacatcctgtatagattaaatatgacgatgcaggtgttgtaaatggtcatataaataaagtaatagaaaattacacagatg

SEQ ID NO: 50466 - DNA, 1475 bp, Zea Mays
gtttcttttcattttatggattttttttcagtgtgcgtgtgcctgtgtttaggagcactattggaacctcactcacccccacactagcatttagctagggcgctaggctatagtttgtctccatggccagccaaccagctgtcctagttggtagaggctggaactttgttccattatctaaaaaacaggtgtcatagtttgtacacctagctcctcctagattggatatcattttatacacacttttccctgcgaggatgttgatggtcatattccgttttctgcactccgtggcatcattagataactgaagcaagcatgattctgattgataacatctttagccgaaatacactcattgagaggaagcccatactggatggctcctgaggttataatgaataaaaatgggtacagttttgaagttgatatctggagccttgggtgcacaattattgaaatgggaactgggagacatccttggcatcagtatgaacatgtacacgcaatgtttaagatagtaaacactaaggatatgccagaaatcccagagagactttctaaagaagggaaagatttccttagtttgtgcttaaaacgtgatccggcacagcgcccatctgcaactcagttgctgcgccatccttttgttcaagacaatcaggaaatcagtggggccaaatgcaacaccactttgagaaatggactatcttcgcctgcagaggcatgtcataaaaaatccaacaaagaaccttcattgaagagaagtgttgctcctctgcgggacattggagggataagagcgcgaggttttacgggatcttcctcagcatgcgtttcaccccacaaaacttccaggcacagtaacctgcatttactgaccatccttctttccggttcatcccatcacacccagtaccttgacttctgccatcatccatcctgcagcaggcatattgatgtgagagcaaacatgtctctcccggtgtctccatgctcaagcccgttacgccagctgaagcaatggaactggagctgcgttgcttccccatcacatctggcattctcctcgggatctgtggcccacaacacagtcagtgacatgcagaaccagatgagaggaagcgacccagttccagatccatggcgcgacatcagccacagacgacaaagcccatatgactccccaaagagattctgattatgatccgtacagctgtaggagactatcacttatcggtattttcacggcaaagttaggtgatctaggagatgtttgcgttgaaaaatcctcggtaactaggaatcctcatgatctgatctattgtgtacgtagatgataaaggtgtagctgatgattgtaaactatgtgcaggtgttgtaaatgctcattgtacatcctgtatagattaaatatgacgatgcaggtgttgtaaatggtcatataaataaagtaatagaaaattacacagatg

SEQ ID NO: 50467 - DNA, 2039 bp, Zea Mays
cgagaaaaaaatggatgggaaaaaagtagctgtagtggtaatcatttgatcttgaattcttgatccactatttcgaggagaaagagggagagagatgactagctgtagttgaagccttgcaggtccaccgtcacctcgcgccgcccggcgagtcgcaggcatttgtttaagggaagggattctcttccgccgcggctgcctctgcctggctggctgcgtcgccacaccccgcgcacatcgcgctgcccagctctgctgctgctgccgctgcgtgcgcatcactggaaagatgggcctgtggggacgggctccttctttccttcaccgcgccatgaatgatgcgccttttctctgctgctttgcttccatctggctcagctctgtgcctctgtcgcccttctccttcctctcggtgtcccctctgtcggtccatgctcgtctgctggctcctgcttgttgcttaggcgttcttggtcaggtgagcagcactggcggcgatggcgaaggagacggagtactacgacgttctcggcgtctgccccgccgcatccgacgaagagatccgcaaggcctactacatcaaggcgagacaggtgcatcctgacaagaatcccaacgacccacacgcggccgagaacttccaggctcttggagaggcttaccaggtgctgagtgaccctctgcagaggaaggcctatgacggctatggcaagaacagcgtatctagggagaacatactggatggtactgtggtgtttacccttcttttcgggagcgagctgttcgaggactacattggccatcttgcaatggcaacaatggcttcctccgagttgacaagcgataacgacacccccgaaaagcttcaggataggctcaagaatgtacaaagggaaagagaagaaaagctagctagattcctcaaggaattcctctctcagtatgttcgtggagacaaagaaggatttgctaatcgtgccgaagctgaggcaaagaagctctcatgcacttgcagcaaaggagcttggcaagaaggccatgtacctaggagtgccattcgtagccgagtgggtcaggaacaagggtcatctgtggaagtcacagatcaccgcagcgaaaggggccttgcagctgttgcagttgcaagaggaggcctgccggcagagtagcaaggatggcaatgccaccgagcaggatgtcgacttgcagatgaggatgaacaaggacctgatgatgagctcactgtggaagctgaatgttgtggatattgaaatgactctgttgcatgtttgtgaaatggtgctgtctgaaaacaatgtcaagaaagatgatctgaaggcccgagcaacggccttgaaatttcttgggaaaatatttatgagggaaaaggaggcattgccagggccagcaccagcgccaggtccatcaggaccgtcgaaacgaacggttcttgacgacgacagcagctcagatgacagttcagatgatgacctgactcggacagcgccataccggactcctgcatttacccagggaatcggcaggctgttccgatgcttatgcaatccggcttatgatgttgatgatgattttgagccccacaaatgagtcctaaagaggaaggtaccaataccaatggattttccaaaggttggtgacttttgtcaagcgtatgattcagaacagtgtgaattcggatcatacgttgtgatcctttgcttgccttgaggatacacgtgtagatgctatttcatctctggtgaccagaccaacagctcagagatcctcatttttttcctcccatgaacagtagacctcctctccgctttttttaataaatagatccaactgaatcttgttgagcttatgtaatcgcttgctattgttgttgtcaaaaacacaaagaagtgaaagaacaagtgcctgtaaaaatccatttctgatcctgaatcgggaattcagtgtgatgaacatcaactttttgatcctgttgccggcgtattgcctgcattctgtctgcaaatagtttgcaagttcat

SEQ ID NO: 50468 - DNA, 2165 bp, Zea Mays
aaaagtagctgtagtggtaatcatttgatcttgaattcttgatccactatttcgaggagaaagagggagagagatgactagctgtagttgaagccttgcaggtccaccgtcacctcgcgccgcccggcgagtcgcaggcatttgtttaagggaagggattctcttccgccgcggctgcctctgcctggctggctgcgtcgccacaccccgcgcacatcgcgctgcccagctctgctgctgctgccgctgcgtgcgcatcactggaaagatgggcctgtggggacgggctccttctttccttcaccgcgccatgaatgatgcgccttttctctgctgctttgcttccatctggctcagctctgtgcctctgtcgcccttctccttcctctcggtgtcccctctgtcggtccatgctcgtctgctggctcctgcttgttgcttaggcgttcttggtcaggtgagcagcactggcggcgatggcgaaggagacggagtactacgacgttctcggcgtctgccccgccgcatccgacgaagagatccgcaaggcctactacatcaaggcgagacaggtgcatcctgacaagaatcccaacgacccacacgcggccgagaacttccaggctcttggagaggcttaccaggtgctgagtgaccctctgcagaggaaggcctatgacggctatggcaagaacagcgtatctagggagaacatactggatggtactgtggtgtttacccttcttttcgggagcgagctgttcgaggactacattggccatcttgcaatggcaacaatggcttcctccgagttgacaagcgataacgacacccccgaaaagcttcaggataggctcaagaatgtacaaagggaaagagaagaaaagctagctagattcctcaaggaattcctctctcagtatgttcgtggagacaaagaaggatttgctaatcgtgccgaagctgaggcaaagaagctctcatgcacttcatctgggttggatattcttcgcaccattggatatgtctattctcgacaggcagcaaaggagcttggcaagaaggccatgtacctaggagtgccattcgtagccgagtgggtcaggaacaagggtcatctgtggaagtcacagatcaccgcagcgaaaggtgaactttttttggtctcatagcatgttgtgctatgatgattaaaattgctgactgatgagggggtaaaaggagaaatgcaggggccttgcagctgttgcagttgcaagaggaggcctgccggcagagtagcaaggatggcaatgccaccgagcaggatgtcgacttgcagatgaggatgaacaaggacctgatgatgagctcactgtggaagctgaatgttgtggatattgaaatgactctgttgcatgtttgtgaaatggtacgtgtctcgaggtgctgtctgaaaacaatgtcaagaaagatgatctgaaggcccgagcaacggccttgaaatttcttgggaaaatatttatgagggaaaaggaggcattgccagggccagcaccagcgccaggtccatcaggaccgtcgaaacgaacggttcttgacgacgacagcagctcagatgacagttcagatgatgacctgactcggacagcgccataccggactcctgcatttacccagggaatcggcaggctgttccgatgcttatgcaatccggcttatgatgttgatgatgattttgagccccacaaatgagtcctaaagaggaaggtaccaataccaatggattttccaaaggttggtgacttttgtcaagcgtatgattcagaacagtgtgaattcggatcatacgttgtgatcctttgcttgccttgaggatacacgtgtagatgctatttcatctctggtgaccagaccaacagctcagagatcctcatttttttcctcccatgaacagtagacctcctctccgctttttttaataaatagatccaactgaatcttgttgagcttatgtaatcgcttgctattgttgttgtcaaaaacacaaagaagtgaaagaacaagtgcctgtaaaaatccatttctgatcctgaatcgggaattcagtgtgatgaacatcaactttttgatcctgttgccggcgtattgcctgcattctgtctgcaaatagtttgcaagttcat

SEQ ID NO: 50469 - DNA, 2079 bp, Zea Mays
aaaagtagctgtagtggtaatcatttgatcttgaattcttgatccactatttcgaggagaaagagggagagagatgactagctgtagttgaagccttgcaggtccaccgtcacctcgcgccgcccggcgagtcgcaggcatttgtttaagggaagggattctcttccgccgcggctgcctctgcctggctggctgcgtcgccacaccccgcgcacatcgcgctgcccagctctgctgctgctgccgctgcgtgcgcatcactggaaagatgggcctgtggggacgggctccttctttccttcaccgcgccatgaatgatgcgccttttctctgctgctttgcttccatctggctcagctctgtgcctctgtcgcccttctccttcctctcggtgtcccctctgtcggtccatgctcgtctgctggctcctgcttgttgcttaggcgttcttggtcaggtgagcagcactggcggcgatggcgaaggagacggagtactacgacgttctcggcgtctgccccgccgcatccgacgaagagatccgcaaggcctactacatcaaggcgagacaggtgcatcctgacaagaatcccaacgacccacacgcggccgagaacttccaggctcttggagaggcttaccaggtgctgagtgaccctctgcagaggaaggcctatgacggctatggcaagaacagcgtatctagggagaacatactggatggtactgtggtgtttacccttcttttcgggagcgagctgttcgaggactacattggccatcttgcaatggcaacaatggcttcctccgagttgacaagcgataacgacacccccgaaaagcttcaggataggctcaagaatgtacaaagggaaagagaagaaaagctagctagattcctcaaggaattcctctctcagtatgttcgtggagacaaagaaggatttgctaatcgtgccgaagctgaggcaaagaagctctcatgcacttcatctgggttggatattcttcgcaccattggatatgtctattctcgacaggcagcaaaggagcttggcaagaaggccatgtacctaggagtgccattcgtagccgagtgggtcaggaacaagggtcatctgtggaagtcacagatcaccgcagcgaaaggagaaatgcaggggccttgcagctgttgcagttgcaagaggaggcctgccggcagagtagcaaggatggcaatgccaccgagcaggatgtcgacttgcagatgaggatgaacaaggacctgatgatgagctcactgtggaagctgaatgttgtggatattgaaatgactctgttgcatgtttgtgaaatggtgctgtctgaaaacaatgtcaagaaagatgatctgaaggcccgagcaacggccttgaaatttcttgggaaaatatttatgagggaaaaggaggcattgccagggccagcaccagcgccaggtccatcaggaccgtcgaaacgaacggttcttgacgacgacagcagctcagatgacagttcagatgatgacctgactcggacagcgccataccggactcctgcatttacccagggaatcggcaggctgttccgatgcttatgcaatccggcttatgatgttgatgatgattttgagccccacaaatgagtcctaaagaggaaggtaccaataccaatggattttccaaaggttggtgacttttgtcaagcgtatgattcagaacagtgtgaattcggatcatacgttgtgatcctttgcttgccttgaggatacacgtgtagatgctatttcatctctggtgaccagaccaacagctcagagatcctcatttttttcctcccatgaacagtagacctcctctccgctttttttaataaatagatccaactgaatcttgttgagcttatgtaatcgcttgctattgttgttgtcaaaaacacaaagaagtgaaagaacaagtgcctgtaaaaatccatttctgatcctgaatcgggaattcagtgtgatgaacatcaactttttgatcctgttgccggcgtattgcctgcattctgtctgcaaatagtttgcaagttcat

SEQ ID NO: 50470 - DNA, 2270 bp, Zea Mays
tgaattcttgatccactatttcgaggagaaagagggagagagatgactagctgtagttgaagccttgcaggtccaccgtcacctcgcgccgcccggcgagtcgcaggcatttgtttaagggaagggattctcttccgccgcggctgcctctgcctggctggctgcgtcgccacaccccgcgcacatcgcgctgcccagctctgctgctgctgccgctgcgtgcgcatcactggaaagatgggcctgtggggacgggctccttctttccttcaccgcgccatgaatgatgcgccttttctctgctgctttgcttccatctggctcagctctgtgcctctgtcgcccttctccttcctctcggtgtcccctctgtcggtccatgctcgtctgctggctcctgcttgttgcttaggcgttcttggtcaggtgagcagcactggcggcgatggcgaaggagacggagtactacgacgttctcggcgtctgccccgccgcatccgacgaagagatccgcaaggcctactacatcaaggcgagacaggtgcatcctgacaagaatcccaacgacccacacgcggccgagaacttccaggctcttggagaggcttaccaggtgctgagtgaccctctgcagaggaaggcctatgacggctatggcaagaacagcgtatctagggagaacatactggatggtactgtggtgtttacccttcttttcgggagcgagctgttcgaggactacattggccatcttgcaatggcaacaatggcttcctccgagttgacaagcgataacgacacccccgaaaagcttcaggataggctcaagaatgtacaaagggaaagagaagaaaagctagctagattcctcaaggaattcctctctcagtatgttcgtggagacaaagaaggatttgctaatcgtgccgaagctgaggcaaagaagctctcatgcacttcatctgggttggatattcttcgcaccattggatatgtctattctcgacaggcagcaaaggagcttggcaagaaggccatgtacctaggagtgccattcgtagccgagtgggtcaggaacaagggtcatctgtggaagtcacagatcaccgcagcgaaaggggccttgcagctgttgcagttgcaagaggaggcctgccggcagagtagcaaggatggcaatgccaccgagcaggatgtcgacttgcagatgaggatgaacaaggacctgatgatgagctcactgtggaagctgaatgttgtggatattgaaatgactctgttgcatgtttgtgaaatggtacgtgtctcgaggtatctaatttatatacggtatgataagtatgagcagtatgtgttcttggcttttctttgacagccgatggctggaacttcgtaataaccggaataaaatcccttcatttaaaaaaagcgcctctactggattacgagtagtctcttattccaggtttatctgatcaaattatcagcacatgaaggcttatttgttttgacaagtttttttttctttaggtgctgtctgaaaacaatgtcaagaaagatgatctgaaggcccgagcaacggccttgaaatttcttgggaaaatatttatgagggaaaaggaggcattgccagggccagcaccagcgccaggtccatcaggaccgtcgaaacgaacggttcttgacgacgacagcagctcagatgacagttcagatgatgacctgactcggacagcgccataccggactcctgcatttacccagggaatcggcaggctgttccgatgcttatgcaatccggcttatgatgttgatgatgattttgagccccacaaatgagtcctaaagaggaaggtaccaataccaatggattttccaaaggttggtgacttttgtcaagcgtatgattcagaacagtgtgaattcggatcatacgttgtgatcctttgcttgccttgaggatacacgtgtagatgctatttcatctctggtgaccagaccaacagctcagagatcctcatttttttcctcccatgaacagtagacctcctctccgctttttttaataaatagatccaactgaatcttgttgagcttatgtaatcgcttgctattgttgttgtcaaaaacacaaagaagtgaaagaacaagtgcctgtaaaaatccatttctgatcctgaatcgggaattcagtgtgatgaacatcaactttttgatcctgttgccggcgtattgcctgcattctgtctgcaaatagtttgcaagttcat

SEQ ID NO: 50471 - DNA, 5277 bp, Zea Mays
taggagaacacgaggcaacacatgaacacacacactcgcatcagagacttacgagtttttccctctctcgtccagcttgtaactcctactgcccagcttgtaactcctactacaagcaatatagtgccgctagcataagctaacaagactgtagtagtgacatttcgttcaaaccagtataatccttgtgtcctacttgcacaccatctcggccttaaaacgtgtagcacaagtttactagtcagacactcactcgaaacatcgacaattgttggttcacttgatcatcaactaagataatcttggtcagagaagcatcatgccttggagtggactaatctaacttcgttcaattttgacttcgcttctcggcgaagtatatcttgtggcttcgcttgatcaccgacaaagaggaagatttgacttcaatctctgctttgagtcttcgtgttcaggtgaagtaaccattcgccttcgccatattatttgtttcttttttgagcgaagatactcctgaaaatgtatatcaagtaaagagtagataattgttcttcaactccccggggactgtgtttatccaaagtcagagccccaacaggtaccatatacaatttaaactaaatcagaatctctgaaccttctaacgtagaattaccattctcaggaaacaatctttttttatgaaaagggaaagatcagctgacagcacagggcacatgaatattggattgtgaactcaaggaactcaaactggattggatcaaactcttgcaacttctgctgtgattgaagcctgacagattacaccatgacccaagacttggaacgttgaatcaactgcagatgattctctgggtaaacctcgttgagcacttgagctctcaaactggagattgaaaactctgcacgaacagaagcccttggctcgagctattttgcagtctcacaaagcttaacagagtgccacgaggatgctggtggcaagggagcgaacctcgcctaccatcaccatagcagtgtgccagcaatacaagagcaatgcttttatacatgggcagttccactcaagtctaaacaaaaattaagctggtgttcagtaggatcctctgctacgctcatatggtcgagaagcttccccaacatctcatatatcttgtctgcctcgcaatgagagatgtcatcagcaacgaatacatgctttgcactccgcacctcaatccaactgtaagcctgatccttcttaaggcccttctccttcatgagccccctgactcgacgtgcatcatcccactgtcctgcagctgcatagatgtttgacatcatgacataccgaccactgttcccaggctctaacctgaagagaaactctgccacttcttctgcaagctcgatatttccatgaaggcgacatgcacctaggagagctccccaggatccagctgtaccaggaccaatcctggatggcaaatctttgatgaactcagtcgcttcttccagctggtgattccgaccaagagcatcaatgaaggcagcatagtgttcagcccttggttcaacaccatggtcctccattgattcaagaacgagtcgtccattagatactagaccagaatggctgcaggccgtgaggacagcgaggaaagtgacatgagttggacgaactccagctaccagcatctcctcaaaaatagcaagtgactgctttccgaggccattatgtgagaaccccgtgaccattgagttccaagagataaagtccctctcaggcatccagtcaaatactgccatcgcagccatcatgtctccacacttagagtacatgtcaacgagtgcattgtggatgaaaatgttgaaagggacagagccaatgttccggcgtaagatgaagcagtgcaattccttcccacgtgtgacaagtccaagtttggcacatgcacccaaagctgacaccaagacaaaaggcgttggtgatactcccttggccagcatctgttcgaaaagctcaagagcggtgtcctcctctccattctgctcatgcccagatatcagcgctgtccatgcaatcctatccttatctggcatcatatcgaacacctgcactgcctcatggagcttcttcacttggcagtacccagaaatcatcgacgtccaagtgacattgtctcggatgctgacctgatcgaacaaatgcctcgcatcttccaccctccgagccttgctgtaggcgttcaacatggcattggccatgatgacggtgaactccatccctgataccactaccgcaccgtgcatttcccgcagcggcctcgcagctccgattcccgcacatgcagtcgccacgctgaccaccgtgaaccgatccatggctaaacctggccccaagaacctgtccctggccagccgggcaacgacgcggagcgcctccacctgccggccgtggtgcgcaagggacgacatgagggtgttgtaggagacgaggttgcgtgagtcggccggcattgtgtcgaacaggcggaaggcgtcggggagggtgtccggcctgcgcaagagcgcagcgagaagcgtgttgtaggagtgcgcgttcttgtgtggaaggtcgtagaaggccttgacggcagcggccggcgacgggagcgaggagtagagcgcgacgagacgatttgataggagcgtatggctggtgagcgccgtcttgacgaggtgcgcgtgcaccgcgcggccgagatggagcacgtcccccattgagatggcccgttccaggagaggaatcaactccgggatggcgagggcgcttccgccgccggcggttggaggaggtgctgggaggcatggcggcgggtggacagcgagcggcgggagaaggcggcgcatgcgttcccgactcgacggcagcatatgcgctcacagacgctgaagctatttactgggccgtgtatgatagcgggcctttgggccaatcaagcgggccaagtgggtatgtgaaggcgaacaagctcagcagcgttcgagttgttgcgaattgcaattgcagaacggaattccattccagaaccatccttcgctcgcccccgccgccgcgctgccgcggccatatacggcgaaagccctattcgtgcccgcggccgtggatagataggtcagtgacgattgagaaacccgtagtcggagcagaggaggggtagaggatggtgttcggtcaggtggtgatcggcccgccgggctccggcaagaccacctactgcaacggcatgtcgcagttcctctccctcctcggcaggaaagttgcggttgtcaatttggaccctgcaaatgacgcattgccgtatccttgactctttgagcaccacattttttcctctgtactcactctctccctatcaaaaaaaaaaacgtactctctccttgatgttctcttgtcacaattgaactttttccttgattgtaataaatagatatgagtgtgccataaacatcgaggacctcataaaactcagtgatgtcatgtctgagcattcgcttggccctaatggagggcttgtgtattgcatggattacttggagaagaatattgattggcttgaagaaaaactgaagccttttattgaagatcactatctgttatttgattttcctggtcaagtggaattgttcttccttcactcaaatgccagaagtgttattaataaactcatcaaaaagatggacttgagggtagagtgtgctctttgtcctatttatatcattctaatgctaatgaactagattgttcaatgttttttcctgtattctacagcttactgctgttcaccttattgatgcccatttatgctgtgatcctggaaagtatgtcagtgctttgcttctttcactatcaacgatgctacacttggaattgccacatatcaatgtcttgtcaaagattgacctcattgagaactatggaaatttagcattcaaccttgacttctacactgatgtccaagatctttcttatttgcaatatcatcttgagcaggatccccgctcagccaagtacaggaaactgactaaggagctctgtgatgtgattgatgattttggtttagtcaatttttcaactttggacatccaggacaaggaaagtgttggcaatcttgtgaagctgattgacaagagcaacggatatatattttcttctattgacagtagtgctgttgagttcagcaaaattgcagcggcgcctcttgattgggactactacagatatcctatacttgttctttaataatttttgcgaagaagtcttttgccgcctgtaatttttatgttatcttcaatgtcccagatgcacactatcaaaccacttgcattcacagcaagcatgtggtgaatagatcgcaagccaaaccacgcgaaattgcagccaagtatgttgttttatcaccagcttactattgctaagtcgagttgtgaaatctggagtaatatttctctgttacgtatgtggtatgccttagaatatatgctgttgcaccaatatcttgcaaattgtctttctttccttgacgtgtggatacaacagcggaagtgcaggagaagtacatgaaagatgatgagtttgcgcaactgacaagcaggatgcaatgaggctggcggtgccgtcccgcacccccactttggtagcactacgggtgaaccacgacagtgtggcacgttgaacttcggttgccagaacgatgtgaaacctgtctaaattcatgtagctcagttgtaggtgtttactgaagctgattgctgtagttgcctgatcttctgggagtaccctttgggcagtaaaaaaatgcacttgtcaccggtgaccaaccggtcatgtcctgttttgtttgttcgcttcaacctaactgttcgactgcttgtttgaactgctgcagctataatctttagagacaaaacattgtagtgtttggactactgcagttgtaatctttagaagcgaatttttagaaaaaaaaacagaattttgaactttgtcaacattcaaaattaggttagcttaaattggatgttgatatgacgtgccatgatgtaacgtactaataaaagtttaggggtccatgacactaaatgctaagtttagggcttattctcttttttgtgaggggctgcaaatagcctggtttgcagtcgggctgcaacaatttttttcctgtaatatagcatgtcaagtttaaagacttaataccaagttcgaggatccatggcatatagcatgccaagttaggagacctaatatcaaga

SEQ ID NO: 50472 - DNA, 2162 bp, Zea Mays
gtctctatcaggcttcccatcctgggctggctcgaacacggcggaatggaggttgccctcctccatccacttctggtggttctccctgaactcccggtgccgctctgcggccaacttctcgatctcctcggtgtaaggtgcaaccttcaccatggtcagcagaacccggctgtaccgaaagctcaggatctgctcagaggaggtgattaacttgaagcaggggtgctcagggaactgcgggttcgcagtgccatcttcacctcgcagtacagggtagaagaagacgagcctgccacccatgactaccatccttgcggcaaggtggaggaggtcatggacgcactctgcgaggctatatggggcggttgatgggatgtgattgtcccgtttctcatcaggcactgtgtaagggcctttgacgccttttatgagcttccgaccaccagacttccggccaccggcccggactccatatggtgggtcacaaattattgcatcgaacatctgattgatgacaagcagtggtattttcaattaagacaaatctgatcgagaaagtaagttttgacatagctcatagaggcagaaccgcagaagcaacaataagggcaggatcacaaattgtagactccaataaaaggaactattcgctaatgaaagcctaagaaagaaactaaaaagctcataatataagctttaatcaaatttcatgtagcaatgaaattatgcaacagctttattagccatttgcagagaaggctttcagattaagtgatagcagtaatcacgaggacattttagaacacccctccccctgtgctgtcccacacccacaaaaaaatagtttggttctagcactaaaggcaatctacccaagttctatattgtgcattttgtggaaaaggttacctcacactttcagttcatacactaatagtaaatgatgcacaagtgttacctccttcaatccaggacgccagggtgggagattgttgtctgcccttagcaaacacaaaggctctggtaacttatactgataaacagacaacatgttagtgcttagcattaaatctagcattccagccatttaattaacaaataaatccctaaatattctttccaaaaagaaaaggtgaataactaaacatggatgttttccacgacttgaactattaagtcaaaaaaaatcatggcataatgagactaatataacaagcatgggcatgttagattcctgtgttggcttgccttgccttgcccacaagagaaagccttgccctgccagcccaagcaagcagaaatagctctcccttggaagcaagacaaaatcttgcctgcacagatctcgtttgatttctcactcagcagtataatgtgtataatgcgtataatgtgtggaatgtattgcattgagcctctagagagaatatataggagtacatgacttggagggcaagaagcctatactagagataaggaaggttatcctagatataaggaaggtatcccgggattacactcaatcctaaaccaaccatatcaggagttgcctaatatactctaacatgtctaatatactctaacaattaagttgcatgcaccaaccaatttaacccaaaagcttaagctaataggaggagtggacaattcacttatattatattccaacatactccaattgaatcaatttaaataaataaaagaataacaaaaccctgtctcatctctattggtagaactatggtatggagtctcaaatctagtatcgctagaccaacttatgagtgtcactggtttgttgagatagctagagataaaatcaacaaaagtcataaatatagaggataaaagttcaaaaaaagtatttgtcgtttcagggaaatcactgttgccacttgccaccatcagttataacacccaccataatttctgtacatatccttttcatgaggctcataattccaaacaaattgcagatgactgggctatagagacaacaataacatgcaagaactgattgaagataacagtgtgaaattacctgctcaaagttgctccaaacattgcaattggggccacgaccatcccgtacaacccttatatcaatatctgcaccctgaaaagcctttatcagaaagacatagagactaacaaaattaaaa

SEQ ID NO: 50473 - DNA, 1301 bp, Zea Mays
aaataaaaattatgttcaaatactacgcgtgaaaatggtatgttcaccttgttacaactgaatggtttgtgggagtgccgtgatgtctgaattcaaataagcatacagaatgcgcgagctgaatgcatgtgtatatacaaactttaatacaattccgaaatgcttgtatcatggattcatatcttccatcatcatgcgctactggctcatccgtagtataaagctgcatgccacaaaaccgaatcagctcacgacgacagctgcggtgccggtacctccggagcctcgacggtggcggcggcgccgtcttgtgcctcgtcgggggcgggggcctcgagggtctgcgccggcgcagccaccgccggctggaacttggtgacgtaatagctgagcggcgggccgctgtaggcggcttccggcacctgcggcacctggctcttgttcacctggatgaggatggacgaggccgcggctacggtgatgaggacgagccccgcggcgatggcggccgtgttctcggcgccctccgccgacgtacccgccgtgccggagctgatggcactctcggccacgtacaccatcggctgtgcaaatcagttggcatggcaggaggtgatgtatcgtataataaagctatcttgtatccaggaacagaaagattgaggttacaccacagtgagtgaagtggccgcagaattagatttgtatcgaagggttacctcgacggagtagatgttggtctggccggcggtgtccttctccactaagccggtccaccctttcttcttgggagggaaagtgccgacgacctgggtcctctcctcggccagccactcggcgctcaggctcccgacctgcatgcatgcgcaccacagaaatggcaatggcatctcgttctcgttgctgcttcaattccgctctctgctgtgccggcgtaagcatctatctactactgctgccgcaacgaggcacgcagagttccaagacagctggcgaagggaagaggaggagagcggtacctccttctccggggcgcactcctcctcgttgcagtcggggtcttcctgcgccggcgccggcgaggaaggggacggagaagaggaagcgttgcaggtgagcaggaacggcctgctgctgcggccaccgccgatgatgccccctcgcacttgggatgccgcctgaggcttgctcctcaggaagatgcagccgctggcggagagcatggactgcgcagggcaagccatctctacttgctcctccttcctttcctcctcttggcagaccagcagacgcgctcacac

SEQ ID NO: 50474 - DNA, 916 bp, Zea Mays
ctggagatggcccaaccaaacacaaagtaaagtagtcggaccagtttgcgccgtgaacctattacgggtaaaaaagccccaaccaaacgactttccaagggcaacgctcacccgtcactctgataggcgtgcatgggcattgtcgaaggtagaggagacgatcgagagaggtggtagcgtttagttcgttgcgttgtgaacctacggcaccacggtgggcgtccgtccaatcgccgtcgcgagtggcaaccacgcgtgcacgacatctttggccttggcatggagcgccagcgagggcagtgcgctggcgtttgaggcttctgttgcgccggccagagggttttgcgtggcggcgggctaagatagcgagccgcgggatgcgcaggcaagctcgggcgcgagcgacaggcggcacggttggaccattggcccttccatccttcccctcccccttgcacttcgtagacattccccaaggccactctccgtcaggtccacgtcgtctcgcttctccgccacccgacgctctcctgctccacgcctccataggcgccactgcccactggcctctctgcttgcctctgcggccactgctcgactctgcggctgtttaccccgccgccttttcgtttctggaccaaggtctggtcaaagaatcgtagcggatcgggggagggagggctaacggcggccgatatgatccacccgcagaggtcgggtcgttgcgggagctagcgatgcgcggtcggaaggggaagtcgtgagggcaccttgattcggtgaagtggaagctccaccctccatgctcccagtaagcaggaaagcaatcaggtaatcacaccacatgagaaagcaatcaggtactcacgccgcatgaactaggtggcctgatacagtagttctgaatttataggtg

SEQ ID NO: 50475 - DNA, 3325 bp, Zea Mays
attctttcactcactctccagatccggtgcttgtgggagcctaacacgccccccgcctccctctccgccgtcgccgagtccctcgccggcttaccccgtcgctggcgaaggcactccggcgtggacgcctcgccgccccgcgggcggcgtcgacggtcggttttaggcctcccggaggctgcatcccgtgtcgattcgagtcaggatcctgggccaaatgcctctctttgatacgaaacctttctccttactggagccccctaaggacttcgatttaaatgagaaggtgttccaaatccgattcacaaaggagattgctacacctgatttccaaaggagccctaacttgtagtgtgatttaggggcgatcttggccctaggcgtgagatctcaccagctccggcactggtgccttgcacagctccatggcaagaacacaggggtcttgaaactggaacaggccccaaagtcacagtccacgctcgcctcttcggtcccattggagaatcatgttaacctccatgacgctactggcgcctgccaagcgttcgacgaaattccccacaaggacaccctggactatgcccttctcgacgacatggcagggtttcgtccaccaggcgctagaccacttcttggatgcgcaccgccgccagggcaggtgtgttggcggtggggcactgttaggcatcatcaaaatctgtgggtcagtgccagacagagtactggggaagcagctgcatgccctgtgcgtcaggtgtggacatgatcatggcgacatcagggtcggcacgtctcttgttgacatgtacatgaactggcacagtgttctggacggcaggaaggtgtttgagggaatgctcaagaggaatgttgtcacctggacatcgttgctcactgggtacatccaggctggagtgttattggatgttatgtcactcttcttcaggatgcgtgctgagggggtctggcccaatccgttcacattttcgagtgttctctcaatggtggcgagccagggtatggttgatcttgggcagcacgtgcatgctcaatcaattaagtttggttgctgctccactgtgtttgtgtgcaattctctgatgaacatgtatgcaaagtgtggactggttgaagaggccagggtcgtgttttgtaggatggagaccagggacatggtgtcgtggaacacattgatggcgggccttgtgttgaacgggcgtgatcttgaagccctacaactgttccatgattcacgatccagtattacaatgcttacagagtcaacatactcaacagtgatcaacttatgcgcaaatcttaaacaccttggcctggcacgtcaactccacagtagtgttcttaaacatggttttcattcgtatggcaatgtaatgacagccctcatggatgcctacaacaaagcaggtcaactggataaggctctggatgtatttttgttgatgtcaggatctcagaatgttgtttcatggactgctatgattgatgggtgcattcagaacggtgatatacctcttgctgctgctctttttagcagaatgagagaagatggtgttgctccgaatgatttaacctactcgacaattctgacagtgtcagaggccagctttcctccccaaattcatgcccaggtgatcaagacaaactatgagtgtacaccaactgttggaactgcacttatggtctcttactctaagctttgcagcactgaagaagctctttctatattcaaaatgattgaccagaaagatgttgtttcatggtctgcaatgttgacttgctatgcgcaagctggtgattgcaatggtgccacaaatgcattcatcaagatgaccatgcatggcttgaagccaaatgagtttacaatctctagtgctattgatgcttgtgctagtccggcagctggagttgacctgggtaggcagttccatgctatttctatcaagcacagatgccatgatgcactctgtgtgagcagtgcacttgttagtatgtatgcaagaaaaggaagcatcgagaatgctcagtgtgtctttgagaggcaaacagatagagatttgctgtcatggaactcaatgctatcagggtacgcacaacatggttacagccaaaaggcccttgatgtatttcgacagatggaagttgagggcattgatatggatggtcttacattcctttctgtgattatgggatgcgctcatgctggtcttgttgaagaaggtcagcaatactttgatttgatggtcagagactacgggatcactccaacgatggatcattatgcatgcatggttgatctctatagccgcgcaggcaagctggatgaaacaatgagcctcattgaaggcatgccattcccagcaggtccaacaatatggcgcgcattgctaggagcctgtagagttcacaagaatgttgagcttggaaagttggctgcggagaagctgctgtcacttgaacctcttgactcagctacgtacgtacttctctccaacatttattcggctgcagggaagtggaaagagaaggatgaagtgaggaagctaatggacactaaaaaggttaggaaagaagctggatgcagctggattcagatcaagaacaaagttcatttctttatagcttcagacaagtcgcatcctttatcagaacaaatatatgcaaagctcagggcaatgacagctaagttaaagcaagaaggttattgtcctgatacaagctttgtgcctcatgatgtggcagaagaccagaaagaagctatgctggcaatgcacagtgagcgcctagccctcgcatttggtttgatagctacaccaccagcggcaccccttcacattttcaagaacctgcgggtgtccggggacggccacacagtgatgaaaatggtctctgaaattgaggatagggagattgtaatgcgagattgctgcaggttccaccacttcaaatcaggggtctgctcttgtggcgatttctggtgaatggattttgaaaaaaaatggttgtgcattcaatgctcagccagtgtcccccttgaacaatatcactggtaagttggcttctagatgttttattgcctttcgtctgtcaggttggatgttattcctaacagaaaaggagtgagttagcacttattccaggtaatattcagatatcttagattccgacatgtaacattgcactaatcactcagcatcagggaatagtcaatcagtagcaacaggtagtacctgccaacagcgcttatgagataaggatgcatgccgatgcaggggcgtaccaattgtgaggtcgctacaccgtg

SEQ ID NO: 50476 - DNA, 3258 bp, Zea Mays
attctttcactcactctccagatccggtgcttgtgggagcctaacacgccccccgcctccctctccgccgtcgccgagtccctcgccggcttaccccgtcgctggcgaaggcactccggcgtggacgcctcgccgccccgcgggcggcgtcgacggtcggttttaggcctcccggaggctgcatcccgtgtcgattcgagtcaggatcctgggccaaatgcctctctttgatacgaaacctttctccttactggagccccctaaggacttcgatttaaatgagaaggtgatttaggggcgatcttggccctaggcgtgagatctcaccagctccggcactggtgccttgcacagctccatggcaagaacacaggggtcttgaaactggaacaggccccaaagtcacagtccacgctcgcctcttcggtcccattggagaatcatgttaacctccatgacgctactggcgcctgccaagcgttcgacgaaattccccacaaggacaccctggactatgcccttctcgacgacatggcagggtttcgtccaccaggcgctagaccacttcttggatgcgcaccgccgccagggcaggtgtgttggcggtggggcactgttaggcatcatcaaaatctgtgggtcagtgccagacagagtactggggaagcagctgcatgccctgtgcgtcaggtgtggacatgatcatggcgacatcagggtcggcacgtctcttgttgacatgtacatgaactggcacagtgttctggacggcaggaaggtgtttgagggaatgctcaagaggaatgttgtcacctggacatcgttgctcactgggtacatccaggctggagtgttattggatgttatgtcactcttcttcaggatgcgtgctgagggggtctggcccaatccgttcacattttcgagtgttctctcaatggtggcgagccagggtatggttgatcttgggcagcacgtgcatgctcaatcaattaagtttggttgctgctccactgtgtttgtgtgcaattctctgatgaacatgtatgcaaagtgtggactggttgaagaggccagggtcgtgttttgtaggatggagaccagggacatggtgtcgtggaacacattgatggcgggccttgtgttgaacgggcgtgatcttgaagccctacaactgttccatgattcacgatccagtattacaatgcttacagagtcaacatactcaacagtgatcaacttatgcgcaaatcttaaacaccttggcctggcacgtcaactccacagtagtgttcttaaacatggttttcattcgtatggcaatgtaatgacagccctcatggatgcctacaacaaagcaggtcaactggataaggctctggatgtatttttgttgatgtcaggatctcagaatgttgtttcatggactgctatgattgatgggtgcattcagaacggtgatatacctcttgctgctgctctttttagcagaatgagagaagatggtgttgctccgaatgatttaacctactcgacaattctgacagtgtcagaggccagctttcctccccaaattcatgcccaggtgatcaagacaaactatgagtgtacaccaactgttggaactgcacttatggtctcttactctaagctttgcagcactgaagaagctctttctatattcaaaatgattgaccagaaagatgttgtttcatggtctgcaatgttgacttgctatgcgcaagctggtgattgcaatggtgccacaaatgcattcatcaagatgaccatgcatggcttgaagccaaatgagtttacaatctctagtgctattgatgcttgtgctagtccggcagctggagttgacctgggtaggcagttccatgctatttctatcaagcacagatgccatgatgcactctgtgtgagcagtgcacttgttagtatgtatgcaagaaaaggaagcatcgagaatgctcagtgtgtctttgagaggcaaacagatagagatttgctgtcatggaactcaatgctatcagggtacgcacaacatggttacagccaaaaggcccttgatgtatttcgacagatggaagttgagggcattgatatggatggtcttacattcctttctgtgattatgggatgcgctcatgctggtcttgttgaagaaggtcagcaatactttgatttgatggtcagagactacgggatcactccaacgatggatcattatgcatgcatggttgatctctatagccgcgcaggcaagctggatgaaacaatgagcctcattgaaggcatgccattcccagcaggtccaacaatatggcgcgcattgctaggagcctgtagagttcacaagaatgttgagcttggaaagttggctgcggagaagctgctgtcacttgaacctcttgactcagctacgtacgtacttctctccaacatttattcggctgcagggaagtggaaagagaaggatgaagtgaggaagctaatggacactaaaaaggttaggaaagaagctggatgcagctggattcagatcaagaacaaagttcatttctttatagcttcagacaagtcgcatcctttatcagaacaaatatatgcaaagctcagggcaatgacagctaagttaaagcaagaaggttattgtcctgatacaagctttgtgcctcatgatgtggcagaagaccagaaagaagctatgctggcaatgcacagtgagcgcctagccctcgcatttggtttgatagctacaccaccagcggcaccccttcacattttcaagaacctgcgggtgtccggggacggccacacagtgatgaaaatggtctctgaaattgaggatagggagattgtaatgcgagattgctgcaggttccaccacttcaaatcaggggtctgctcttgtggcgatttctggtgaatggattttgaaaaaaaatggttgtgcattcaatgctcagccagtgtcccccttgaacaatatcactggtaagttggcttctagatgttttattgcctttcgtctgtcaggttggatgttattcctaacagaaaaggagtgagttagcacttattccaggtaatattcagatatcttagattccgacatgtaacattgcactaatcactcagcatcagggaatagtcaatcagtagcaacaggtagtacctgccaacagcgcttatgagataaggatgcatgccgatgcaggggcgtaccaattgtgaggtcgctacaccgtg

SEQ ID NO: 50477 - DNA, 3040 bp, Zea Mays
attctttcactcactctccagatccggtgcttgtgggagcctaacacgccccccgcctccctctccgccgtcgccgagtccctcgccggcttaccccgtcgctggcgaaggcactccggcgtggacgcctcgccgccccgcgggcggcgtcgacggtcggttttaggcctcccggaggctgcatcccgtgtcgattcgaggtgatttaggggcgatcttggccctaggcgtgagatctcaccagctccggcactggtgccttgcacagctccatggcaagaacacaggggtcttgaaactggaacaggccccaaagtcacagtccacgctcgcctcttcggtcccattggagaatcatgttaacctccatgacgctactggcgcctgccaagcgttcgacgaaattccccacaaggacaccctggactatgcccttctcgacgacatggcagggtttcgtccaccaggcgctagaccacttcttggatgcgcaccgccgccagggcaggtgtgttggcggtggggcactgttaggcatcatcaaaatctgtgggtcagtgccagacagagtactggggaagcagctgcatgccctgtgcgtcaggtgtggacatgatcatggcgacatcagggtcggcacgtctcttgttgacatgtacatgaactggcacagtgttctggacggcaggaaggtgtttgagggaatgctcaagaggaatgttgtcacctggacatcgttgctcactgggtacatccaggctggagtgttattggatgttatgtcactcttcttcaggatgcgtgctgagggggtctggcccaatccgttcacattttcgagtgttctctcaatggtggcgagccagggtatggttgatcttgggcagcacgtgcatgctcaatcaattaagtttggttgctgctccactgtgtttgtgtgcaattctctgatgaacatgtatgcaaagtgtggactggttgaagaggccagggtcgtgttttgtaggatggagaccagggacatggtgtcgtggaacacattgatggcgggccttgtgttgaacgggcgtgatcttgaagccctacaactgttccatgattcacgatccagtattacaatgcttacagagtcaacatactcaacagtgatcaacttatgcgcaaatcttaaacaccttggcctggcacgtcaactccacagtagtgttcttaaacatggttttcattcgtatggcaatgtaatgacagccctcatggatgcctacaacaaagcaggtcaactggataaggctctggatgtatttttgttgatgtcaggatctcagaatgttgtttcatggactgctatgattgatgggtgcattcagaacggtgatatacctcttgctgctgctctttttagcagaatgagagaagatggtgttgctccgaatgatttaacctactcgacaattctgacagtgtcagaggccagctttcctccccaaattcatgcccaggtgatcaagacaaactatgagtgtacaccaactgttggaactgcacttatggtctcttactctaagctttgcagcactgaagaagctctttctatattcaaaatgattgaccagaaagatgttgtttcatggtctgcaatgttgacttgctatgcgcaagctggtgattgcaatggtgccacaaatgcattcatcaagatgaccatgcatggcttgaagccaaatgagtttacaatctctagtgctattgatgcttgtgctagtccggcagctggagttgacctgggtaggcagttccatgctatttctatcaagcacagatgccatgatgcactctgtgtgagcagtgcacttgttagtatgtatgcaagaaaaggaagcatcgagaatgctcagtgtgtctttgagaggcaaacagatagagatttgctgtcatggaactcaatgctatcagggtacgcacaacatggttacagccaaaaggcccttgatgtatttcgacagatggaagttgagggcattgatatggatggtcttacattcctttctgtgattatgggatgcgctcatgctggtcttgttgaagaaggtcagcaatactttgatttgatggtcagagactacgggatcactccaacgatggatcattatgcatgcatggttgatctctatagccgcgcaggcaagctggatgaaacaatgagcctcattgaaggcatgccattcccagcaggtccaacaatatggcgcgcattgctaggagcctgtagagttcacaagaatgttgagcttggaaagttggctgcggagaagctgctgtcacttgaacctcttgactcagctacgtacgtacttctctccaacatttattcggctgcagggaagtggaaagagaaggatgaagtgaggaagctaatggacactaaaaaggttaggaaagaagctggatgcagctggattcagatcaagaacaaagttcatttctttatagcttcagacaagtcgcatcctttatcagaacaaatatatgcaaagctcagggcaatgacagctaagttaaagcaagaaggttattgtcctgatacaagctttgtgcctcatgatgtggcagaagaccagaaagaagctatgctggcaatgcacagtgagcgcctagccctcgcatttggtttgatagctacaccaccagcggcaccccttcacattttcaagaacctgcgggtgtccggggacggccacacagtgatgaaaatggtctctgaaattgaggatagggagattgtaatgcgagattgctgcaggttccaccacttcaaatcaggggtctgctcttgtggcgatttctggtgaatggattttgaaaaaaaatggttgtgcattcaatgctcagccagtgtcccccttgaacaatatcactggtaagttggcttctagatgttttattgcctttcgtctgtcaggttggatgttattcctaacagaaaaggagtgagttagcacttattccaggggcgtaccaattgtgaggtcgctacaccgtg

SEQ ID NO: 50478 - DNA, 8335 bp, Zea Mays
attctttcactcactctccagatccggtgcttgtgggagcctaacacgccccccgcctccctctccgccgtcgccgagtccctcgccggcttaccccgtcgctggcgaaggcactccggcgtggacgcctcgccgccccgcgggcggcgtcgacggtcggttttaggcctcccggaggctgcatcccgtgtcgattcgaggtgatttaggggcgatcttggccctaggcgtgagatctcaccagctccggcactggtgccttgcacagctccatggcaagaacacaggggtcttgaaactggaacaggccccaaagtcacagtccacgctcgcctcttcggtcccattggagaatcatgttaacctccatgacgctactggcgcctgccaagcgttcgacgaaattccccacaaggacaccctggactatgcccttctcgacgacatggcagggtttcgtccaccaggcgctagaccacttcttggatgcgcaccgccgccagggcaggtgtgttggcggtggggcactgttaggcatcatcaaaatctgtgggtcagtgccagacagagtactggggaagcagctgcatgccctgtgcgtcaggtgtggacatgatcatggcgacatcagggtcggcacgtctcttgttgacatgtacatgaactggcacagtgttctggacggcaggaaggtgtttgagggaatgctcaagaggaatgttgtcacctggacatcgttgctcactgggtacatccaggctggagtgttattggatgttatgtcactcttcttcaggatgcgtgctgagggggtctggcccaatccgttcacattttcgagtgttctctcaatggtggcgagccagggtatggttgatcttgggcagcacgtgcatgctcaatcaattaagtttggttgctgctccactgtgtttgtgtgcaattctctgatgaacatgtatgcaaagtgtggactggttgaagaggccagggtcgtgttttgtaggatggagaccagggacatggtgtcgtggaacacattgatggcgggccttgtgttgaacgggcgtgatcttgaagccctacaactgttccatgattcacgatccagtattacaatgcttacagagtcaacatactcaacagtgatcaacttatgcgcaaatcttaaacaccttggcctggcacgtcaactccacagtagtgttcttaaacatggttttcattcgtatggcaatgtaatgacagccctcatggatgcctacaacaaagcaggtcaactggataaggctctggatgtatttttgttgatgtcaggatctcagaatgttgtttcatggactgctatgattgatgggtgcattcagaacggtgatatacctcttgctgctgctctttttagcagaatgagagaagatggtgttgctccgaatgatttaacctactcgacaattctgacagtgtcagaggccagctttcctccccaaattcatgcccaggtgatcaagacaaactatgagtgtacaccaactgttggaactgcacttatggtctcttactctaagctttgcagcactgaagaagctctttctatattcaaaatgattgaccagaaagatgttgtttcatggtctgcaatgttgacttgctatgcgcaagctggtgattgcaatggtgccacaaatgcattcatcaagatgaccatgcatggcttgaagccaaatgagtttacaatctctagtgctattgatgcttgtgctagtccggcagctggagttgacctgggtaggcagttccatgctatttctatcaagcacagatgccatgatgcactctgtgtgagcagtgcacttgttagtatgtatgcaagaaaaggaagcatcgagaatgctcagtgtgtctttgagaggcaaacagatagagatttgctgtcatggaactcaatgctatcagggtacgcacaacatggttacagccaaaaggcccttgatgtatttcgacagatggaagttgagggcattgatatggatggtcttacattcctttctgtgattatgggatgcgctcatgctggtcttgttgaagaaggtcagcaatactttgatttgatggtcagagactacgggatcactccaacgatggatcattatgcatgcatggttgatctctatagccgcgcaggcaagctggatgaaacaatgagcctcattgaaggcatgccattcccagcaggtccaacaatatggcgcgcattgctaggagcctgtagagttcacaagaatgttgagcttggaaagttggctgcggagaagctgctgtcacttgaacctcttgactcagctacgtacgtacttctctccaacatttattcggctgcagggaagtggaaagagaaggatgaagtgaggaagctaatggacactaaaaaggttaggaaagaagctggatgcagctggattcagatcaagaacaaagttcatttctttatagcttcagacaagtcgcatcctttatcagaacaaatatatgcaaagctcagggcaatgacagctaagttaaagcaagaaggttattgtcctgatacaagctttgtgcctcatgatgtggcagaagaccagaaagaagctatgctggcaatgcacagtgagcgcctagccctcgcatttggtttgatagctacaccaccagcggcaccccttcacattttcaagaacctgcgggtgtccggggacggccacacagtgatgaaaatggtctctgaaattgaggatagggagattgtaatgcgagattgctgcaggttccaccacttcaaatcaggggtctgctcttgtggcgatttctggtgaatggattttgaaaaaaaatggttgtgcattcaatgctcagccagtgtcccccttgaacaatatcactggaggcggacatcttacaggtaaaatctgatgtgccacaaatgaggacaaggtaggacttcttcacttttgaaccgtcagaagaaaggcatgctcacaagcatagacatcgaatctataggattgttcaaactccattgttacatggtaactgaatatgaggccagtcaaccaatccaccagcaaaaccagcacacatggcaatggtcacaatcatttcactctgcttcgcattatcagcacgaaactgtagaacagctcttcaagttcccatgtttatcagtctgaacaaaaaaaactacatcagccaaatactgtgtttttaggacaaccggagagttaattgtctagcagttttctcttaattttacagcacaataggactcactgcatttcctaaaatgttataattagtcagcttcagcagagaagaaagtataacatggtaaaatcacactattctaaatatacagaaaaaaatctagaaaaggctacaagtggataatgtactaagttcagaagaaaagagccctcaacatacatctttgtgtcgggtaaaggaactcaccaaatgcatcacagggcatacttaccaaatcagcctgaaacgagttgaaaagggcaaacgtgttgatacatacaaatacgacatatgatgtaatgatcatacacaagcatggcacaaaaccgtcacactaaccctttctataccaaatacatcaatatctgaatgacatgaaacaacccaagaattttacctggatactattggagtgaatattccatagattagggttaacccaacaggttagctatatagtgtttacatgggccacatgggcctagccttaacaggcctaacactctaacacccccccgcagtctggacgtccgacgcagcggagtacacagactggactcaaaaagaagaagtacatcacacaataggatctccccacagactcaactagccactactgatgttgaggctggagcgaaactcggcgaaggtcgaggacggaagacccttggtgaagatgtcggcaaactgggaggtggtcgggacgtggaggacccgaacagtaccggcggcgacataatcacggacgaagtgtagatcgatctcgacatgcttggtccgctggtgctgcactgggttggtggagaggtagaccgcgctgacgttgtcgcagtagaccaccgtgctcctggagaggggactgtgaagctcggtaaggagctgccggagccagacagcctccgccacgccgttggccacgacacggtactccgcctctgcacttgagcgggaaacgaccggctggcgcttcgacgaccaggacactaggttgccgcctaagaagacagcgtagccggaggtggagcgccgagtgtctgggcacccggcccagtcaacatcagtgtagacgaccaactcggaggaggtagaccggtgaagaagcagtccgtagtcgacggtgccccggaggtagcggaggaggcgcttgagcgccgcaaggtggggctcccgagggtcgtgcatatggaggcagacctgctgcacggcgtaggagatgtctggcctggtgaaggtgaggtactgaagggcaccggcaagactcctatagccggtggggtccgcgactggggcacccgtggcctcagagagcttggcctgcgtgtcgactggggtggagcagggcttgcagtcacgcatctgggcccgctccagaatgtcaagagtatactgtcgctggtgaaggaggagtcctgaggggcgaggctcagcagtgacccccaggaaatggtgaaggacgcccagatctttgaccggaaactcccgctgaagcgcgtcaacgaagcggcgaagaagagacggactggaggcggtgaggacaatgtcatccacgtagagtagcaagtaggcagcctctgcgccatgatggtggacgaacaaagacgtgtcggacttggcctccacgaagcccagtgtcaccagaaatgtagccagtctggagtgccacacccggggggcctgcttgaggccgtagagggacctgttgagccggcagaccatgtcagggcgagaggagtccacgaaccccgcaggctgacagcggtagacggtctcggtgagggcgccgtgcaggaaggcgttcttgacgtcgagctggtgaactggccaggagcgagcgagggccagcgagagcaccgtgcggacagtggccggcttcacaaccgggctgaaggtctcatcgtagtcgactccggggcgctgagtgaagccccgaagaacccaacgagccttgtactggtccagggtaccatcggcccgtcgcttgtgtgtccagatccacttgccggtgacgacgttggtgccgggcggatggggcaccagatcccacgtctggttggcgacgagcgccgcgtactcctcctccatcgcctgacgccagtgggggtccagcagggcggtgcggacggaggagggtaccggagaaacctgcgagtctgcggtcgtggccgccagggcacggggtggcagggtaccggccgcgtgccgcgtcaccatcgggtggacatgccgtgggtcgcgatgaaggagcggtggatggtacaccggcgacacgggccgcgggtggccgcggcggaggtgtaggtgtccctggcggggactgggccaccggcggtgacaacgacaggggcggcgacggtggaggtgcgaaccccggcggcggcagccggcactggtagacccgcaccagccgggtgaagcgggtcggaggggtcgtaaccgacggccccgtaggcggtgcagtcccaccacccctcgctcggcctgggggcgatcggagacggggctccgcggagaggcgacaccaccgtaggcgacaccaccgaacccgagcaaggtaccgggccgggagtaggaccgacaggtggtgagcgagtacctgcagagagaggaaggagaggtggctcgaccaccgcgtcagtctgaaagagagtgaagaggtcaaggtcagggtcagaggagggtggtgtggtggagtagggaaatacggactcatcaaacaccacatggcgagagatgaggacccggcgagagcagaggtcaaagcagcggtagcctttgtggtccggggagtacccgagaaacacacagagggtggaacggggtgctagtttgtgaggagcagtggcagcggtgttcgggtagcaagcacacccgaagacacggaggtggtcatagcgcggaggggtaccgaagagtgcctggtgaggagtgggggccgggcacacagtggaagggagacggttgaggaggtaggtagaggtgtggagggcctcggcccagaaacgagccggaaggtgcgcctggagaagaagagtgcggatggtgtcgttggtcgtgcggatcatgcgcccaaccttgccgttctgggaggaggtatacgggcaagacatccgcaattgcatcccgtgagagagaaagaagtcacggaaggtggagttatcgaactcccgaccattgtcacactgaacggccttaatggtgaggccgaactgagtggacacccaggcgaagaagtggcggagggcggggaaagtctcagacttggcacgcaaaggaaaagtccacacataatgagaaaaatcatcaagcaccacaagatagtatttgtagcctgacatactggtaataggtgaagtccacaaatcgcagtgtacaagatcaaatgcatgagtagcatgtgaggaagaagaagaaaaaggaagacgcacatggcggcctaactggcacgcatgacaaagatgctcatcatgggatctagtacatgggatagtggcactacgagtaagctgcatcaaggcatcgcgtccggggtgaccaaggcgacgatgccaggtggtagaagacgtggcggcaacaaaaacaacagctgtgtcaggtgacgaagacgaagaagatgtggcgtacggaagccgaagggtgtagagggggccggtgctgtcacatctgaggagggggcgtcgagttgccgagtccttcacagtaagatcaaaagagtcaaactcgacagaacaagaattatcagcagtaaaccgacgaatagaaagaagattgtggaccaaagaaggagcgacaagaacatcgggaacgcgaaaagagccgggccggcggcacccacagatgtgacaggaagacacgagccattcgccaccatgatggacgaggggagagaggaaggaggagggcgaacagaggtgagtataccagggtcgggggtggtgtggtaggtagcaccggtgtccgcgatccactcgggacccagcggcggagtcaggaaggcagccagggcggccgcgtcccaaccaaccagcccggacggtggagtagccggaggcgtgggccacgacgaagcggcaggtgtcgaggtccagggcgacggagaggcgaaggcgaaaccaggctgcgcaccagcgaacatggccgccggaggccgagcctcagagccaggcccctggaacggccacacggagatgcgccctgaccacgggtggtggaaagtgggccaaggcgcactctgctggggccccggggtcgatgcgtggccacaggcaccaccgccggaaccaccaccaccaccgcggccaccacggcggcgacgaccactaccgcccccgcctccgccacctcgacccccgccgcccatgctcggcccgggagggcgagggccaagggcagactgtgacgaagtaggcggacgggtcgtggtgaaagccgctagtgctgtcgaagaggacgaggaccccgggccggagatcgatgcagcctgagcacccagagtgatctcctccagggcgaggtcgtcgcgaacctggaggaaggtaggaaaggggcgctggcgcatgagcaacgaccggaggtgggtgtagcgatcgccgaggccgcggaggacgttgaggactaggatgcggtcctccacggggcagcccagatcgccaagtgagtccgccatggtcttcatctggcggcagtacgcactgacactgaggtccccctggacgaaggtgcgaaaagcggcgtcgaggtggagagcccgggcctcggcgttgcccatgaactggccctcgatggcaagccaaacagcccgagcgtgaggaaggttccggaggaggctgtggaggtcgacggagatcgtccccacgatccaggtgagcacgatgctgtcgaggcgcacccacgcagcagtcggcgccacaccggtggggtcgcagaggacgtggtcatccagggcgtagcggcgaagggtgagaagaagcaagtcccgccaacgcgtgtaggatggcgactctgactccaggacgaccggaaccatcaggcgaatgttctggacactcccagcctgtaggtg

SEQ ID NO: 50479 - DNA, 8294 bp, Zea Mays
gtgagatccgcgaaacctaacgcgctccttgttttttcatcctgtttgttggatcgtactgcgacaaggccacaaggggcatcccatcccatgggggatggcgcggtcggtgcctcagcggcggtggcgtgggtgatttaggggcgatcttggccctaggcgtgagatctcaccagctccggcactggtgccttgcacagctccatggcaagaacacaggggtcttgaaactggaacaggccccaaagtcacagtccacgctcgcctcttcggtcccattggagaatcatgttaacctccatgacgctactggcgcctgccaagcgttcgacgaaattccccacaaggacaccctggactatgcccttctcgacgacatggcagggtttcgtccaccaggcgctagaccacttcttggatgcgcaccgccgccagggcaggtgtgttggcggtggggcactgttaggcatcatcaaaatctgtgggtcagtgccagacagagtactggggaagcagctgcatgccctgtgcgtcaggtgtggacatgatcatggcgacatcagggtcggcacgtctcttgttgacatgtacatgaactggcacagtgttctggacggcaggaaggtgtttgagggaatgctcaagaggaatgttgtcacctggacatcgttgctcactgggtacatccaggctggagtgttattggatgttatgtcactcttcttcaggatgcgtgctgagggggtctggcccaatccgttcacattttcgagtgttctctcaatggtggcgagccagggtatggttgatcttgggcagcacgtgcatgctcaatcaattaagtttggttgctgctccactgtgtttgtgtgcaattctctgatgaacatgtatgcaaagtgtggactggttgaagaggccagggtcgtgttttgtaggatggagaccagggacatggtgtcgtggaacacattgatggcgggccttgtgttgaacgggcgtgatcttgaagccctacaactgttccatgattcacgatccagtattacaatgcttacagagtcaacatactcaacagtgatcaacttatgcgcaaatcttaaacaccttggcctggcacgtcaactccacagtagtgttcttaaacatggttttcattcgtatggcaatgtaatgacagccctcatggatgcctacaacaaagcaggtcaactggataaggctctggatgtatttttgttgatgtcaggatctcagaatgttgtttcatggactgctatgattgatgggtgcattcagaacggtgatatacctcttgctgctgctctttttagcagaatgagagaagatggtgttgctccgaatgatttaacctactcgacaattctgacagtgtcagaggccagctttcctccccaaattcatgcccaggtgatcaagacaaactatgagtgtacaccaactgttggaactgcacttatggtctcttactctaagctttgcagcactgaagaagctctttctatattcaaaatgattgaccagaaagatgttgtttcatggtctgcaatgttgacttgctatgcgcaagctggtgattgcaatggtgccacaaatgcattcatcaagatgaccatgcatggcttgaagccaaatgagtttacaatctctagtgctattgatgcttgtgctagtccggcagctggagttgacctgggtaggcagttccatgctatttctatcaagcacagatgccatgatgcactctgtgtgagcagtgcacttgttagtatgtatgcaagaaaaggaagcatcgagaatgctcagtgtgtctttgagaggcaaacagatagagatttgctgtcatggaactcaatgctatcagggtacgcacaacatggttacagccaaaaggcccttgatgtatttcgacagatggaagttgagggcattgatatggatggtcttacattcctttctgtgattatgggatgcgctcatgctggtcttgttgaagaaggtcagcaatactttgatttgatggtcagagactacgggatcactccaacgatggatcattatgcatgcatggttgatctctatagccgcgcaggcaagctggatgaaacaatgagcctcattgaaggcatgccattcccagcaggtccaacaatatggcgcgcattgctaggagcctgtagagttcacaagaatgttgagcttggaaagttggctgcggagaagctgctgtcacttgaacctcttgactcagctacgtacgtacttctctccaacatttattcggctgcagggaagtggaaagagaaggatgaagtgaggaagctaatggacactaaaaaggttaggaaagaagctggatgcagctggattcagatcaagaacaaagttcatttctttatagcttcagacaagtcgcatcctttatcagaacaaatatatgcaaagctcagggcaatgacagctaagttaaagcaagaaggttattgtcctgatacaagctttgtgcctcatgatgtggcagaagaccagaaagaagctatgctggcaatgcacagtgagcgcctagccctcgcatttggtttgatagctacaccaccagcggcaccccttcacattttcaagaacctgcgggtgtccggggacggccacacagtgatgaaaatggtctctgaaattgaggatagggagattgtaatgcgagattgctgcaggttccaccacttcaaatcaggggtctgctcttgtggcgatttctggtgaatggattttgaaaaaaaatggttgtgcattcaatgctcagccagtgtcccccttgaacaatatcactgagtcacttgtacttgtttccttgttaggaggcggacatcttacaggtaaaatctgatgtgccacaaatgaggacaaggtaggacttcttcacttttgaaccgtcagaagaaaggcatgctcacaagcatagacatcgaatctataggattgttcaaactccattgttacatggtaactgaatatgaggccagtcaaccaatccaccagcaaaaccagcacacatggcaatggtcacaatcatttcactctgcttcgcattatcagcacgaaactgtagaacagctcttcaagttcccatgtttatcagtctgaacaaaaaaaactacatcagccaaatactgtgtttttaggacaaccggagagttaattgtctagcagttttctcttaattttacagcacaataggactcactgcatttcctaaaatgttataattagtcagcttcagcagagaagaaagtataacatggtaaaatcacactattctaaatatacagaaaaaaatctagaaaaggctacaagtggataatgtactaagttcagaagaaaagagccctcaacatacatctttgtgtcgggtaaaggaactcaccaaatgcatcacagggcatacttaccaaatcagcctgaaacgagttgaaaagggcaaacgtgttgatacatacaaatacgacatatgatgtaatgatcatacacaagcatggcacaaaaccgtcacactaaccctttctataccaaatacatcaatatctgaatgacatgaaacaacccaagaattttacctggatactattggagtgaatattccatagattagggttaacccaacaggttagctatatagtgtttacatgggccacatgggcctagccttaacaggcctaacactctaacacccccccgcagtctggacgtccgacgcagcggagtacacagactggactcaaaaagaagaagtacatcacacaataggatctccccacagactcaactagccactactgatgttgaggctggagcgaaactcggcgaaggtcgaggacggaagacccttggtgaagatgtcggcaaactgggaggtggtcgggacgtggaggacccgaacagtaccggcggcgacataatcacggacgaagtgtagatcgatctcgacatgcttggtccgctggtgctgcactgggttggtggagaggtagaccgcgctgacgttgtcgcagtagaccaccgtgctcctggagaggggactgtgaagctcggtaaggagctgccggagccagacagcctccgccacgccgttggccacgacacggtactccgcctctgcacttgagcgggaaacgaccggctggcgcttcgacgaccaggacactaggttgccgcctaagaagacagcgtagccggaggtggagcgccgagtgtctgggcacccggcccagtcaacatcagtgtagacgaccaactcggaggaggtagaccggtgaagaagcagtccgtagtcgacggtgccccggaggtagcggaggaggcgcttgagcgccgcaaggtggggctcccgagggtcgtgcatatggaggcagacctgctgcacggcgtaggagatgtctggcctggtgaaggtgaggtactgaagggcaccggcaagactcctatagccggtggggtccgcgactggggcacccgtggcctcagagagcttggcctgcgtgtcgactggggtggagcagggcttgcagtcacgcatctgggcccgctccagaatgtcaagagtatactgtcgctggtgaaggaggagtcctgaggggcgaggctcagcagtgacccccaggaaatggtgaaggacgcccagatctttgaccggaaactcccgctgaagcgcgtcaacgaagcggcgaagaagagacggactggaggcggtgaggacaatgtcatccacgtagagtagcaagtaggcagcctctgcgccatgatggtggacgaacaaagacgtgtcggacttggcctccacgaagcccagtgtcaccagaaatgtagccagtctggagtgccacacccggggggcctgcttgaggccgtagagggacctgttgagccggcagaccatgtcagggcgagaggagtccacgaaccccgcaggctgacagcggtagacggtctcggtgagggcgccgtgcaggaaggcgttcttgacgtcgagctggtgaactggccaggagcgagcgagggccagcgagagcaccgtgcggacagtggccggcttcacaaccgggctgaaggtctcatcgtagtcgactccggggcgctgagtgaagccccgaagaacccaacgagccttgtactggtccagggtaccatcggcccgtcgcttgtgtgtccagatccacttgccggtgacgacgttggtgccgggcggatggggcaccagatcccacgtctggttggcgacgagcgccgcgtactcctcctccatcgcctgacgccagtgggggtccagcagggcggtgcggacggaggagggtaccggagaaacctgcgagtctgcggtcgtggccgccagggcacggggtggcagggtaccggccgcgtgccgcgtcaccatcgggtggacatgccgtgggtcgcgatgaaggagcggtggatggtacaccggcgacacgggccgcgggtggccgcggcggaggtgtaggtgtccctggcggggactgggccaccggcggtgacaacgacaggggcggcgacggtggaggtgcgaaccccggcggcggcagccggcactggtagacccgcaccagccgggtgaagcgggtcggaggggtcgtaaccgacggccccgtaggcggtgcagtcccaccacccctcgctcggcctgggggcgatcggagacggggctccgcggagaggcgacaccaccgtaggcgacaccaccgaacccgagcaaggtaccgggccgggagtaggaccgacaggtggtgagcgagtacctgcagagagaggaaggagaggtggctcgaccaccgcgtcagtctgaaagagagtgaagaggtcaaggtcagggtcagaggagggtggtgtggtggagtagggaaatacggactcatcaaacaccacatggcgagagatgaggacccggcgagagcagaggtcaaagcagcggtagcctttgtggtccggggagtacccgagaaacacacagagggtggaacggggtgctagtttgtgaggagcagtggcagcggtgttcgggtagcaagcacacccgaagacacggaggtggtcatagcgcggaggggtaccgaagagtgcctggtgaggagtgggggccgggcacacagtggaagggagacggttgaggaggtaggtagaggtgtggagggcctcggcccagaaacgagccggaaggtgcgcctggagaagaagagtgcggatggtgtcgttggtcgtgcggatcatgcgcccaaccttgccgttctgggaggaggtatacgggcaagacatccgcaattgcatcccgtgagagagaaagaagtcacggaaggtggagttatcgaactcccgaccattgtcacactgaacggccttaatggtgaggccgaactgagtggacacccaggcgaagaagtggcggagggcggggaaagtctcagacttggcacgcaaaggaaaagtccacacataatgagaaaaatcatcaagcaccacaagatagtatttgtagcctgacatactggtaataggtgaagtccacaaatcgcagtgtacaagatcaaatgcatgagtagcatgtgaggaagaagaagaaaaaggaagacgcacatggcggcctaactggcacgcatgacaaagatgctcatcatgggatctagtacatgggatagtggcactacgagtaagctgcatcaaggcatcgcgtccggggtgaccaaggcgacgatgccaggtggtagaagacgtggcggcaacaaaaacaacagctgtgtcaggtgacgaagacgaagaagatgtggcgtacggaagccgaagggtgtagagggggccggtgctgtcacatctgaggagggggcgtcgagttgccgagtccttcacagtaagatcaaaagagtcaaactcgacagaacaagaattatcagcagtaaaccgacgaatagaaagaagattgtggaccaaagaaggagcgacaagaacatcgggaacgcgaaaagagccgggccggcggcacccacagatgtgacaggaagacacgagccattcgccaccatgatggacgaggggagagaggaaggaggagggcgaacagaggtgagtataccagggtcgggggtggtgtggtaggtagcaccggtgtccgcgatccactcgggacccagcggcggagtcaggaaggcagccagggcggccgcgtcccaaccaaccagcccggacggtggagtagccggaggcgtgggccacgacgaagcggcaggtgtcgaggtccagggcgacggagaggcgaaggcgaaaccaggctgcgcaccagcgaacatggccgccggaggccgagcctcagagccaggcccctggaacggccacacggagatgcgccctgaccacgggtggtggaaagtgggccaaggcgcactctgctggggccccggggtcgatgcgtggccacaggcaccaccgccggaaccaccaccaccaccgcggccaccacggcggcgacgaccactaccgcccccgcctccgccacctcgacccccgccgcccatgctcggcccgggagggcgagggccaagggcagactgtgacgaagtaggcggacgggtcgtggtgaaagccgctagtgctgtcgaagaggacgaggaccccgggccggagatcgatgcagcctgagcacccagagtgatctcctccagggcgaggtcgtcgcgaacctggaggaaggtaggaaaggggcgctggcgcatgagcaacgaccggaggtgggtgtagcgatcgccgaggccgcggaggacgttgaggactaggatgcggtcctccacggggcagcccagatcgccaagtgagtccgccatggtcttcatctggcggcagtacgcactgacactgaggtccccctggacgaaggtgcgaaaagcggcgtcgaggtggagagcccgggcctcggcgttgcccatgaactggccctcgatggcaagccaaacagcccgagcgtgaggaaggttccggaggaggctgtggaggtcgacggagatcgtccccacgatccaggtgagcacgatgctgtcgaggcgcacccacgcagcagtcggcgccacaccggtggggtcgcagaggacgtggtcatccagggcgtagcggcgaagggtgagaagaagcaagtcccgccaacgcgtgtaggatggcgactctgactccaggacgaccggaaccatcaggcgaatgttctggacactcccagcctgtaggtg

SEQ ID NO: 50480 - DNA, 3074 bp, Zea Mays
gttttttcatcctgtttgttggatcgtactgcgacaaggccacaaggggcatcccatcccatgggggatggcgcggtcggtgcctcagcggcggtggcgtgggtgatttaggggcgatcttggccctaggcgtgagatctcaccagctccggcactggtgccttgcacagctccatggcaagaacacaggggtcttgaaactggaacaggccccaaagtcacagtccacgctcgcctcttcggtcccattggagaatcatgttaacctccatgacgctactggcgcctgccaagcgttcgacgaaattccccacaaggacaccctggactatgcccttctcgacgacatggcagggtttcgtccaccaggcgctagaccacttcttggatgcgcaccgccgccagggcaggtgtgttggcggtggggcactgttaggcatcatcaaaatctgtgggtcagtgccagacagagtactggggaagcagctgcatgccctgtgcgtcaggtgtggacatgatcatggcgacatcagggtcggcacgtctcttgttgacatgtacatgaactggcacagtgttctggacggcaggaaggtgtttgagggaatgctcaagaggaatgttgtcacctggacatcgttgctcactgggtacatccaggctggagtgttattggatgttatgtcactcttcttcaggatgcgtgctgagggggtctggcccaatccgttcacattttcgagtgttctctcaatggtggcgagccagggtatggttgatcttgggcagcacgtgcatgctcaatcaattaagtttggttgctgctccactgtgtttgtgtgcaattctctgatgaacatgtatgcaaagtgtggactggttgaagaggccagggtcgtgttttgtaggatggagaccagggacatggtgtcgtggaacacattgatggcgggccttgtgttgaacgggcgtgatcttgaagccctacaactgttccatgattcacgatccagtattacaatgcttacagagtcaacatactcaacagtgatcaacttatgcgcaaatcttaaacaccttggcctggcacgtcaactccacagtagtgttcttaaacatggttttcattcgtatggcaatgtaatgacagccctcatggatgcctacaacaaagcaggtcaactggataaggctctggatgtatttttgttgatgtcaggatctcagaatgttgtttcatggactgctatgattgatgggtgcattcagaacggtgatatacctcttgctgctgctctttttagcagaatgagagaagatggtgttgctccgaatgatttaacctactcgacaattctgacagtgtcagaggccagctttcctccccaaattcatgcccaggtgatcaagacaaactatgagtgtacaccaactgttggaactgcacttatggtctcttactctaagctttgcagcactgaagaagctctttctatattcaaaatgattgaccagaaagatgttgtttcatggtctgcaatgttgacttgctatgcgcaagctggtgattgcaatggtgccacaaatgcattcatcaagatgaccatgcatggcttgaagccaaatgagtttacaatctctagtgctattgatgcttgtgctagtccggcagctggagttgacctgggtaggcagttccatgctatttctatcaagcacagatgccatgatgcactctgtgtgagcagtgcacttgttagtatgtatgcaagaaaaggaagcatcgagaatgctcagtgtgtctttgagaggcaaacagatagagatttgctgtcatggaactcaatgctatcagggtacgcacaacatggttacagccaaaaggcccttgatgtatttcgacagatggaagttgagggcattgatatggatggtcttacattcctttctgtgattatgggatgcgctcatgctggtcttgttgaagaaggtcagcaatactttgatttgatggtcagagactacgggatcactccaacgatggatcattatgcatgcatggttgatctctatagccgcgcaggcaagctggatgaaacaatgagcctcattgaaggcatgccattcccagcaggtccaacaatatggcgcgcattgctaggagcctgtagagttcacaagaatgttgagcttggaaagttggctgcggagaagctgctgtcacttgaacctcttgactcagctacgtacgtacttctctccaacatttattcggctgcagggaagtggaaagagaaggatgaagtgaggaagctaatggacactaaaaaggttaggaaagaagctggatgcagctggattcagatcaagaacaaagttcatttctttatagcttcagacaagtcgcatcctttatcagaacaaatatatgcaaagctcagggcaatgacagctaagttaaagcaagaaggttattgtcctgatacaagctttgtgcctcatgatgtggcagaagaccagaaagaagctatgctggcaatgcacagtgagcgcctagccctcgcatttggtttgatagctacaccaccagcggcaccccttcacattttcaagaacctgcgggtgtccggggacggccacacagtgatgaaaatggtctctgaaattgaggatagggagattgtaatgcgagattgctgcaggttccaccacttcaaatcaggggtctgctcttgtggcgatttctggtgaatggattttgaaaaaaaatggttgtgcattcaatgctcagccagtgtcccccttgaacaatatcactggtaagttggcttctagatgttttattgcctttcgtctgtcaggttggatgttattcctaacagaaaaggagtgagttagcacttattccaggtaatattcagatatcttagattccgacatgtaacattgcactaatcactcagcatcagggaatagtcaatcagtagcaacaggtagtacctgccaacagcgcttatgagataaggatgcatgccgatgcaggggcgtaccaattgtgaggtcgctacaccgtg

SEQ ID NO: 50481 - DNA, 195 bp, Zea Mays
cttgacgatcagcctttattccgatactcactccattgtccatcttcaggttggtccatcagcttcatcttgcaaattagtccacgcttggggtcgacttggctcgtcttccgcatcacgtgattaattaacgtacctgaatgaaatgcattatgcatatgaatgcatataaggaacaataacatcagactttac

SEQ ID NO: 50482 - DNA, 2456 bp, Zea Mays
gtgcgtgtggctgcaggcagagagggcagctcgttgttctcaatgtttcttgtgaaatcggcccatggagtaaagccttgattaaaagggaagatgggcccatagtaaagcctgagaggagggtcccggcccatcgacctcacggtctcgactctcctcgcagggacacgcacacgtacccacccacctgtgcacacagcgccgtcttctggagcagcgtccgaaagtgtgtggagaacctgcccgatccctcccgccgcctccgacctcaccgtcggcgggcttgttcctggggtctgatcagccatgttcaagaaacctgttgatgtgaaaaccatacagcgcttgtctggggcagacaaaaagaagctaagaagaactgccaagggaaggtttccacaggcttctgatgctgaccttgatgccatccttcctcccaaggctgagataacagttgctaagtacccgaaccatgttcttgtatatggcatagagggagagttcccaatgattttcaacactgacgcaagaggtcatgaactgtttcctacagtttatgcgctttggaaggtcccccatctgttgccagcttttacgcttaaaggtggtgaggtttcacgtttcgtgattggtggcgctgatctgatgtttcctggtatcagcatacctccagaagggtttccatcttttgaagctggccaaccatgggcagtaaaagttcctggtaaccctgctgcaattgcggttgggagcacaactatgagtagtactgaagctttgaaggcaggactacgtggcaaggctttaaagattttacattactacagggatatgttatgggattcggctgatggttgttatgtccctaatgaaggattttttgatgacattgttgttgaagatcctaatcctgtttcaacatctcaggctcctgattctgctgaagaacctgaagtcacgaatgatggtagtgtttcggctgaagatgcaggagtcgatatttcagacaatcatggtacaaatcctggcatccagattgaagcagtggaagagataactgatgttgttaacgaactaaaacttcccgaagataaaactactgaacaagcacctgttgaaatggaacatcataatttgagaactgaggaaattgattctctcttggacaaatgccttctgcaagcgctatacacaagcataaaagaaaaagatcttccaatgccaggaagtacactatgggcaaatcacatactaccgaacagacctcctggtgttactattgatataaaaaagtcatcacacaaaaagttgtcgaagtggttacaatcaaaatcttcatctggccttatttcagcaaaggaggacaaatataagaaggaagttgtattgcttgctatcaatcacaagcatccagactacatggcctttagaccggaaaagagggtacaggagcttgttgaacacgaaaaggatgttgctgaaagtagtgtcactaagcaattggaggttgcagagatttataagccaagttctcatgttaaacccatatttgtggctgtcgaagctgacatggagaagtattacagtgcaccagaggcttcagatatagtcttcaggtacgtcgaaaaggaaaaattggttaaacctacagacagggccaaggtgattcttgatgttacattatgtgatgcattgtacaaaggggctatcaaaaagggctcggcatacccaactgaaatccacaagaaagacttaggttcagcattcttaaaccgcatgcaagttcaccacaaggtatcgagaggaactcaggaggtcatacgcaagggtgccataagaactatccagatcatgacagaaagaagacagggcaacaagaagatgactcggctttctgggctcgagtgtttcctgatggatcctgattcattggcttctgagctccagaaaaaatttgcttgcagcaccaccacagcagagcttccaggtaagaaagggcagtacgaggtcttggtacaaggtggagtgattgatgaccttgctaaacaccttgtcgaccattacgatgttcctaaaagatacatcgaggtttatgacaaaacaaagaggtaggaagtgggggctgatcatgtccgtttaggtgttggagcgcttggatggtctacgaaatgatcccaggattgtttcatgatactttttgtcatcacatgtctgagcaatattacgacattgttgatctacgagtaccttacgatatttgttttcgttcctgcctttggttgatggaaaatgctattgtgcttactgaagaaatatggttacaggatggataatgaggtttcctcatgcttttggtgctgcagcttttcatgtccagtctgtcatcttataaagataacaatttgtagttcgtgcgactgatccatgatatgttagcatcattagtaacactcgtg

SEQ ID NO: 50483 - DNA, 2179 bp, Zea Mays
cgcacacgtacccacccacctgtgcacacagcgccgtcttctggagcagcgtccgaaagtgtgtggagaacctgcccgatccctcccgccgcctccgacctcaccgtcggcgggcttgttcctggggtctgatcagccatgttcaagaaacctgttgatgtgaaaaccatacagcgcttgtctggggcagacaaaaagaagctaagaagaactgccaagggaaggtttccacaggcttctgatgctgaccttgatgccatccttcctcccaaggctgagataacagttgctaagtacccgaaccatgttcttgtatatggcatagagggagagttcccaatgattttcaacactgacgcaagaggtcatgaactgtttcctacagcatacctccagaagggtttccatcttttgaagctggccaaccatgggcagtaaaagttcctggtaaccctgctgcaattgcggttgggagcacaactatgagtagtactgaagctttgaaggcaggactacgtggcaaggctttaaagattttacattactacagggatatgttatgggattcggctgatggttgttatgtccctaatgaaggattttttgatgacattgttgttgaagatcctaatcctgtttcaacatctcaggctcctgattctgctgaagaacctgaagtcacgaatgatggtagtgtttcggctgaagatgcaggagtcgatatttcagacaatcatggtacaaatcctggcatccagattgaagcagtggaagagataactgatgttgttaacgaactaaaacttcccgaagataaaactactgaacaagcacctgttgaaatggaacatcataatttgagaactgaggaaattgattctctcttggacaaatgccttctgcaagcgctatacacaagcataaaagaaaaagatcttccaatgccaggaagtacactatgggcaaatcacatactaccgaacagacctcctggtgttactattgatataaaaaagtcatcacacaaaaagttgtcgaagtggttacaatcaaaatcttcatctggccttatttcagcaaaggaggacaaatataagaaggaagttgtattgcttgctatcaatcacaagcatccagactacatggcctttagaccggaaaagagggtacaggagcttgttgaacacgaaaaggatgttgctgaaagtagtgtcactaagcaattggaggttgcagagatttataagccaagttctcatgttaaacccatatttgtggctgtcgaagctgacatggagaagtattacagtgcaccagaggcttcagatatagtcttcaggtacgtcgaaaaggaaaaattggttaaacctacagacagggccaaggtgattcttgatgttacattatgtgatgcattgtacaaaggggctatcaaaaagggctcggcatacccaactgaaatccacaagaaagacttaggttcagcattcttaaaccgcatgcaagttcaccacaaggtatcgagaggaactcaggaggtcatacgcaagggtgccataagaactatccagatcatgacagaaagaagacagggcaacaagaagatgactcggctttctgggctcgagtgtttcctgatggatcctgattcattggcttctgagctccagaaaaaatttgcttgcagcaccaccacagcagagcttccaggtaagaaagggcagtacgaggtcttggtacaaggtggagtgattgatgaccttgctaaacaccttgtcgaccattacgatgttcctaaaagatacatcgaggtttatgacaaaacaaagaggtaggaagtgggggctgatcatgtccgtttaggtgttggagcgcttggatggtctacgaaatgatcccaggattgtttcatgatactttttgtcatcacatgtctgagcaatattacgacattgttgatctacgagtaccttacgatatttgttttcgttcctgcctttggttgatggaaaatgctattgtgcttactgaagaaatatggttacaggatggataatgaggtttcctcatgcttttggtgctgcagcttttcatgtccagtctgtcatcttataaagataacaatttgtagttcgtgcgactgatccatgatatgttagcatcattagtaacactcgtg

SEQ ID NO: 50484 - DNA, 2272 bp, Zea Mays
cgcacacgtacccacccacctgtgcacacagcgccgtcttctggagcagcgtccgaaagtgtgtggagaacctgcccgatccctcccgccgcctccgacctcaccgtcggcgggctcagcttgttcctggggtctgatcagccatgttcaagaaacctgttgatgtgaaaaccatacagcgcttgtctggggcagacaaaaagaagctaagaagaactgccaagggaaggtttccacaggcttctgatgctgaccttgatgccatccttcctcccaaggctgagataacagttgctaagtacccgaaccatgttcttgtatatggcatagagggagagttcccaatgattttcaacactgacgcaagagtttatgcgctttggaaggtcccccatctgttgccagcttttacgcttaaaggtggtgaggtttcacgtttcgtgattggtggcgctgatctgatgtttcctggtatcagcatacctccagaagggtttccatcttttgaagctggccaaccatgggcagtaaaagttcctggtaaccctgctgcaattgcggttgggagcacaactatgagtagtactgaagctttgaaggcaggactacgtggcaaggctttaaagattttacattactacagggatatgttatgggattcggctgatggttgttatgtccctaatgaaggattttttgatgacattgttgttgaagatcctaatcctgtttcaacatctcaggctcctgattctgctgaagaacctgaagtcacgaatgatggtagtgtttcggctgaagatgcaggagtcgatatttcagacaatcatggtacaaatcctggcatccagattgaagcagtggaagagataactgatgttgttaacgaactaaaacttcccgaagataaaactactgaacaagcacctgttgaaatggaacatcataatttgagaactgaggaaattgattctctcttggacaaatgccttctgcaagcgctatacacaagcataaaagaaaaagatcttccaatgccaggaagtacactatgggcaaatcacatactaccgaacagacctcctggtgttactattgatataaaaaagtcatcacacaaaaagttgtcgaagtggttacaatcaaaatcttcatctggccttatttcagcaaaggaggacaaatataagaaggaagttgtattgcttgctatcaatcacaagcatccagactacatggcctttagaccggaaaagagggtacaggagcttgttgaacacgaaaaggatgttgctgaaagtagtgtcactaagcaattggaggttgcagagatttataagccaagttctcatgttaaacccatatttgtggctgtcgaagctgacatggagaagtattacagtgcaccagaggcttcagatatagtcttcaggtacgtcgaaaaggaaaaattggttaaacctacagacagggccaaggtgattcttgatgttacattatgtgatgcattgtacaaaggggctatcaaaaagggctcggcatacccaactgaaatccacaagaaagacttaggttcagcattcttaaaccgcatgcaagttcaccacaaggtatcgagaggaactcaggaggtcatacgcaagggtgccataagaactatccagatcatgacagaaagaagacagggcaacaagaagatgactcggctttctgggctcgagtgtttcctgatggatcctgattcattggcttctgagctccagaaaaaatttgcttgcagcaccaccacagcagagcttccaggtaagaaagggcagtacgaggtcttggtacaaggtggagtgattgatgaccttgctaaacaccttgtcgaccattacgatgttcctaaaagatacatcgaggtttatgacaaaacaaagaggtaggaagtgggggctgatcatgtccgtttaggtgttggagcgcttggatggtctacgaaatgatcccaggattgtttcatgatactttttgtcatcacatgtctgagcaatattacgacattgttgatctacgagtaccttacgatatttgttttcgttcctgcctttggttgatggaaaatgctattgtgcttactgaagaaatatggttacaggatggataatgaggtttcctcatgcttttggtgctgcagcttttcatgtccagtctgtcatcttataaagataacaatttgtagttcgtgcgactgatccatgatatgttagcatcattagtaacactcgtg

SEQ ID NO: 50485 - DNA, 2200 bp, Zea Mays
cacacgtacccacccacctgtgcacacagcgccgtcttctggagcagcgtccgaaagtgtgtggagaacctgcccgatccctcccgccgcctccgacctcaccgtcggcgggcttgttcctggggtctgatcagccatgttcaagaaacctgttgatgtgaaaaccatacagcgcttgtctggggcagacaaaaagaagctaagaagaactgccaagggaaggtttccacaggcttctgatgctgaccttgatgccatccttcctcccaaggctgagataacagttgctaagtacccgaaccatgttcttgtatatggcatagagggagagttcccaatgattttcaacactgacgcaagaggtcatgaactgtttcctacagtttatgcgctttggaaggtcccccatctgttgccagcttttacgcttaaaggtggtgaggtttcacgtttcgtgattggtggcgctgatctgatgtttcctggtatcagcatacctccagaagggtttccatcttttgaagctggccaaccatgggcagtaaaagttcctggtaaccctgctgcaattgcggttgggagcacaactatgagtagtactgaagctttgaaggcaggactacgtggcaaggctttaaagattttacattactacagggatatgttatgggattcggctgatggttgttatgtccctaatgaaggattttttgatgacattgttgttgaagatcctaatcctgtttcaacatctcaggctcctgattctgctgaagaacctgaagtcacgaatgatggtagtgtttcggctgaagatgcaggagtcgatatttcagacaatcatggtacaaatcctggcatccagattgaagcagtggaagagataactgatgttgttaacgaactaaaacttcccgaagataaaactactgaacaagcacctgttgaaatggaacatcataatttgagaactgaggaaattgattctctcttggacaaatgccttctgcaagcgctatacacaagcataaaagaaaaagatcttccaatgccaggaagtacactatgggcaaatcacatactaccgaacagacctcctggtgttactattgatataaaaaagtcatcacacaaaaagttgtcgaagtggttacaatcaaaatcttcatctggccttatttcagcaaaggaggacaaatataagaaggaagttgtattgcttgctatcaatcacaagcatccagactacatggcctttagaccggaaaagagggtacaggagcttgttgaacacgaaaaggatgttgctgaaagtagtgtcactaagcaattggaggttgcagagatttataagccaagttctcatgttaaacccatatttgtggctgtcgaagctgacatggagaagtattacagtgcaccagaggcttcagatatagtcttcaggggctatcaaaaagggctcggcatacccaactgaaatccacaagaaagacttaggttcagcattcttaaaccgcatgcaagttcaccacaaggtatcgagaggaactcaggaggtcatacgcaagggtgccataagaactatccagatcatgacagaaagaagacagggcaacaagaagatgactcggctttctgggctcgagtgtttcctgatggatcctgattcattggcttctgagctccagaaaaaatttgcttgcagcaccaccacagcagagcttccaggtaagaaagggcagtacgaggtcttggtacaaggtggagtgattgatgaccttgctaaacaccttgtcgaccattacgatgttcctaaaagatacatcgaggtttatgacaaaacaaagaggtaggaagtgggggctgatcatgtccgtttaggtgttggagcgcttggatggtctacgaaatgatcccaggattgtttcatgatactttttgtcatcacatgtctgagcaatattacgacattgttgatctacgagtaccttacgatatttgttttcgttcctgcctttggttgatggaaaatgctattgtgcttactgaagaaatatggttacaggatggataatgaggtttcctcatgcttttggtgctgcagcttttcatgtccagtctgtcatcttataaagataacaatttgtagttcgtgcgactgatccatgatatgttagcatcattagtaacactcgtg

SEQ ID NO: 50486 - DNA, 2262 bp, Zea Mays
acgtacccacccacctgtgcacacagcgccgtcttctggagcagcgtccgaaagtgtgtggagaacctgcccgatccctcccgccgcctccgacctcaccgtcggcgggcttgttcctggggtctgatcagccatgttcaagaaacctgttgatgtgaaaaccatacagcgcttgtctggggcagacaaaaagaagctaagaagaactgccaagggaaggtttccacaggcttctgatgctgaccttgatgccatccttcctcccaaggctgagataacagttgctaagtacccgaaccatgttcttgtatatggcatagagggagagttcccaatgattttcaacactgacgcaagagtttatgcgctttggaaggtcccccatctgttgccagcttttacgcttaaaggtggtgaggtttcacgtttcgtgattggtggcgctgatctgatgtttcctggtatcagcatacctccagaagggtttccatcttttgaagctggccaaccatgggcagtaaaagttcctggtaaccctgctgcaattgcggttgggagcacaactatgagtagtactgaagctttgaaggcaggactacgtggcaaggctttaaagattttacattactacagggatatgttatgggattcggctgatggttgttatgtccctaatgaaggattttttgatgacattgttgttgaagatcctaatcctgtttcaacatctcaggctcctgattctgctgaagaacctgaagtcacgaatgatggtagtgtttcggctgaagatgcaggagtcgatatttcagacaatcatggtacaaatcctggcatccagattgaagcagtggaagagataactgatgttgttaacgaactaaaacttcccgaagataaaactactgaacaagcacctgttgaaatggaacatcataatttgagaactgaggaaattgattctctcttggacaaatgccttctgcaagcgctatacacaagcataaaagaaaaagatcttccaatgccaggaagtacactatgggcaaatcacatactaccgaacagacctcctggtgttactattgatataaaaaagtcatcacacaaaaagttgtcgaagtggttacaatcaaaatcttcatctggccttatttcagcaaaggaggacaaatataagaaggaagttgtattgcttgctatcaatcacaagcatccagactacatggcctttagaccggaaaagagggtacaggagcttgttgaacacgaaaaggatgttgctgaaagtagtgtcactaagcaattggaggttgcagagatttataagccaagttctcatgttaaacccatatttgtggctgtcgaagctgacatggagaagtattacagtgcaccagaggcttcagatatagtcttcaggtacgtcgaaaaggaaaaattggttaaacctacagacagggccaaggtgattcttgatgttacattatgtgatgcattgtacaaaggggctatcaaaaagggctcggcatacccaactgaaatccacaagaaagacttaggttcagcattcttaaaccgcatgcaagttcaccacaaggtatcgagaggaactcaggaggtcatacgcaagggtgccataagaactatccagatcatgacagaaagaagacagggcaacaagaagatgactcggctttctgggctcgagtgtttcctgatggatcctgattcattggcttctgagctccagaaaaaatttgcttgcagcaccaccacagcagagcttccaggtaagaaagggcagtacgaggtcttggtacaaggtggagtgattgatgaccttgctaaacaccttgtcgaccattacgatgttcctaaaagatacatcgaggtttatgacaaaacaaagaggtaggaagtgggggctgatcatgtccgtttaggtgttggagcgcttggatggtctacgaaatgatcccaggattgtttcatgatactttttgtcatcacatgtctgagcaatattacgacattgttgatctacgagtaccttacgatatttgttttcgttcctgcctttggttgatggaaaatgctattgtgcttactgaagaaatatggttacaggatggataatgaggtttcctcatgcttttggtgctgcagcttttcatgtccagtctgtcatcttataaagataacaatttgtagttcgtgcgactgatccatgatatgttagcatcattagtaacactcgtg

SEQ ID NO: 50487 - DNA, 2200 bp, Zea Mays
acgtacccacccacctgtgcacacagcgccgtcttctggagcagcgtccgaaagtgtgtggagaacctgcccgatccctcccgccgcctccgacctcaccgtcggcgggctcagcttgttcctggggtctgatcagccatgttcaagaaacctgttgatgtgaaaaccatacagcgcttgtctggggcagacaaaaagaagctaagaagaactgccaagggaaggtttccacaggcttctgatgctgaccttgatgccatccttcctcccaaggctgagataacagttgctaagtacccgaaccatgttcttgtatatggcatagagggagagttcccaatgattttcaacactgacgcaagaggtcatgaactgtttcctacagtttatgcgctttggaaggtcccccatctgttgccagcttttacgcttaaaggtggtgaggtttcacgtttcgtgattggtggcgctgatctgatgtttcctggtatcagcatacctccagaagggtttccatcttttgaagctggccaaccatgggcagtaaaagttcctggtaaccctgctgcaattgcggttgggagcacaactatgagtagtactgaagctttgaaggcaggactacgtggcaaggctttaaagattttacattactacagggatatgttatggctcctgattctgctgaagaacctgaagtcacgaatgatggtagtgtttcggctgaagatgcaggagtcgatatttcagacaatcatggtacaaatcctggcatccagattgaagcagtggaagagataactgatgttgttaacgaactaaaacttcccgaagataaaactactgaacaagcacctgttgaaatggaacatcataatttgagaactgaggaaattgattctctcttggacaaatgccttctgcaagcgctatacacaagcataaaagaaaaagatcttccaatgccaggaagtacactatgggcaaatcacatactaccgaacagacctcctggtgttactattgatataaaaaagtcatcacacaaaaagttgtcgaagtggttacaatcaaaatcttcatctggccttatttcagcaaaggaggacaaatataagaaggaagttgtattgcttgctatcaatcacaagcatccagactacatggcctttagaccggaaaagagggtacaggagcttgttgaacacgaaaaggatgttgctgaaagtagtgtcactaagcaattggaggttgcagagatttataagccaagttctcatgttaaacccatatttgtggctgtcgaagctgacatggagaagtattacagtgcaccagaggcttcagatatagtcttcaggtacgtcgaaaaggaaaaattggttaaacctacagacagggccaaggtgattcttgatgttacattatgtgatgcattgtacaaaggggctatcaaaaagggctcggcatacccaactgaaatccacaagaaagacttaggttcagcattcttaaaccgcatgcaagttcaccacaaggtatcgagaggaactcaggaggtcatacgcaagggtgccataagaactatccagatcatgacagaaagaagacagggcaacaagaagatgactcggctttctgggctcgagtgtttcctgatggatcctgattcattggcttctgagctccagaaaaaatttgcttgcagcaccaccacagcagagcttccaggtaagaaagggcagtacgaggtcttggtacaaggtggagtgattgatgaccttgctaaacaccttgtcgaccattacgatgttcctaaaagatacatcgaggtttatgacaaaacaaagaggtaggaagtgggggctgatcatgtccgtttaggtgttggagcgcttggatggtctacgaaatgatcccaggattgtttcatgatactttttgtcatcacatgtctgagcaatattacgacattgttgatctacgagtaccttacgatatttgttttcgttcctgcctttggttgatggaaaatgctattgtgcttactgaagaaatatggttacaggatggataatgaggtttcctcatgcttttggtgctgcagcttttcatgtccagtctgtcatcttataaagataacaatttgtagttcgtgcgactgatccatgatatgttagcatcattagtaacactcgtg

SEQ ID NO: 50488 - DNA, 2217 bp, Zea Mays
atttgtgatccctcggctcgttagccctcccggatacgctcagcttgttcctggggtctgatcagccatgttcaagaaacctgttgatgtgaaaaccatacagcgcttgtctggggcagacaaaaagaagctaagaagaactgccaagggaaggtttccacaggcttctgatgctgaccttgatgccatccttcctcccaaggctgagataacagttgctaagtacccgaaccatgttcttgtatatggcatagagggagagttcccaatgattttcaacactgacgcaagaggtcatgaactgtttcctacagtttatgcgctttggaaggtcccccatctgttgccagcttttacgcttaaaggtggtgaggtttcacgtttcgtgattggtggcgctgatctgatgtttcctggtatcagcatacctccagaagggtttccatcttttgaagctggccaaccatgggcagtaaaagttcctggtaaccctgctgcaattgcggttgggagcacaactatgagtagtactgaagctttgaaggcaggactacgtggcaaggctttaaagattttacattactacagggatatgttatgggattcggctgatggttgttatgtccctaatgaaggattttttgatgacattgttgttgaagatcctaatcctgtttcaacatctcaggctcctgattctgctgaagaacctgaagtcacgaatgatggtagtgtttcggctgaagatgcaggagtcgatatttcagacaatcatggtacaaatcctggcatccagattgaagcagtggaagagataactgatgttgttaacgaactaaaacttcccgaagataaaactactgaacaagcacctgttgaaatggaacatcataatttgagaactgaggaaattgattctctcttggacaaatgccttctgcaagcgctatacacaagcataaaagaaaaagatcttccaatgccaggaagtacactatgggcaaatcacatactaccgaacagacctcctggtgttactattgatataaaaaagtcatcacacaaaaagttgtcgaagtggttacaatcaaaatcttcatctggccttatttcagcaaaggaggacaaatataagaaggaagttgtattgcttgctatcaatcacaagcatccagactacatggcctttagaccggaaaagagggtacaggagcttgttgaacacgaaaaggatgttgctgaaagtagtgtcactaagcaattggaggttgcagagatttataagccaagttctcatgttaaacccatatttgtggctgtcgaagctgacatggagaagtattacagtgcaccagaggcttcagatatagtcttcaggtacgtcgaaaaggaaaaattggttaaacctacagacagggccaaggtgattcttgatgttacattatgtgatgcattgtacaaaggggctatcaaaaagggctcggcatacccaactgaaatccacaagaaagacttaggttcagcattcttaaaccgcatgcaagttcaccacaaggtatcgagaggaactcaggaggtcatacgcaagggtgccataagaactatccagatcatgacagaaagaagacagggcaacaagaagatgactcggctttctgggctcgagtgtttcctgatggatcctgattcattggcttctgagctccagaaaaaatttgcttgcagcaccaccacagcagagcttccaggtaagaaagggcagtacgaggtcttggtacaaggtggagtgattgatgaccttgctaaacaccttgtcgaccattacgatgttcctaaaagatacatcgaggtttatgacaaaacaaagaggtaggaagtgggggctgatcatgtccgtttaggtgttggagcgcttggatggtctacgaaatgatcccaggattgtttcatgatactttttgtcatcacatgtctgagcaatattacgacattgttgatctacgagtaccttacgatatttgttttcgttcctgcctttggttgatggaaaatgctattgtgcttactgaagaaatatggttacaggatggataatgaggtttcctcatgcttttggtgctgcagcttttcatgtccagtctgtcatcttataaagataacaatttgtagttcgtgcgactgatccatgatatgttagcatcattagtaacactcgtg

SEQ ID NO: 50489 - DNA, 2547 bp, Zea Mays
caacttattccctcttccaaattataaggcattttggcttctctagatacattgtttttactatgtatttaaatataatgtatagctaaatgcatagtgaaaactacatatatagaaaaagctaaaatgtcttataatttttaaaggagggagtgcaattttgtggggtgataccggacgtaacttttttaacataacttaaaactcaacttagtacacaaactttataaaggagtagattgaaccaactgaaatagcttgggaaataaaatataatattctagggggtttatccagccagacaaatttcagagtagtaatttgtactttctcccttaagctataacaattatcctcacataatacttgaggaaggaaatagagtgattacctgttttccagcaaaatagcgtccattcatgctgctgtaggcaagaagagctgaatccaacgatttatagtgcacataaacattccctcgaagatggaaagacccatttctacatacctaacatattaactggaatcatttcgataattctatcggatgaaaaattgtacataagcctaaatttatgaaaattgcaaaacagtgtttcaactcccacggggaacaatcgtttagaggtgcctatctgattcacagcgctaacaactgagtggctaatactctgcagcccttctatttcaaatttgtgtcaaaatttaacttcgcccatagtaacaagtggtgtgcattctagtaagtagaaagataaaaatagaaagaggtctaacagtcaatcatatatgcgaatagcgaggtgaggttaaaatgcttagctaagactaagtttgcgtttgaattctttaccagggactgtttagccttgctgagagacaatgcagaacagggacatgcatttgaatagttggtaagcctatcttgaggtctgtgctgccaaggatttaccgtgctgtggtcagaaagcaaaatctgctcaccttgcctagcaaaggttctctagcctagcatagcaaggtaaggaaaactagctagggaaccaaatgccccctaagtcttcagaagtttggacatattctagtatgcaatagcagtggactactaaagtgaaccagtctcctcatgtagagcttaagaaataccgataaaccatgatcaatttaattgtaagctaattctccaactctctctcactaaggcaaccacgaccctaagaagatatcataatccttttagaatttagagcaacaatcatgcgtagtaaactcggccgataggggaaagaccatccccacggtattatattaaaagaagctcaatcggagttccaaccgagaaaggtcacgaaagctggccccccgtgcaacgtgagggttcgccccctataggccgaatctttactcgtgctttgagccctcacagcccgtacacgaggatccgccccctataggtgataggtcagtccatctcgtgtgcacacaaccaggggaaccaacgagtgaccttttttaacctcagcctaaaattcgctcccactggaattcgaacttaggacctatggagtgctactcaaaccaactaaccaactcggctagacaattgaatataatgaatacagcagtaagtgaagcattggcttagggaatcatgttgttcaggacaaaaggaggcacaaagaaccttgaaattcacaagttcaccaaatttcagaaattctgtatgtacatcttcataaaattcttcatagctttgttcaatctcttcatctgtgaactggaaaatgttaaggaataacttattagtctgtgttcaaactatgaagaaaacaaacgccttattgcaattactattagcactaatagtaggaataggaaacaaaaaaggggaaagagtgaaccaaaagtagagggtctatttagctctacttcacaaacagaattcttgttttcacagaggatcaaaatagattcacctgtcaccctaatggtcaccaaagacgtccaataaaagaaatactcctcaacggttcaacatttaaaatttcccgaatattagcagatcaaagttcaagacgtcctcaatcaagtgaaatcaactggtctgatcactgtatgcctcaagtcgaagttctgaagataacacgaaagaacatgcaatctgtcgcgagtctgatagtagccaaggaaaacttggggtaagagttatcttgagcagtagattaaaaaaattcaaatagttccaagtagtcagttatttatactcatgtcttcttataaaggcttacaagcttaaagtggaatacttgttattttgacatgagcttgctttagtattaaactatcacaacttaaaatggcactgcccatgaaaccaaaattgagcatccttaaacgtaaataaacagtagtttaaggatacaaagttatgcattagagaatttcctctaacaaacctcaagcccttcatcttgctccaaagcaaggcctggaccgttatacatgtttttcattagcaatgtgattgatttatcagggtaaaagtga

SEQ ID NO: 50490 - DNA, 1837 bp, Zea Mays
ggcttgttcgccaaattggcagctcgccacgttcttcttctctcaaccttcccctctttctctacttctcgtcccaactcccaagttgcaacccagccacctcgtctcctcccctccaactccaagcctactcccacccgatcccccctgccccgccccgggcgccgccggttctcgcattcgcggcagtccatctcgttgccccttcccggcggcctctgatccgtgctgctcgtcgcccacgcgaaacctgccgcctcccttgttgccgcgaccgcgagccctctcccctcccctcgcggccctgatctcagttccactgtgccccgaccgtgatccgtccgcacccgcttcatgcccagcagcgttcaacccgtcccctaaatgccgctgcctccaaatagttctccgtgtgctggttcttgcggattgcgctgtcaggtctacataatattgggggcggtgcagagtgtcctccgttttttcctctctcgcacctaaagttttcgggagcagttagttagagtatattcgattccccctgatatagtttgtttatttcacactacgaagtctatgcactcgagagaaaaatcactggtagcgacggcatcaattcttgtgacgtttagtagctagaacaccctcactagcgctcattcatgtttactcgaccttgtccttttcccttccatcttccgtgtgctggtatcaatttgttgtaatttggggagaccaggagttttctcgccttcttgcccttgttctgcccgtagtaagtgcttgccgtttggttgattggaactcccaagtgttcgtcggtcacatttatatagctttacctcactaggataatcataagcaaggtttccccaaaattcttagaccagttgggatcaggacccgaaggtagattgtgttggctatttgccggtagggcattgtgactccgtgatgtcttgcacctctccagatccaccagactactgctcagccgaatcgcctgagctcaagctataccaggccttcatcttctcggtgcctgtcttcttcacgttcgtcttgcttctcttcttctacctcttctacttgaggcggcgcagggccaattggcagtccttgcggatgaggacaaataatttgatacgaggagataatgccagagtgctcggtctgcctagcagaatacgaaccggacgagaggcttcagaagatacctccctgtgggcataccttccacatcaactgtatcgaccactggctctccacaaacaccacctgccccctctgccgagtatcgctccttcccgcccccaaggcaaccagcaccggactggatctggaagcacagactgcggtagaagaggagtctccgaacgcacatcatcgccaggaggagggactcgttgatgccaacacaccacaggaaggtgaggcggccggaggtgacggatcaagtagcgtccaggttgaagaactgcacggcgatgcggccgagccattggcggtgacggtggtcgctgtcgctgcgcctcaggctgacgctgaaggttcaccgagtacagcatgccaaactgttaaagggaagaaataaggatagcctagcccatcgatgtatttctattaccattgtgtgtttagctgggaaaggaaaaaaacgcataaagatggggccattgatgttatgattgccatttttctggggaggaagaagaagagcaagagttcagttgtggggaaatcttattgatacagcacttaacataaccgagattagtagtacttgtgagctgtttttcatctggtaaaccatactgtcagataacaggtgtttgtt

SEQ ID NO: 50491 - DNA, 2600 bp, Zea Mays
cttaatccctctctagattatattaggtccacttggtgaatttatcccttgcaaacgaacgtgcagctgagctgggtgggccttgcgcagcttccgtttcgtttccattcattcattcaacagtgacgacgacgtggagttgcatgcagccgtgcagtggggttacggtcgagaatggtcctagtgcagtgcagtggattgctttgcttcgtccataagtagatgccgaaggaaggaagagaggaagcaagcaaagcgagcgagacatcgagtagacgcccacggacggacgacggaggacgtacggaccaagtagaagcaagtagtaggcatggcggaggcagaggcccatggcatcgtcatcgtcggcggtggcatctgcggcctagccaccgctcttgctcttcaccggaaagggattcctagccttgtgttggagaagtccaggagcctgcgagcggacggcgcgggcatcggcgtgcacgccaacggatggcgagctttggagcagcttggcgtcgccgcggagcttagagagactgcacagcttatcaccgtgtaccatgacgtgtggcagcagggagacaaaacgagccgggaaaaggttccagtaaggatggagctccgatgcttaaacagaaaggacctgatcgaggcactggccaaggacatccctgcaggcgcgatccgattcggctgccgcgtcgctgccgtcgctgcggaccccggcggcggtcacggcgccgtcctgacaatggcggacggtactgccatgaaggccaaggtcctgatcgggtgcgagggcacatactccgcggtggccaggtaccttgggctgtctccggtgaggacgatcccgcgcccggtgctacggggcttcacctggtatccgcacggccactccttcgacacggagttcctgcgcctgcgcgttggaggcttcttcatcggcaggctgaccatcacggacaatctggtccatttcttcgtgacgatgcccaaacagcccacagcggatgtcatcaaggacctgaagcgagtgagagatcacgcgctgaaggatctgcaggacgtagaatgccccggcgagatcatcgagatcgtccgcgggtcggacccggagtccctcaacttggtcacggagttctggtaccggccgccgtgggaggtcgtcctgggcagcttccagaggggcgccgtgacggtcgccggcgacgccatgcacgccatgggcccgttcatcggccagggcggctcggcggggctggaggacgccgtcgtgctcgcgcggtctctggcgcgggcggccgtggacgacagcgacaacgcgcgcgagaagaaggtggtcggcgaggcgatcggggagtacgtcagggagaggaggccgcggctggcgctgctgtccctcgagtccttcgtcatgggggcgctgctggtgcgctcgccgtctccggtcaccaagctggtctgcgtcgccgtgctcattctcttgggcagcaagtcgttaaggcatgccaactatgactgcggtcgcctctaggctcgagctgtagtggcccgggtactgcctgctggggtccaggcaccaccgtctgctaggagattatcataacaaggcggacttctccactccctgtctgagtgtggtctcataagcctgggctcaaaggcccataatcgtgggaatggtacctcgatgaataatgatcagcgccaggaggtcctctatgactctatctcgaatccgatgagtggtggcggcttgaggctggggcggggtgctaccccacagccactggtcaccattgtctggaataggagcgtttattccagggaattccactgccatcctttggttgtgacgctttgccttgctctgaaagctctcccctatagatggccatatagcactaacacggtgagccagcccgggcacggcactaaaaagcacgacccagcccgaaccagatccagcccatacactgtgtcgtgcataggccaccagctcagcccatagtatcgacccaggcccaacacggtatactgggttggcacgcccaggcgccaggcccagccaagcgccatatccccatatgccaaagtcgcgcccgcgggcttaaccataaacgcctcgtccatagacaactctccttcctctcgcagtctcgcgcagccgcgaactccttctccctcggtttctcctcctccgctgcgatctgtcctctcttcggtctccctctcctctctccgacctccggctctccacctccgctcagatatatcgtcggcgatcctcccccgctccatcctcaacggatttgcgcgtttgtggaaccatgtaactcctatccgtaaccttaactcggtaactcctatcttcttctccgcctccggtgtcatctacaccaattggtgtccactggccgacattggcacacgacacagcatcatcctcgtctacctcgtcgtctccctcgagctcatacgccgtcgacggctactgtgatccagattcaaatccgttgaggaaccgggtggccggatcggttgttcgtcgacggtcgatcggtcgacgtcgtctgtggagatctcggtgctcc

SEQ ID NO: 50492 - DNA, 2389 bp, Zea Mays
ccctgtccattcccggcacaccgcgacagcatttaactagcgtgcgtcacctcccgtcctactgcttcctctcgaggctccgagccgcccgttagtagtgtagacctgcctccgccttctcctcgccaacgcgccaccgcagtaaagagcgcggattaattccagggcgaggggggagactcacctccattacgctccgtcccccttccccggcgtgcaccgtgcagtaggtatctgtgcattcctgccctgctgtggttggctaggtaggggtggtaactggtaagaacagcaagaaccaaccatggctgctgatgttgggcttcggttcaacggctggtcatactcggatttgccttacaacgaccacaatgcacaggattcatcagttcaggaaatggtgctcaaccatggctcggtgtcattcggtagatttgctgcagaatcattgtcatgggaaagaaggtcagtgtttgaacataacagacgccaagaggaactaagcaagctcacagcccctggtttggttgcacaaaagaaggctttctttgaagaatattacaagagggcaagacatctcaaggctcagggggtattgcaccaggctggagccgcagtggaggagaacgatagcagccaggcagatgaattgccagcagctatgtctgaagatccagtagccactgctccaagttctagttttgagccttccactgatgttgagagcaaatgccaggatgctcatgagcacgggtacttgacatttaatcctttattttctcagacagcaagcttgccaaacattcaggaggagagttctagctctggtcaaaagcatggattcagttgtgaaactattgagagaaaagttcttgcaccaagacgtgtggcatcaaatgataatgatcaaagcaatattgctggatcaaggattgtcttaccaatagtcagtctacaatcagaatacctcaaagctgatcctgagaagagtgaggcaagcaaaaatgtacctattattaataggtcaaaaaaggtatcaaaggacctggcaacttctgttatcagcatcccaagggtagatttaagaaggaattcagaaaacggaccctctcgagacttggaggatccattccacaagagagttgagatgaaattgcgtgctttatctgatcggatggatgctgacagaactacggcctctagtagatcatcctcttaccaacctcctgagagagctatgacctcagctagatctgcatatcaagatagactagcaatatcttctagatccagtgtgtctcagaacactagtaaagccttggcaccttctaaattagctgctcaagcttcccataaatttcttaaaggtgtgcagcgtttagatgccatgccccgtggtattttcgttaataaaggatcaagtgcttctcttgttgcttcttgcaacagtagtgcaactgggaagttgtctgccaagattttggtggcacccagttcgtctcaagttggtgcaaagacttccaggactgctcaggttacaccgaaaagagcagcaggacctaccagtgtaaacaatgtgtcacacaataaaaggaagcacacaccggtcgcattgggtgaaaaatacccaaagagagagtatgtgcgcagatctgcacctccaagtgcaagaagcagctccgagaatctccctcgtgctgcaaaggcgcctaagatatcaaaagtgatgaatgcggtgtccaaggctgaagctgtgcagaagtcaaaatcatcaagcaatcttgttggaggaagaaatttatcgacaaagcgctccgcaaactgcaatgaagaaaacagaaaggcgatcccgtcgcgcaaggtaaacatggctgaatgcacgaggagcaatctgaaaggtggcccatcactgactaagaacaagccacggtaggtgaagccactgacgaattaattgctcagcacatccagcattagctttaagctgcaagagaggccacggtggagatgattgccaggcgagagaagccacgaatccaccacggtgattattaaatagtcttgagaagcatcgatcacctggagcctcaaacgtgtacctctggttagttttgcaacacgaaattgagtgccggccatcaaaagcatacagcaccaagacttgccttgtcttgtagctgtagcatacagtggctggctgtttgttccccttgttgttgtaatccaacaacagtcgcaagagaatatctggatgtgcaaggcagtatcgtgccgctgctgtgctgtcgttacggcccgtgacatttctggccgtcgcgtttgttgctgctttgcgaaggggatacaccggaaccatttgaggttctaaataactttaacaacaacaaca

SEQ ID NO: 50493 - DNA, 2326 bp, Zea Mays
ccctgtccattcccggcacaccgcgacagcatttaactagcgtgcgtcacctcccgtcctactgcttcctctcgaggctccgagccgcccgttagtagtgtagacctgcctccgccttctcctcgccaacgcgccaccgcagtaaagagcgcggattaattccagggcgaggggggagactcacctccattacgctccgtcccccttccccggcgtgcaccgtgcagtaggtatctgtgcattcctgccctgctgtggttggctaggtaggggtggtaactggtaagaacagcaagaaccaaccatggctgctgatgttgggcttcggttcaacggctggtcatactcggatttgccttacaacgaccacaatgcacaggattcatcagttcaggaaatggtgctcaaccatggctcggtgtcattcggtagatttgctgcagaatcattgtcatgggaaagaaggtcagtgtttgaacataacagacgccaagaggaactaagcaagctcacagcccctggtttggttgcacaaaagaaggctttctttgaagaatattacaagagggcaagacatctcaaggctcagggggtattgcaccaggctggagccgcagtggaggagaacgatagcagccaggcagatgaattgccagcagctatgtctgaagatccagtagccactgctccaagttctagttttgagccttccactgatgttgagagcaaatgccaggatgctcatgagcacgggtacttgacatttaatcctttattttctcagacagcaagcttgccaaacattcaggaggagagttctagctctggtcaaaagcatggattcagttgtgaaactattgagagaaaagttcttgcaccaagacgtgtggcatcaaatgataatgatcaaagcaatattgctggatcaaggattgtcttaccaatagtcagtctacaatcagaatacctcaaagctgatcctgagaagagtgaggcaagcaaaaatgtacctattattaataggtcaaaaaaggtatcaaaggacctggcaacttctgttatcagcatcccaagggtagatttaagaaggaattcagaaaacggaccctctcgagacttggaggatccattccacaagagagttgagatgaaattgcgtgctttatctgatcggatggatgctgacagaactacggcctctagtagatcatcctcttaccaacctcctgagagagctatgacctcagctagatctgcatatcaagatagactagcaatatcttctagatccagtgtgtctcagaacactagtaaagccttggcaccttctaaattagctgctcaagcttcccataaatttcttaaaggtgtgcagcgtttagatgccatgccccgtggtattttcgttaataaaggatcaagtgcttctcttgttgcttcttgcaacagtagtgcaactgggaagttgtctgccaagattttggtggcacccagttcgtctcaagttggtgcaaagacttccaggactgctcaggttacaccgaaaagagcagcaggacctaccagtgtaaacaatgtgtcacacaataaaaggaagcacacaccggtcgcattgggtgaaaaatacccaaagagagagtatgtgcgcagatctgcacctccaagtgcaagctccgagaatctccctcgtgctgcaaaggcgcctaagatatcaaaagtgatgaatgcggtgtccaaggctgaagctgtgcagaagtcaaaatcatcaagcaatcttgttggaggaagaaatttatcgacaaagcgctccgcaaactgcaatgaagaaaacagaaaggcgatcccgtcgcgcaaggtaaacatggctgaatgcacgaggagcaatctgaaaggtggcccatcactgactaagaacaagccacggcaagagaggccacggtggagatgattgccaggcgagagaagccacgaatccaccacggtgattattaaatagtcttgagaagcatcgatcacctggagcctcaaacgtgtacctctggttagttttgcaacacgaaattgagtgccggccatcaaaagcatacagcaccaagacttgccttgtcttgtagctgtagcatacagtggctggctgtttgttccccttgttgttgtaatccaacaacagtcgcaagagaatatctggatgtgcaaggcagtatcgtgccgctgctgtgctgtcgttacggcccgtgacatttctggccgtcgcgtttgttgctgctttgcgaaggggatacaccggaaccatttgaggttctaaataactttaacaacaacaaca

SEQ ID NO: 50494 - DNA, 2150 bp, Zea Mays
ctcaaccatcgctctcctggtccggcccgcgtcccttccgatcggccggtatctgtgcattcctgccctgctgtggttggctaggtaggggtggtaactggtaagaacagcaagaaccaaccatggctgctgatgttgggcttcggttcaacggctggtcatactcggatttgccttacaacgaccacaatgcacaggattcatcagttcaggaaatggtgctcaaccatggctcggtgtcattcggtagatttgctgcagaatcattgtcatgggaaagaaggtcagtgtttgaacataacagacgccaagaggaactaagcaagctcacagcccctggtttggttgcacaaaagaaggctttctttgaagaatattacaagagggcaagacatctcaaggctcagggggtattgcaccaggctggagccgcagtggaggagaacgatagcagccaggcagatgaattgccagcagctatgtctgaagatccagtagccactgctccaagttctagttttgagccttccactgatgttgagagcaaatgccaggatgctcatgagcacgggtacttgacatttaatcctttattttctcagacagcaagcttgccaaacattcaggaggagagttctagctctggtcaaaagcatggattcagttgtgaaactattgagagaaaagttcttgcaccaagacgtgtggcatcaaatgataatgatcaaagcaatattgctggatcaaggattgtcttaccaatagtcagtctacaatcagaatacctcaaagctgatcctgagaagagtgaggcaagcaaaaatgtacctattattaataggtcaaaaaaggtatcaaaggacctggcaacttctgttatcagcatcccaagggtagatttaagaaggaattcagaaaacggaccctctcgagacttggaggatccattccacaagagagttgagatgaaattgcgtgctttatctgatcggatggatgctgacagaactacggcctctagtagatcatcctcttaccaacctcctgagagagctatgacctcagctagatctgcatatcaagatagactagcaatatcttctagatccagtgtgtctcagaacactagtaaagccttggcaccttctaaattagctgctcaagcttcccataaatttcttaaaggtgtgcagcgtttagatgccatgccccgtggtattttcgttaataaaggatcaagtgcttctcttgttgcttcttgcaacagtagtgcaactgggaagttgtctgccaagattttggtggcacccagttcgtctcaagttggtgcaaagacttccaggactgctcaggttacaccgaaaagagcagcaggacctaccagtgtaaacaatgtgtcacacaataaaaggaagcacacaccggtcgcattgggtgaaaaatacccaaagagagagtatgtgcgcagatctgcacctccaagtgcaagaagcagctccgagaatctccctcgtgctgcaaaggcgcctaagatatcaaaagtgatgaatgcggtgtccaaggctgaagctgtgcagaagtcaaaatcatcaagcaatcttgttggaggaagaaatttatcgacaaagcgctccgcaaactgcaatgaagaaaacagaaaggcgatcccgtcgcgcaaggtaaacatggctgaatgcacgaggagcaatctgaaaggtggcccatcactgactaagaacaagccacggcaagagaggccacggtggagatgattgccaggcgagagaagccacgaatccaccacggtgattattaaatagtcttgagaagcatcgatcacctggagcctcaaacgtgtacctctggttagttttgcaacacgaaattgagtgccggccatcaaaagcatacagcaccaagacttgccttgtcttgtagctgtagcatacagtggctggctgtttgttccccttgttgttgtaatccaacaacagtcgcaagagaatatctggatgtgcaaggcagtatcgtgccgctgctgtgctgtcgttacggcccgtgacatttctggccgtcgcgtttgttgctgctttgcgaaggggatacaccggaaccatttgaggttctaaataactttaacaacaacaaca

SEQ ID NO: 50495 - DNA, 2221 bp, Zea Mays
gtgggtttcgattgcgctctcggtaccgccgtaccggtatctgtgcattcctgccctgctgtggttggctaggtaggggtggtaactggtaagaacagcaagaaccaaccatggctgctgatgttgggcttcggttcaacggctggtcatactcggatttgccttacaacgaccacaatgcacaggattcatcagttcaggaaatggtgctcaaccatggctcggtgtcattcggtagatttgctgcagaatcattgtcatgggaaagaaggtcagtgtttgaacataacagacgccaagaggaactaagcaagctcacagcccctggtttggttgcacaaaagaaggctttctttgaagaatattacaagagggcaagacatctcaaggctcagggggtattgcaccaggctggagccgcagtggaggagaacgatagcagccaggcagatgaattgccagcagctatgtctgaagatccagtagccactgctccaagttctagttttgagccttccactgatgttgagagcaaatgccaggatgctcatgagcacgggtacttgacatttaatcctttattttctcagacagcaagcttgccaaacattcaggaggagagttctagctctggtcaaaagcatggattcagttgtgaaactattgagagaaaagttcttgcaccaagacgtgtggcatcaaatgataatgatcaaagcaatattgctggatcaaggattgtcttaccaatagtcagtctacaatcagaatacctcaaagctgatcctgagaagagtgaggcaagcaaaaatgtacctattattaataggtcaaaaaaggtatcaaaggacctggcaacttctgttatcagcatcccaagggtagatttaagaaggaattcagaaaacggaccctctcgagacttggaggatccattccacaagagagttgagatgaaattgcgtgctttatctgatcggatggatgctgacagaactacggcctctagtagatcatcctcttaccaacctcctgagagagctatgacctcagctagatctgcatatcaagatagactagcaatatcttctagatccagtgtgtctcagaacactagtaaagccttggcaccttctaaattagctgctcaagcttcccataaatttcttaaaggtgtgcagcgtttagatgccatgccccgtggtattttcgttaataaaggatcaagtgcttctcttgttgcttcttgcaacagtagtgcaactgggaagttgtctgccaagattttggtggcacccagttcgtctcaagttggtgcaaagacttccaggactgctcaggttacaccgaaaagagcagcaggacctaccagtgtaaacaatgtgtcacacaataaaaggaagcacacaccggtcgcattgggtgaaaaatacccaaagagagagtatgtgcgcagatctgcacctccaagtgcaaggtataaccgttcccgatttgctgaattatctgttagcagtaggtattcactgaatcatcttaagctactgtggtcctgtgcagaagcagctccgagaatctccctcgtgctgcaaaggcgcctaagatatcaaaagtgatgaatgcggtgtccaaggctgaagctgtgcagaagtcaaaatcatcaagcaatcttgttggaggaagaaatttatcgacaaagcgctccgcaaactgcaatgaagaaaacagaaaggcgatcccgtcgcgcaaggtaaacatggctgaatgcacgaggagcaatctgaaaggtggcccatcactgactaagaacaagccacggcaagagaggccacggtggagatgattgccaggcgagagaagccacgaatccaccacggtgattattaaatagtcttgagaagcatcgatcacctggagcctcaaacgtgtacctctggttagttttgcaacacgaaattgagtgccggccatcaaaagcatacagcaccaagacttgccttgtcttgtagctgtagcatacagtggctggctgtttgttccccttgttgttgtaatccaacaacagtcgcaagagaatatctggatgtgcaaggcagtatcgtgccgctgctgtgctgtcgttacggcccgtgacatttctggccgtcgcgtttgttgctgctttgcgaaggggatacaccggaaccatttgaggttctaaataactttaacaacaacaaca

SEQ ID NO: 50496 - DNA, 2913 bp, Zea Mays
tttttttgcctagaccgaaatcgccttcactgccactagcgggtccatgacaacctggccccgctgctgagtatatttggagggcccacttcacactcagtccaatggactccggccgctccggctccgctgcgtgaacggtagtcgcgcgcttttctcgttatccaacactcggggctgctacgtgtcccgcatgggcctcccccactcaccttttgtctcgcccacagccgcacagccttctggtctatgcccgctgggtccgccagcaccgggccccacttaattggcttctctcctgtctcctcctcggctctgccccacaccgccgttcccttcggtcagtcagttgtcccctcccccgcttccctttccttctcggaagagacgggcagacgaccatgtccatggaggacgacgcctcgaagatcagcgactgggaggtgctctctgccacctcttcccgcgggggcggcgacgacgatgaggtattaactgtctccggcgggggcggtgacgtcgtcctccttgaccacttcgtcctcacccccgaccccgcagcctcctgtcccggcgacggcgagggctcgtggtcggacgaccggggcgcctggcaagggttagaattattggatggattcgatccgattccggaagcaagtttcgatcttgcagttggtgttaggagccaacaactgctgataagcgacgtggatgacgcccgcgaagaaggctcgattgttcaagccaccgtggcgcgcggtgcgacccgtagcgcagaaggaaatcaagatgatgtggtagaggtcgagattgagcaggagagcagttccgtgattagccgcggtgcattgtgcccggtgctgcaggtggcggcggatcatggcgtggaagaaactctggattctgaggcagttacacctacaggtggctcgctccaaagccaggtatcagagagttcccttgtgcaactggatgatggaggaattggtgctggtgaaaaaagatcatgccttgaggatgctgtgtcaagtgatgagattcatggtgaacaagaagagcaggagcaagggagcaacgctaatgctgccattggttgcgatgaaccagatggagaggccaaggatgatgctttgccactggctcacacgccaggtgaagccagtatggtccttctccgtcgcagcggcacttctcggcctggtcgtgctggggaggaagatgtacaggatgaagcacaaggcaaggggcttgccccagattaagattgcgtttgatgataagagggcctcccagtttgctgatcgcgcggcgcgtctcaacgaagccttcctggtagcgagacgtgtacctatgctaagaacatcatctggtggtgcgacgcttccatggtcaatggttcaggacagatgagtgaagctgctcagagtcagggcaccgtaagaaggctcccgcaagcaatattctggatggtgaacgagcatctgaattggcttttgcctataccttctgtttttagatgacgcgtcaaggtggatgccaatgttgatggcagtggtctctctttctcttcttttttttttcacttagttttttcttttttaaggaaccacttattgtgctcctgatttccttttttttaatttttttgcccctactctgttttttctaacctctacatctagttctagcgggagtgggtgtctgcagccttgtattcagtatgctccagcttgaaagctcatctgaagtgttgtttcatctcagctggttcacaggccctactgggtgcgcaacattttctgtatgctgcagcttgaatgcctacagtattgtgtaatcagatctgtgttggtcccctgctgtctgttactatgcatagatcatctgggtgctctcaaggtgttaagaaagcaaggattggtgctcgtatgtaaggccgtaacagagttgtgaactgaactttttggtttacattgaacagaactgagcagcccttggtggatcctgagcattgcggaaactgaagaatagagttctttttttaaaaaaaaaaactaattttctgaaggattagctaacgacgagttttttcccattgcgtaccattgcgcaaggagtatttacatgttgctgttgatcagtgatgagtggtgagcgagtaacccatgtatcagctagttgagaagcattcatttcatccattctttgacaacaaaaaactattgatcaacgtgaacaaaattgtaatcaagaacaagagattattttatcgagcatataataatttcaatcattcgtggtgataaactgaccatgaagaagggagaggaacctttcttctctcttttttttttcctcaacgatcgatgtcttcatatcttttattacctccacacaagtcggccgtggttaataacgtcagccgccactgatgggcggtatgacagcgagctcgtcgccgtcggcgaccgcggccgagtcggccgcgtactcctcgttgagcgcgagcacgacggagccccggatctcctccagcttggggaactgggctaggacccgcgcgaggcactcccccgcggtgctccccggcggcacctccaccgcggaatccgccacgcccgttaggtcccgcgcgcgggcgaagaagagcaccttcaccgtcgcggcaggcgctgcctgttcctcggccgcggcgggcatctcctcctccggagcggcatctgggagcagcaacaggggatgagatggtatgagcggttggctcacatcaggtgagggataaaatcgatcggtgatggttcgttgaggcccgcagtgagaatcgatcggtaggttacctttgggattcttcgccatcgccggaggaaaggaagctgctgtgctgccgcctggactctgattacttaccgg

SEQ ID NO: 50497 - DNA, 2211 bp, Zea Mays
gggaccaaccgttgcggatgatttcctctcgtctcgtcccatactcccgtcctgtccgtcttcacctgcgttccccgggtcccgacacgccgctgtaccagtcccgcccgcctgcgcacttctcccacccccgcgccgcctccggcgccggcgagccctcccgacgctcctcgaacgatccgtccctgtcgcggcccttctctctgccgcttccagcccaagggtcaatctgtcaaggacacacacagtcaaacctacctctgctggcgaccgttcaggaatttctgttaaatgcaacttggggtggtcttctcaaccatcgcctgacttgaggcatcactttagaggatactcatcagcatcagaggcagttcttacttcccaatctgatgtgagaaaactgtttgttggcaatgaaaaaatcggtgttctcttgctgaatcttgggggcccagagactcttgacgatgtgcagcctttcttgtttaatctttttgcagatccggacattatccgtcttcctaggctctttcgctttctgcagaagccacttgcaaaattcatatcagaagtgagagcaccaaaaagtaaggaaggttatgcatccataggtggcggttctcctctacgacaaattactgatgcacaggctgaagcacttagggaggcattacatgggaaagatgttcctgccaacgtgtatgttggaatgcggtattggcatcccttcactgaagaagccatagaacaaataaaacgggatggaatcacgaaacttgttgtgttgcctctataccctcagttctccatatcaactagtggttcaagtctccgtttattggagagcatattcagagaggatgagtatctcgtgaatatgcaacatacagttataccttcctggtaccaacgtgaaggatatatcaaggctatggcaactttgattgaaaacgaattgacaaaatttcaagaaccccaaaaggttatgatatttttcagtgctcatggagttcctctggcatatgttgaagaagctggtgatccatataaagcagaaatggaagagtgtatcgatcttatcatggaagaactggaaaaaagaggaataacaaatccgtgcatacttgcttatcagagccgagttggaccagtggaatggctgaaaccgtacactgatgagacaattattgagcttgggcagaaaggggtaaagagcctgcttgctgttcccattagttttgttagcgaacacattgaaactttggaagaaatcgatgtggagtacaaagagttggctttagaatctggcatcaagcactggggacgggttccagcactaggttgcgaacccacattcatttcggatcttgctgatgctgttattgaaagcctaccttatgttggcgcaatggcagtttccaatcttgaggctcggcagtctctcgtacccctcgggagcgtggaggagctgctagcagcatacgactcgaagcgcgatgagctccctccaccggtaatcgtgtgggagtggggctggacaaagagcgcggagacctggaatggtcgtgcggcgatgctggccgtgctggctctcctggtgctggaagtgaccaccggcgaagggttcctgcatcaatggggaatcctgcctctgttccgctgagccgacagttctgttcatgatggggtcataattttgctgcagccgaaggaagttttgaacttctgatgctgtatatgaatcaatttgccttaaatcgtcgatgggaaaagaggagaaaatggtaaaatatggacagaattcgacggtatatcatgttatattgtacctacctacatgacatgggacatgaaatagggctcagacatgcgctatggaacttggaatacacacaaacctaacacgccacatgctgcacaaactcctgcctactgccactagtaccttgtctgtccataagtggatgcgcgttgcttttagagaataatcatatgagcggatgagcctctgcattgtcatgtggatgctatatcaatccagcattccagctcaacaatttcagggttagctttagctcaagcagattaatttttcggttggctgagtttatatggtttttgtgcctctattgatggagattaattatagattttccatggatgacttagaaggtgacttaattctaaatgtcaacagagttgatattatta

SEQ ID NO: 50498 - DNA, 2363 bp, Zea Mays
gggaccaaccgttgcggatgatttcctctcgtctcgtcccatactcccgtcctgtccgtcttcacctgcgttccccgggtcccgacacgccgctgtaccagtcccgcccgcctgcgcacttctcccacccccgcgccgcctccggcgccggcgagccctcccgacgctcctcgaacgatccgtccctgtcgcggcccttctctctgccgcttccagcccaaggggaggagagggagaggatgtggtcgtcgagccaggcgagcacgaggggcgtcgtggagatggggagggtggaggccgggccgtcgcatttccctaagagacccgcgcctcagaactccgccagggtcaatctgtcaaggacacacacagtcaaacctacctctgctggcgaccgttcaggaatttctgttaaatgcaacttggggtggtcttctcaaccatcgcctgacttgaggcatcactttagaggatactcatcagcatcagaggcagttcttacttcccaatctgatgtgagaaaactgtttgttggcaatgaaaaaatcggtgttctcttgctgaatcttgggggcccagagactcttgacgatgtgcagcctttcttgtttaatctttttgcagatccgttatatgtcccatgacgcatgatcgcaggacattatccgtcttcctaggctctttcgctttctgcagaagccacttgcaaaattcatatcagaagtgagagcaccaaaaagtaaggaaggttatgcatccataggtggcggttctcctctacgacaaattactgatgcacaggctgaagcacttagggaggcattacatgggaaagatgttcctgccaacgtgtatgttggaatgcggtattggcatcccttcactgaagaagccatagaacaaataaaacgggatggaatcacgaaacttgttgtgttgcctctataccctcagttctccatatcaactagtggttcaagtctccgtttattggagagcatattcagagaggatgagtatctcgtgaatatgcaacatacagttataccttcctggtaccaacgtgaaggatatatcaaggctatggcaactttgattgaaaacgaattgacaaaatttcaagaaccccaaaaggttatgatatttttcagtgctcatggagttcctctggcatatgttgaagaagctggtgatccatataaagcagaaatggaagagtgtatcgatcttatcatggaagaactggaaaaaagaggaataacaaatccgtgcatacttgcttatcagagccgagttggaccagtggaatggctgaaaccgtacactgatgagacaattattgagcttgggcagaaaggggtaaagagcctgcttgctgttcccattagttttgttagcgaacacattgaaactttggaagaaatcgatgtggagtacaaagagttggctttagaatctggcatcaagcactggggacgggttccagcactaggttgcgaacccacattcatttcggatcttgctgatgctgttattgaaagcctaccttatgttggcgcaatggcagtttccaatcttgaggctcggcagtctctcgtacccctcgggagcgtggaggagctgctagcagcatacgactcgaagcgcgatgagctccctccaccggtaatcgtgtgggagtggggctggacaaagagcgcggagacctggaatggtcgtgcggcgatgctggccgtgctggctctcctggtgctggaagtgaccaccggcgaagggttcctgcatcaatggggaatcctgcctctgttccgctgagccgacagttctgttcatgatggggtcataattttgctgcagccgaaggaagttttgaacttctgatgctgtatatgaatcaatttgccttaaatcgtcgatgggaaaagaggagaaaatggtaaaatatggacagaattcgacggtatatcatgttatattgtacctacctacatgacatgggacatgaaatagggctcagacatgcgctatggaacttggaatacacacaaacctaacacgccacatgctgcacaaactcctgcctactgccactagtaccttgtctgtccataagtggatgcgcgttgcttttagagaataatcatatgagcggatgagcctctgcattgtcatgtggatgctatatcaatccagcattccagctcaacaatttcagggttagctttagctcaagcagattaatttttcggttggctgagtttatatggtttttgtgcctctattgatggagattaattatagattttccatggatgacttagaaggtgacttaattctaaatgtcaacagagttgatattatta

SEQ ID NO: 50499 - DNA, 2133 bp, Zea Mays
gggaccaaccgttgcggatgatttcctctcgtctcgtcccatactcccgtcctgtccgtcttcacctgcgttccccgggtcccgacacgccgctgtaccagtcccgcccgcctgcgcacttctcccacccccgcgccgcctccggcgccggcgagccctcccgacgctcctcgaacgatccgtccctgtcgcggcccttctctctgccgcttccagcccaaggggaggagagggagaggatgtggtcgtcgagccaggcgagcacgaggggcgtcgtggagatggggagggtggaggccgggccgtcgcatttccctaagagacccgcgcctcagaactccgccagggtcaatctgtcaaggacacacacagtcaaacctacctctgctggcgaccgttcaggaatttctgttaaatgcaacttggggtggtcttctcaaccatcgcctgacttgaggcatcactttagaggatactcatcagcatcagaggcagttcttacttcccaatctgatgtgagaaaactgtttgttggcaatgaaaaaatcggtgttctcttgctgaatcttgggggcccagagactcttgacgatgtgcagcctttcttgtttaatctttttgcagatccggacattatccgtcttcctaggctctttcgctttctgcagaagccacttgcaaaattcatatcagaagtgagagcaccaaaaagtaaggaaggttatgcatccataggtggcggttctcctctacgacaaattactgatgcacaggctgaagcacttagggaggcattacatgggaaagatgttcctgccaacgtgtatgttggaatgcggtattggcatcccttcactgaagaagccatagaacaaataaaacgggatggaatcacgaaacttgttgtgttgcctctataccctcagttctccatatcaactagtggttcaagtctccgtttattggagagcatattcagagaggatgagtatctcgtgaatatgcaacatacagttataccttcctggtaccaacgtgaaggatatatcaaggctatggcaactttgattgaaaacgaattgacaaaatttcaagaaccccaaaaggttatgatatttttcagtgctcatggagttcctctggcatatgttgaagaagctggtgatccatataaagcagaaatggaagagtgtatcgatcttatcatggaagaactggaaaaaagaggaataacaaatccgtgcatacttgcttatcagagccgagttggaccagtggaatggctgaaaccgtacactgatgagacaattattgagcttgggcagaaaggggtaaagagcctgcttgctgttcccattagtctctcgtacccctcgggagcgtggaggagctgctagcagcatacgactcgaagcgcgatgagctccctccaccggtaatcgtgtgggagtggggctggacaaagagcgcggagacctggaatggtcgtgcggcgatgctggccgtgctggctctcctggtgctggaagtgaccaccggcgaagggttcctgcatcaatggggaatcctgcctctgttccgctgagccgacagttctgttcatgatggggtcataattttgctgcagccgaaggaagttttgaacttctgatgctgtatatgaatcaatttgccttaaatcgtcgatgggaaaagaggagaaaatggtaaaatatggacagaattcgacggtatatcatgttatattgtacctacctacatgacatgggacatgaaatagggctcagacatgcgctatggaacttggaatacacacaaacctaacacgccacatgctgcacaaactcctgcctactgccactagtaccttgtctgtccataagtggatgcgcgttgcttttagagaataatcatatgagcggatgagcctctgcattgtcatgtggatgctatatcaatccagcattccagctcaacaatttcagggttagctttagctcaagcagattaatttttcggttggctgagtttatatggtttttgtgcctctattgatggagattaattatagattttccatggatgacttagaaggtgacttaattctaaatgtcaacagagttgatattatta

SEQ ID NO: 50500 - DNA, 1602 bp, Zea Mays
gggaccaaccgttgcggatgatttcctctcgtctcgtcccatactcccgtcctgtccgtcttcacctgcgttccccgggtcccgacacgccgctgtaccagtcccgcccgcctgcgcacttctcccacccccgcgccgcctccggcgccggcgagccctcccgacgctcctcgaacgatccgtccctgtcgcggcccttctctctgccgcttccagcccaaggggaggagagggagaggatgtggtcgtcgagccaggcgagcacgaggggcgtcgtggagatggggagggtggaggccgggccgtcgcatttccctaagagacccgcgcctcagaactccgccagggtcaatctgtcaaggacacacacagtcaaacctacctctgctggcgaccgttcaggaatttctgttaaatgcaacttggggtggtcttctcaaccatcgcctgacttgaggcatcactttagaggatactcatcagcatcagaggcagttcttacttcccaatctgatgtgagaaaactgtttgttggcaatgaaaaaatcggtgttctcttgctgaatcttgggggcccagagactcttgacgatgtgcagcctttcttgtttaatctttttgcagatccggacattatccgtcttcctaggctctttcgctttctgcagaagccacttgcaaaattcatatcagaagtgagagcaccaaaaagtaaggaaggttatgcatccataggtggcggttctcctctacgacaaattactgatgcacaggctgaagcacttagggaggcattacatgggaaagatgttcctgccaacgtgtatgttggaatgcggtattggcatcccttcactgaagaagccatagaacaaataaaacgggatggaatcacgaaacttgttgtgttgcctctataccctcagttctccatatcaactagtggttcaagtctccgtttattggagagcatattcagagaggatgagtatctcgtgaatatgcaacatacagttataccttcctggtaccaacgtgaaggatatatcaaggctatggcaactttgattgaaaacgaattgacaaaatttcaagaaccccaaaaggttatgatatttttcagtgctcatggagttcctctggcatatgttgaagaagctggtgatccatataaagcagaaatggaagagtgtatcgatcttatcatggaagaactggaaaaaagaggaataacaaatccgtgcatacttgcttatcagagccgagttggaccagtggaatggctgaaaccgtacactgatgagacaattattgagcttgggcagaaaggggtaaagagcctgcttgctgttcccattagttttgttagcgaacacattgaaactttggaagaaatcgatgtggagtacaaagagttggctttagaatctggcatcaagcactggggacgggttccagcactaggttgcgaacccacattcatttcggatcttgctgatgctgttattgaaagcctaccttatgttggcgcaatggcagtttccaatcttgaggctcggcagttatggattttgagatgggctcaaagttgatacaaagtgg

SEQ ID NO: 50501 - DNA, 1929 bp, Zea Mays
caacgttttaactataatttttttggtaatactttaattataatttgtcaaaatttaatgtcaaattcaaaattttcatcaatttcgaactatttttaaattcaaagtcaaaatattgatatttatggtcagatttatgccacaattatatcctaaactttcatataaaacttaggacaaatttgcggaaaatcgataaaagaagaggggatatagtacaaaggacattatccgtcttcctaggctctttcgctttctgcagaagccacttgcaaaattcatatcagaagtgagagcaccaaaaagtaaggaaggttatgcatccataggtggcggttctcctctacgacaaattactgatgcacaggctgaagcacttagggaggcattacatgggaaagatgttcctgccaacgtgtatgttggaatgcggtattggcatcccttcactgaagaagccatagaacaaataaaacgggatggaatcacgaaacttgttgtgttgcctctataccctcagttctccatatcaactagtggttcaagtctccgtttattggagagcatattcagagaggatgagtatctcgtgaatatgcaacatacagttataccttcctggtaccaacgtgaaggatatatcaaggctatggcaactttgattgaaaacgaattgacaaaatttcaagaaccccaaaaggttatgatatttttcagtgctcatggagttcctctggcatatgttgaagaagctggtgatccatataaagcagaaatggaagagtgtatcgatcttatcatggaagaactggaaaaaagaggaataacaaatccgtgcatacttgcttatcagagccgagttggaccagtggaatggctgaaaccgtacactgatgagacaattattgagcttgggcagaaaggggtaaagagcctgcttgctgttcccattagttttgttagcgaacacattgaaactttggaagaaatcgatgtggagtacaaagagttggctttagaatctggcatcaagcactggggacgggttccagcactaggttgcgaacccacattcatttcggatcttgctgatgctgttattgaaagcctaccttatgttggcgcaatggcagtttccaatcttgaggctcggcagtctctcgtacccctcgggagcgtggaggagctgctagcagcatacgactcgaagcgcgatgagctccctccaccggtaatcgtgtgggagtggggctggacaaagagcgcggagacctggaatggtcgtgcggcgatgctggccgtgctggctctcctggtgctggaagtgaccaccggcgaagggttcctgcatcaatggggaatcctgcctctgttccgctgagccgacagttctgttcatgatggggtcataattttgctgcagccgaaggaagttttgaacttctgatgctgtatatgaatcaatttgccttaaatcgtcgatgggaaaagaggagaaaatggtaaaatatggacagaattcgacggtatatcatgttatattgtacctacctacatgacatgggacatgaaatagggctcagacatgcgctatggaacttggaatacacacaaacctaacacgccacatgctgcacaaactcctgcctactgccactagtaccttgtctgtccataagtggatgcgcgttgcttttagagaataatcatatgagcggatgagcctctgcattgtcatgtggatgctatatcaatccagcattccagctcaacaatttcagggttagctttagctcaagcagattaatttttcggttggctgagtttatatggtttttgtgcctctattgatggagattaattatagattttccatggatgacttagaaggtgacttaattctaaatgtcaacagagttgatattatta

SEQ ID NO: 50502 - DNA, 1757 bp, Zea Mays
cccaaataactaatgcccagtcacttaaatcttcactggaatgtgcaccaagacattatccgtcttcctaggctctttcgctttctgcagaagccacttgcaaaattcatatcagaagtgagagcaccaaaaagtaaggaaggttatgcatccataggtggcggttctcctctacgacaaattactgatgcacaggctgaagcacttagggaggcattacatgggaaagatgttcctgccaacgtgtatgttggaatgcggtattggcatcccttcactgaagaagccatagaacaaataaaacgggatggaatcacgaaacttgttgtgttgcctctataccctcagttctccatatcaactagtggttcaagtctccgtttattggagagcatattcagagaggatgagtatctcgtgaatatgcaacatacagttataccttcctggtaccaacgtgaaggatatatcaaggctatggcaactttgattgaaaacgaattgacaaaatttcaagaaccccaaaaggttatgatatttttcagtgctcatggagttcctctggcatatgttgaagaagctggtgatccatataaagcagaaatggaagagtgtatcgatcttatcatggaagaactggaaaaaagaggaataacaaatccgtgcatacttgcttatcagagccgagttggaccagtggaatggctgaaaccgtacactgatgagacaattattgagcttgggcagaaaggggtaaagagcctgcttgctgttcccattagttttgttagcgaacacattgaaactttggaagaaatcgatgtggagtacaaagagttggctttagaatctggcatcaagcactggggacgggttccagcactaggttgcgaacccacattcatttcggatcttgctgatgctgttattgaaagcctaccttatgttggcgcaatggcagtttccaatcttgaggctcggcagtctctcgtacccctcgggagcgtggaggagctgctagcagcatacgactcgaagcgcgatgagctccctccaccggtaatcgtgtgggagtggggctggacaaagagcgcggagacctggaatggtcgtgcggcgatgctggccgtgctggctctcctggtgctggaagtgaccaccggcgaagggttcctgcatcaatggggaatcctgcctctgttccgctgagccgacagttctgttcatgatggggtcataattttgctgcagccgaaggaagttttgaacttctgatgctgtatatgaatcaatttgccttaaatcgtcgatgggaaaagaggagaaaatggtaaaatatggacagaattcgacggtatatcatgttatattgtacctacctacatgacatgggacatgaaatagggctcagacatgcgctatggaacttggaatacacacaaacctaacacgccacatgctgcacaaactcctgcctactgccactagtaccttgtctgtccataagtggatgcgcgttgcttttagagaataatcatatgagcggatgagcctctgcattgtcatgtggatgctatatcaatccagcattccagctcaacaatttcagggttagctttagctcaagcagattaatttttcggttggctgagtttatatggtttttgtgcctctattgatggagattaattatagattttccatggatgacttagaaggtgacttaattctaaatgtcaacagagttgatattatta

SEQ ID NO: 50503 - DNA, 3320 bp, Zea Mays
cgcttccacagccagctctccccaggctcactcttctccccagttgcgttttctttggaagcttccatacacaactcgcatcgttcatcttccactgatgctatataaggagagagagagagagagatagagagagagagagagagagagagagagagagagagatgatctgatgatgcatgctgtaacagctcctgaactgcacaagttgtagtttggctgctggataataagttcatccatccatcaacgctacaaatcaaggtcatgggatatttcatcatacgtttatatgggggacaaacaataaagccagactggatccgacgtgtctacgggccattggctctgctcggacattgcgtaatccaagagaccgtcaaggcaaggcaaagccaacaccagacgagtcgagaacaccgcagcagagcgcggcgtccaatggacatggacggcaactccccgcggcggcctccccgccggcctgagcgggaggggagctacggctacgacatcgagagcatggacggctccggggccgggggcccgccgccgtggagcgcgcaccacaacggctcctccgaggccctgctccgctacgacgacggcggcgccgaccgcgggagcacgcaacagccgctgctgcggaagcgcaccgtgaacacgacctcgcagatcgctatcgtcggtgccaacgtctgccccatcgagagcttggactacgaagtcgtggagaatgaccttttcaagcaggactggcgatcaagaaagaagaagcagatatttcagtacatcgtactcaagtggagcttggtgctccttattggcctattaactggatttgtcggcttcttcaacaatcttgcagttgagaacattgctggattcaaattgctgctcacgagcgatcttatgctcaaggggaggtatattagagcattttttgtgtatggaggttgcaatttagttttggcagcagctgcagcagcaatctgtgcttatattgcacctgctgctgctgggtctggtattcctgaagtcaaagcttatcttaatggggttgatgcctattctatattagctcctagcacactctttgttaagatttttggttcaatacttggagtttcagctggattcgtgctaggaaaggaagggcccatggtacatacaggggcatgcattgccaacttgcttggtcagggtggatcacgcaagtatcatcttacttgtaactggctacgctactttaagaatgacagagacaggagagatttgatcacatgtggatctgcagctggtgtggcggctgccttccgtgcacctgttggcggtgttctgtttgctcttgaagaagcagcatcatggtggcgaagtgctcttttgtggagaacattctttacaactgctgttgttgcggtggtattgagggggctgattgagttctgtcgtagtggaaaatgtggtctctttgggcaaggtggattgatcatgtttgatctcagttcaactgttgcagtctacagtactccagatctaattgcaattatagtccttgggataattggtggaatctttggaggcctcttcaactatctgttggacaagatcctccgagtttatagtattatcaacgagagaggtgctccattcaagatccttctcactataacaatatcaataatcacatcaatgtgttcctatggtcttccttggcttgctgcatgcactccatgccctgttgatgctgtggagcagtgtcccactgttggccgctccggaaattataagaacttccaatgcccaccaggacattacaatggtcttgcatcactcttcttcaacacaaatgatgatgccatccgcaatctcttcagcaacggcacatcgactgagttccaaatgtcatctcttttcatcttcttcactgctatttactgccttggactagtgacttacggtattgctgtcccatctggtctctttatccctgttattcttgctggagccacgtatgggcgcatagtgggaactcttcttggatccatatctgatcttgatcctggcctttttgccctacttggcgcagcatcttttcttggtgggacaatgagaatgactgtgtcagtctgtgtgatccttctagagctcaccaacgatctccccatgctccctttagtcatgcttgttcttctcatatccaagaccatagcagatagctttaacaagggagtttatgatcagatagtggtgatgaaaggcttgccgtacatggaggctcatgctgaaccatacatgaggcacttggttgctggtgatgtggtgtctggcccactaatcaccttttctggggttgagaaggtggggaacattgttcatgcattaaggttaacgggccacaatggtttccctgtgcttgatgagccacccataacggaaaccccggaactggttgggcttgtgactaggtctcatttattagttttgctgaacagcaagaatttcatgaagggacgggttaaaactagtggtagcttcgttctgcgaagatttggtgcatttgactttgcgaaaccaggttcaggtaaaggtttgaaaattgaggacctggatttcactgatgaggagatggacatgtatgtggatctccacccgatcacaaatacatcaccttacacagtggttgagacgatgtcactggcaaaagcagcaatccttttccgggaacttggtttgaggcaccttttggttgtgccaaagacaccagacaggcctcccatagtcgggattctcacaaggcatgacttcatgcctgagcacattcacagtctgttcccaaacctcaatcctcacaagtaccattcagcatcaatggcaggttgacaaggagactctttctgcttctcatctatttggcattattcgggtgctggctgtatgtaaattgcaaaggtgtatgcgtatctggttttcaattggatccatctcatcttctctacatagttttgtttgtgtggattttgtagcatatgctctttttgcaataaaaaaaatgtggcagttgtttggctggtgactgcctattatgagcctgcggcaataaatgttcagcaaattgcggagtaaacattgagagctccagaacatggagagaaagtgtgtattgtatatttgcgttgttcctgtaaagcatgtttagtcaaactcgaatattgtctataacaccgagtaaatctcaggcggaaacatgggcgagctttctaagtacagatttcttgctattgtaagtacttgaattgagattcgtaacatttctgctc

SEQ ID NO: 50504 - DNA, 2824 bp, Zea Mays
atatcctatcgtctggtccggccatctttcccgtagccgccgccgtcggcgtgcaccccaccaggccaccatcttggcaacccccactattccaaccacgcactgacacacggaccctatgctgccaggacccgcttgtcattgtccgtccgggccggacctccgatcgtgggtccggagagccagcgagtgagagccgtgccggagtggcttgcggccaggtagacgaagcacgggaagtaaacaatcgcaagagggaagggaacacaacaagcacagcagacagcacccccgcagggccgcagaacggcgctcccccctgctccgccacactccccagaggttctgaacgcagatctctcgccgcagctcggcctcgcgattccgctggagactgttcagctcctcgccggcggcgctgattcgatctgacgcccacgcagcagaaggctgaaggagggcactgggagccgagggggaggctaggggttaggattccggcgtgatgcagcgcccgggacgacttcagcggtcggggtccaagcgcgggctggaacccaccggtggcggcgacgacgacgaccatgcgcccaagcgcccgcgcgtccccgccctcgctagtgtcattgtggaagctctcaagatggacagtttgcagaaactctgttcatcgcttgagcctattctccgaagagttgtaagtgaagaagtagagcgtgctttagccaaactgggtcctgctagaatccaaggaagatcctcccctaaaagaattgaaggccctgatggaagaaatcttcagctccagttcagaagtcagttggctcttccaatcttcactggtggaaaagttgaaggtgagcagggagcagctatacatgttgtgctgttggatgcaaacactggatgtgttgttacttcaggacccgagtcatttgcaaaattggatatccttgtgcttgagggtgactttagtaaagaggaagatgaggattggacagaagaagagtttgaaagtaatattgtcaaggagcgtgaagggaagaggcctcttttgacaggcgacctgcaagtgactcttaaagaaggtgttggaaccataggggagcttacattcactgacaactccagctggataagaagcaggaaattcagacttgggctgaggattgctcctggcttttgtgaaggtatccgtgtccgagaagccaagacagaagctttccccgttaaggatcacagaggagaattgtacaagaagcactacccacctgcgctgaaggatgatgtttggagattagaaaagattggcaaggatggcgcattccacaagaagttaaatgccagtgggatctatacagttgaagatttcctccggcttcttgttagggatcagcagagattacgtagcattctgggcagtggaatgtcaaataagatgtgggacagccttgttgagcatgcaaagacatgtgtcttaagtggaaagcattatgtatactatgctagagactcaagaaacgtgggtgcaatattcaataacatctacgagttcactggtttgattgccgatgatcagttcatttcagctgaaaatctcacagacaaccagaaggtctatgctgatgcattggtaaagaaagcatatgaggactggatgcaagttgtagaatatgatggcaaggcactcttgagcttcaagcagaaaaagaaaactgtcacgacaagaagtgacgttgcatctgcctcaacaagcaatcctgcttcatatggttcggccaattcacagaaacagttgtctcttccagcaaaagctggacaaacttcctcagcgggtactatgaatgaagatggaactagaaatgcatacaacgcaaatggaaaccagtcagcaagatatgcagccaacactcagagcattcctgcaaacgtcggcatgcaatacgacgggagtgcagtgtcgcctgaaatccagtttagtggttcatcccttcagagtcagtcttcaagagggtccaacatgctagcattgggccctccgcagcaacatcaaagtttcgaattcccagcgctcggccagcccgttcagccaacaggcctgaaccctttcgaagagtggccgcagcagcaggagaaccgtggcggcggtgtcgacgactacctgatggaggagatccggatgaggagccacgagatcctggaaaacgaagagatgcagcagatgttgcggctcctgagcatgggcggtgccggaaccagcctagccgaagacggcttcaatttccctccgtacatgcctgcgccttcgccgaacgtgagctacgaggacgaccgcacccgcgcgcccgggaaagccgtcgtcgggtggctcaagatcaaggctgccatgcggtggggcatctttgtgaggaagaaggcggctgagagaagagctcagcttgttgagctagacgactagaaagtattgaaccctcgagctgttcatgtaccagagttttcattgttgatggtgtttgtggatccggacggggctcggctatggccctgccccttaggaggacagcagttctggtcctgagcttaattctggacaaaactattttccgtttcccccctttttgtatgtatagcttttttttaccattttaaatgcgttgcttgtttagtgtgatgccggtagtcctgttgtgaaccttagcctgagctctgtacatccatctgttacagaattcaaatcgaaacaggtaaacattggcacttgctgggctgttgtatactcgtggtggtgaatctagccgagaaatattattgaggccattgggtc

SEQ ID NO: 50505 - DNA, 2641 bp, Zea Mays
caccatcttggcaacccccactattccaaccacgcactgacacacggaccctatgctgccaggacccgcttgtcattgtccgtccgggccggacctccgatcgtgggtccggagagccagcgagtgagagccgtgccggagtggcttgcggccaggtagacgaagcacgggaagtaaacaatcgcaagagggaagggaacacaacaagcacagcagacagcacccccgcagggccgcagaacggcgctcccccctgctccgccacactccccagaggttctgaacgcagatctctcgccgcagctcggcctcgcgattccgctggagactgttcagctcctcgccggcggcgctgattcgatctgacgcccacgcagcagaaggctgaaggagggcactgggagccgagggggaggctaggggttaggattccggcgtgatgcagcgcccgggacgacttcagcggtcggggtccaagcgcgggctggaacccaccggtggcggcgacgacgacgaccatgcgcccaagcgcccgcgcgtccccgccctcgctagtgtcattgtggaagctctcaagatggacagtttgcagaaactctgttcatcgcttgagcctattctccgaagagttgtaagtgaagaagtagagcgtgctttagccaaactgggtcctgctagaatccaaggaagatcctcccctaaaagaattgaaggccctgatggaagaaatcttcagctccagttcagaagtcagttggctcttccaatcttcactggtggaaaagttgaaggtgagcagggagcagctatacatgttgtgctgttggatgcaaacactggatgtgttgttacttcaggacccgagtcatttgcaaaattggatatccttgtgcttgagggtgactttagtaaagaggaagatgaggattggacagaagaagagtttgaaagtaatattgtcaaggagcgtgaagggaagaggcctcttttgacaggcgacctgcaagtgactcttaaagaaggtatccgtgtccgagaagccaagacagaagctttccccgttaaggatcacagaggagaattgtacaagaagcactacccacctgcgctgaaggatgatgtttggagattagaaaagattggcaaggatggcgcattccacaagaagttaaatgccagtgggatctatacagttgaagatttcctccggcttcttgttagggatcagcagagattacgtagcattctgggcagtggaatgtcaaataagatgtgggacagccttgttgagcatgcaaagacatgtgtcttaagtggaaagcattatgtatactatgctagagactcaagaaacgtgggtgcaatattcaataacatctacgagttcactggtttgattgccgatgatcagttcatttcagctgaaaatctcacagacaaccagaaggtctatgctgatgcattggtaaagaaagcatatgaggactggatgcaagttgtagaatatgatggcaaggcactcttgagcttcaagcagaaaaagaaaactgtcacgacaagaagtgacgttgcatctgcctcaacaagcaatcctgcttcatatggttcggccaattcacagaaacagttgtctcttccagcaaaagctggacaaacttcctcagcggatggaactagaaatgcatacaacgcaaatggaaaccagtcagcaagatatgcagccaacactcagagcattcctgcaaacgtcggcatgcaatacgacgggagtgcagtgtcgcctgaaatccagtttagtggttcatcccttcagagtcagtcttcaagagggtccaacatgctagcattgggccctccgcagcaacatcaaagtttcgaattcccagcgctcggccagcccgttcagccaacaggcctgaaccctttcgaagagtggccgcagcagcaggagaaccgtggcggcggtgtcgacgactacctgatggaggagatccggatgaggagccacgagatcctggaaaacgaagagatgcagcagatgttgcggctcctgagcatgggcggtgccggaaccagcctagccgaagacggcttcaatttccctccgtacatgcctgcgccttcgccgaacgtgagctacgaggacgaccgcacccgcgcgcccgggaaagccgtcgtcgggtggctcaagatcaaggctgccatgcggtggggcatctttgtgaggaagaaggcggctgagagaagagctcagcttgttgagctagacgactagaaagtattgaaccctcgagctgttcatgtaccagagttttcattgttgatggtgtttgtggatccggacggggctcggctatggccctgccccttaggaggacagcagttctggtcctgagcttaattctggacaaaactattttccgtttcccccctttttgtatgtatagcttttttttaccattttaaatgcgttgcttgtttagtgtgatgccggtagtcctgttgtgaaccttagcctgagctctgtacatccatctgttacagaattcaaatcgaaacaggtaaacattggcacttgctgggctgttgtatactcgtggtggtgaatctagccgagaaatattattgaggccattgggtc

SEQ ID NO: 50506 - DNA, 2540 bp, Zea Mays
caaccacgcactgacacacggaccctatgctgccaggacccgcttgtcattgtccgtccgggccggacctccgatcgtgggtccggagagccagcgagtgagagccgtgccggagtggcttgcggccaggtagacgaagcacgggaagtaaacaatcgcaagagggaagggaacacaacaagcacagcagacagcacccccgcagggccgcagaacggcgctcccccctgctccgccacactccccagaggttctgaacgcagatctctcgccgcagctcggcctcgcgattccgctggagactgttcagctcctcgccggcggcgctgattcgtgtcattgtggaagctctcaagatggacagtttgcagaaactctgttcatcgcttgagcctattctccgaagagttgtaagtgaagaagtagagcgtgctttagccaaactgggtcctgctagaatccaaggaagatcctcccctaaaagaattgaaggccctgatggaagaaatcttcagctccagttcagaagtcagttggctcttccaatcttcactggtggaaaagttgaaggtgagcagggagcagctatacatgttgtgctgttggatgcaaacactggatgtgttgttacttcaggacccgagtcatttgcaaaattggatatccttgtgcttgagggtgactttagtaaagaggaagatgaggattggacagaagaagagtttgaaagtaatattgtcaaggagcgtgaagggaagaggcctcttttgacaggcgacctgcaagtgactcttaaagaaggtgttggaaccataggggagcttacattcactgacaactccagctggataagaagcaggaaattcagacttgggctgaggattgctcctggcttttgtgaaggtatccgtgtccgagaagccaagacagaagctttccccgttaaggatcacagaggagaattgtacaagaagcactacccacctgcgctgaaggatgatgtttggagattagaaaagattggcaaggatggcgcattccacaagaagttaaatgccagtgggatctatacagttgaagatttcctccggcttcttgttagggatcagcagagattacgtagcattctgggcagtggaatgtcaaataagatgtgggacagccttgttgagcatgcaaagacatgtgtcttaagtggaaagcattatgtatactatgctagagactcaagaaacgtgggtgcaatattcaataacatctacgagttcactggtttgattgccgatgatcagttcatttcagctgaaaatctcacagacaaccagaaggtctatgctgatgcattggtaaagaaagcatatgaggactggatgcaagttgtagaatatgatggcaaggcactcttgagcttcaagcagaaaaagaaaactgtcacgacaagaagtgacgttgcatctgcctcaacaagcaatcctgcttcatatggttcggccaattcacagaaacagttgtctcttccagcaaaagctggacaaacttcctcagcgggtactatgaatgaagcagatggaactagaaatgcatacaacgcaaatggaaaccagtcagcaagatatgcagccaacactcagagcattcctgcaaacgtcggcatgcaatacgacgggagtgcagtgtcgcctgaaatccagtttagtggttcatcccttcagagtcagtcttcaagagggtccaacatgctagcattgggccctccgcagcaacatcaaagtttcgaattcccagcgctcggccagcccgttcagccaacaggcctgaaccctttcgaagagtggccgcagcagcaggagaaccgtggcggcggtgtcgacgactacctgatggaggagatccggatgaggagccacgagatcctggaaaacgaagagatgcagcagatgttgcggctcctgagcatgggcggtgccggaaccagcctagccgaagacggcttcaatttccctccgtacatgcctgcgccttcgccgaacgtgagctacgaggacgaccgcacccgcgcgcccgggaaagccgtcgtcgggtggctcaagatcaaggctgccatgcggtggggcatctttgtgaggaagaaggcggctgagagaagagctcagcttgttgagctagacgactagaaagtattgaaccctcgagctgttcatgtaccagagttttcattgttgatggtgtttgtggatccggacggggctcggctatggccctgccccttaggaggacagcagttctggtcctgagcttaattctggacaaaactattttccgtttcccccctttttgtatgtatagcttttttttaccattttaaatgcgttgcttgtttagtgtgatgccggtagtcctgttgtgaaccttagcctgagctctgtacatccatctgttacagaattcaaatcgaaacaggtaaacattggcacttgctgggctgttgtatactcgtggtggtgaatctagccgagaaatattattgaggccattgggtc

SEQ ID NO: 50507 - DNA, 2720 bp, Zea Mays
caaccacgcactgacacacggaccctatgctgccaggacccgcttgtcattgtccgtccgggccggacctccgatcgtgggtccggagagccagcgagtgagagccgtgccggagtggcttgcggccaggtagacgaagcacgggaagtaaacaatcgcaagagggaagggaacacaacaagcacagcagacagcacccccgcagggccgcagaacggcgctcccccctgctccgccacactccccagaggttctgaacgcagatctctcgccgcagctcggcctcgcgattccgctggagactgttcagctcctcgccggcggcgctgattcgatctgacgcccacgcagcagaaggctgaaggagggcactgggagccgagggggaggctaggggttaggattccggcgtgatgcagcgcccgggacgacttcagcggtcggggtccaagcgcgggctggaacccaccggtggcggcgacgacgacgaccatgcgcccaagcgcccgcgcgtccccgccctcgctagtgtcattgtggaagctctcaagatggacagtttgcagaaactctgttcatcgcttgagcctattctccgaagagttgtaagtgaagaagtagagcgtgctttagccaaactgggtcctgctagaatccaaggaagatcctcccctaaaagaattgaaggccctgatggaagaaatcttcagctccagttcagaagtcagttggctcttccaatcttcactggtggaaaagttgaaggtgagcagggagcagctatacatgttgtgctgttggatgcaaacactggatgtgttgttacttcaggacccgagtcatttgcaaaattggatatccttgtgcttgagggtgactttagtaaagaggaagatgaggattggacagaagaagagtttgaaagtaatattgtcaaggagcgtgaagggaagaggcctcttttgacaggcgacctgcaagtgactcttaaagaaggtgttggaaccataggggagcttacattcactgacaactccagctggataagaagcaggaaattcagacttgggctgaggattgctcctggcttttgtgaaggtatccgtgtccgagaagccaagacagaagctttccccgttaaggatcacagaggagaattgtacaagaagcactacccacctgcgctgaaggatgatgtttggagattagaaaagattggcaaggatggcgcattccacaagaagttaaatgccagtgggatctatacagttgaagatttcctccggcttcttgttagggatcagcagagattacgtagcattctgggcagtggaatgtcaaataagatgtgggacagccttgttgagcatgcaaagacatgtgtcttaagtggaaagcattatgtatactatgctagagactcaagaaacgtgggtgcaatattcaataacatctacgagttcactggtttgattgccgatgatcagttcatttcagctgaaaatctcacagacaaccagaaggtctatgctgatgcattggtaaagaaagcatatgaggactggatgcaagttgtagaatatgatggcaaggcactcttgagcttcaagcagaaaaagaaaactgtcacgacaagaagtgacgttgcatctgcctcaacaagcaatcctgcttcatatggttcggccaattcacagaaacagttgtctcttccagcaaaagctggacaaacttcctcagcggcagatggaactagaaatgcatacaacgcaaatggaaaccagtcagcaagatatgcagccaacactcagagcattcctgcaaacgtcggcatgcaatacgacgggagtgcagtgtcgcctgaaatccagtttagtggttcatcccttcagagtcagtcttcaagagggtccaacatgctagcattgggccctccgcagcaacatcaaagtttcgaattcccagcgctcggccagcccgttcagccaacaggcctgaaccctttcgaagagtggccgcagcagcaggagaaccgtggcggcggtgtcgacgactacctgatggaggagatccggatgaggagccacgagatcctggaaaacgaagagatgcagcagatgttgcggctcctgagcatgggcggtgccggaaccagcctagccgaagacggcttcaatttccctccgtacatgcctgcgccttcgccgaacgtgagctacgaggacgaccgcacccgcgcgcccgggaaagccgtcgtcgggtggctcaagatcaaggctgccatgcggtggggcatctttgtgaggaagaaggcggctgagagaagagctcagcttgttgagctagacgactagaaagtattgaaccctcgagctgttcatgtaccagagttttcattgttgatggtgtttgtggatccggacggggctcggctatggccctgccccttaggaggacagcagttctggtcctgagcttaattctggacaaaactattttccgtttcccccctttttgtatgtatagcttttttttaccattttaaatgcgttgcttgtttagtgtgatgccggtagtcctgttgtgaaccttagcctgagctctgtacatccatctgttacagaattcaaatcgaaacaggtaaacattggcacttgctgggctgttgtatactcgtggtggtgaatctagccgagaaatattattgaggccattgggtc

SEQ ID NO: 50508 - DNA, 964 bp, Zea Mays
tcttttaccaaattggccctctgatatcctcctattctcgcaggcctccacgcgaccacgccgcggttttgcacttctcgccttctctaatctctttgcctccctccaccaccagtccaccaccactgctacccaaccctcgcttccccaaaccctagccaagggacacggtggccggcgatggacggcgacggaggaggcgctggtgcgctgcaccaccacacgcgctcacccgaggacgtcttccgcgatttccgcgcgcgccgagccggcatcgtcaaggcgctcaccacggatgtggagaagttctatcagcagtgcgatccagagaaagagaacttgtgcctttatggtttgccaaatgagacttgggaggtcactcttccagctgaggaagtacctcctgagcttccagaaccagcactggggataaactttgcccgtgatggaatggtcgaaaaagactggttgtctctagttgcagttcatagtgatgcatggctcctgtctgttgcattctattttggagctcgttttggatttgacaaagatgccaggagaaggctcttcaccatgattaacaacctgcccactgtttatgaagttgtgacgggggttgctaagaagcaatcgaaagcccccaacggcagcagcaaaagcagcaaacctaactctaaaccatcaaaactgaccaattctaacagtaagcccgcgaagccagcccacccaaaagaagaggaggacagcggccgggaggacgcagaggaggaccaggcgtacctgtgtgggtcctgtggggagagctatgcgaacggggagttctggatctgctgcgatgtgtgcgagaagtggttccatggcaagtgtgtccgcatcacccctgccaaggcggagcacatcaagcagtacaagtgtcccagctgcagcaccaagcggagcacatcaagcagtacaagtgtcccag

SEQ ID NO: 50509 - DNA, 1299 bp, Zea Mays
gcctgcctgtagccgctctccttgcaggtggcgtccaggaggatgctgtaggtgacgacgctcggggagcatccccggtggagcatgtcgtcgaacaccgccagggcgtcagggatgcgcccgcggacgcagagcgcgcggatgagcgggttgaacgtgaacgtgtccggcgggaacggcatgccgttgatgaggcggcgcgcgtcctcgatccggccggcgcggcagtacccgtttaccatggtgttgtaggtgacgacggtggcggaggggccgagcgccgcgaacacgcgctccgcgtcggagacgcggccgtccgagcacagccgcttgatgaggatgttgcaggggacaacgggcgggcagttcctgccgccgccggaggccatggaatcgaagagcacgagcgcttcgtcgatttccccgcgctggacgaggctgcgcaggcgtctcttggctccctcgccgcgccggggcggggccctcggctgcctcctccacttggtgtcgacatgttggtcctgctgttctggggtggctcgctgtatcttggaccttggatttggggtgtgtagagaagaagaggacgcagctcggagtgcgggcttcgggagcagcggcgccgacgacgtcgccgtcgccatgagatagagccatagaggcatagagctgtagctgaacgtctgaaccagaagaagccgagagaacaaactctcgcgctgtcacgacaggtcgcgcgggcagagcagagttcgggccgtgtgagcccaggttgggtgggtggactgggctgcgtatattacctgggcttgggttattgtgcgcgtgcctatcttcctgcttcggacagttgtgagagagaggggaagggatcgagagcgcggcggaggcgatggcgagcggagggaagggactcaacgcgactggggagttcttccggcggagggacgagtggaggaggcaccctatggcggggaaccagctgcgccacgccacacccgggctcggcatcgccatcgtcgccttcgggatctacctcgtcggcgaggccgcctacaaccgcctctaccgcccctccggcgacaaccaccactagatcgccggcaggatccgtgactcggtcaagaagctggagccaactttaccaagcactggtgctgttgatgtttttacagttttgagctcataaggtcagccatgaccatattgtaatctgtgaccaggtagacttgcccactggtccgtccaactattgtcttgggaccctgtgttaatccttgctatatggatctgacagtg

SEQ ID NO: 50510 - DNA, 2245 bp, Zea Mays
gtgaaataaatacaacgttcacgctggtgctatctgttgcagtttacaaccactataaacggatataccatcaatctttacaaaagggtaggtctggagcagatttgggtggttttgatggggaagctgatgacgacaacaatgtggaactagagaaaagcaatgtcctgttaatgggacctactggctctggtaaaactttacttgcaaagacattagctcgttttgtgaatgtaccatttgtaattgctgatgcaacgacattaacccaggcaggttatgtaggagaggatgtagaatctatattatacaagttactcacggtggcagattttaatgtgcaagcagcacagcaagggatggtgtacatagacgaggttgataagatcacaaaaaaggctgaaagtcttaacatcagcagagacgtatctggtgaaggtgttcagcaggcattgctgaaaatgctggaaggcacgatagtcaacgttcctgaaaaaggagcaaggaagcatcctcgtggtgataatatacagatagataccaaagatattctttttatatgtggtggcgctttcgtggatttggagaaaactatatcggagagacggcaggattcttctattggcttcggcgcaccagttcgtgcaaacatgagggtcggtggcacttcaagtgctcaagtgacatcgtccttgttggaatcggttgagagtggtgatctaatagcttatggacttatcccagaatttattggacgtttccctatccttgtgagcctcaccgctctaaatgaggaccagcttgttcaggttctcactgagccaaagaatgccctgggtaagcaattcaagaaattgtttagcatgaatgatgttaagcttcactttacagatggtgcacttagaataattgccgaaaaggcgatgtcaaaaaatactggtgcacggggtttaagaaccatccttgagaatattctcatggattctatgtatgagattccagatgcaaaatctggggagaagcgaattgatgcagtggttgtagatgaagatgcagtaggatcagtggaccaacctggctatggagccaagattctttatggtgacggtgctttggatcaatatctatcccatataaaggtggcgggagatggagtcgcaagcgaaatggatggagaagctgagctttcaccatcccgagccattggcatgtgattcctggctctgaccgcactagtgtaacctgtaaaatctaatcccagttgtatccatgattcggaagagtgtattcgagcaggttcatgtatgtaccgtcagttatgaaatttcctataagtcccagtagactccttgtgtctaattggaagaaaaaattgataaaaggcttcaatcttggaaaggaagggccctttccatcgctggtagaataactctcattaattcttgcatcacaaatactcctatctatcatatgtccatgtacctgtttcccaaaacaacagttaaaaaaatggactccatcaggaggaaatttctctggcagggaggaggcgatgaaaagaagtaccattttatcaactggaaaaagtttgtaataaaaaagaatgggggtcttggtatcaaggaccttatgttgttaaacgttagtgtgctttataagtggtggtggaaattagaaaatgaggaaaatctatgacaagaattaatcaaaaataaatatatgcacactaagaatgtgcataaagtttctttcagtgctgatgactatcatgtttggcatgacttgttgaaggtcaagaatttgtatttaatgtgtagacaagttattacgaaatctggagataaaacgagattttgggaagattgctggttggataatcaacctctctgtcgtattaatccggagttatatgatatctgcgattgcaaagacattatggttaaggatgtcatggaggcgaacgtccagatatcttctccatgatattatagaaaaatgggaaaatattggtatgaaagctgagaatttcaattatcaatctgtctcggatataatcatctggaaattggagaaaactcgtatgttctcgatcaaatctatgtattctcagttgattaagacagaccttagtccccatttgaaacatatatggaaaagcaagattcctcccaagatcaaaatctttatgtggtttctagaaaacaatgtgcttttaattaaagacaatttgattagtaagaggtgg

SEQ ID NO: 50511 - DNA, 2323 bp, Zea Mays
gttcacgctggtgctatctgttgcagtttacaaccactataaacggatataccatcaatctttacaaaagggatttgggtggttttgatggggaagctgatgacgacaacaatgtggaactagagaaaagcaatgtcctgttaatgggacctactggctctggtaaaactttacttgcaaagacattagctcgttttgtgaatgtaccatttgtaattgctgatgcaacgacattaacccaggcaggttatgtaggagaggatgtagaatctatattatacaagttactcacggtggcagattttaatgtgcaagcagcacagcaagggatggtgtacatagacgaggttgataagatcacaaaaaaggctgaaagtcttaacatcagcagagacgtatctggtgaaggtgttcagcaggcattgctgaaaatgctggaaggcacgatagtcaacgttcctgaaaaaggagcaaggaagcatcctcgtggtgataatatacagatagataccaaagatattctttttatatgtggtggcgctttcgtggatttggagaaaactatatcggagagacggcaggattcttctattggcttcggcgcaccagttcgtgcaaacatgagggtcggtggcacttcaagtgctcaagtgacatcgtccttgttggaatcggttgagagtggtgatctaatagcttatggacttatcccagaatttattggacgtttccctatccttgtgagcctcaccgctctaaatgaggaccagcttgttcaggttctcactgagccaaagaatgccctgggtaagcaattcaagaaattgtttagcatgaatgatgttaagcttcactttacagatggtgcacttagaataattgccgaaaaggcgatgtcaaaaaatactggtgcacggggtttaagaaccatccttgagaatattctcatggattctatgtatgagattccagatgcaaaatctggggagaagcgaattgatgcagtggttgtagatgaagatgcagtaggatcagtggaccaacctggctatggagccaagattctttatggtgacggtgctttggatcaatatctatcccatataaaggtggcgggagatggagtcgcaagcgaaatggatggagaagctgagctttcaccatcccgagccattggcatgtgattcctggctctgaccgcactagtgtaacctgtaaaatctaatcccagttgtatccatgtaagtagcagccttgtaaatgaaataaatatgtgcagcgtccattgttcctttgacacctgacacacgttgcccggcagcgctcacgccttgcatgatttgaagcaggattcggaagagtgtattcgagcaggttcatgtatgtaccgtcagttatgaaatttcctataagtcccagtagactccttgtgtctaattggaagaaaaaattgataaaaggcttcaatcttggaaaggaagggccctttccatcgctggtagaataactctcattaattcttgcatcacaaatactcctatctatcatatgtccatgtacctgtttcccaaaacaacagttaaaaaaatggactccatcaggaggaaatttctctggcagggaggaggcgatgaaaagaagtaccattttatcaactggaaaaagtttgtaataaaaaagaatgggggtcttggtatcaaggaccttatgttgttaaacgttagtgtgctttataagtggtggtggaaattagaaaatgaggaaaatctatgacaagaattaatcaaaaataaatatatgcacactaagaatgtgcataaagtttctttcagtgctgatgactatcatgtttggcatgacttgttgaaggtcaagaatttgtatttaatgtgtagacaagttattacgaaatctggagataaaacgagattttgggaagattgctggttggataatcaacctctctgtcgtattaatccggagttatatgatatctgcgattgcaaagacattatggttaaggatgtcatggaggcgaacgtccagatatcttctccatgatattatagaaaaatgggaaaatattggtatgaaagctgagaatttcaattatcaatctgtctcggatataatcatctggaaattggagaaaactcgtatgttctcgatcaaatctatgtattctcagttgattaagacagaccttagtccccatttgaaacatatatggaaaagcaagattcctcccaagatcaaaatctttatgtggtttctagaaaacaatgtgcttttaattaaagacaatttgattagtaagaggtgg

SEQ ID NO: 50512 - DNA, 2459 bp, Zea Mays
gccccttctactgcccctcttgccgccctagggcggcggtgatactgagtgccggtcataacatgcactttccccaccgcggtttcactttgctaagccctgcagctctctgactttctgtttagttgtaaaaatgtgctatctgttgcagtttacaaccactataaacggatataccatcaatctttacaaaaggggtctggagcagatttgggtggttttgatggggaagctgatgacgacaacaatgtggaactagagaaaagcaatgtcctgttaatgggacctactggctctggtaaaactttacttgcaaagacattagctcgttttgtgaatgtaccatttgtaattgctgatgcaacgacattaacccaggcaggttatgtaggagaggatgtagaatctatattatacaagttactcacggtggcagattttaatgtgcaagcagcacagcaagggatggtgtacatagacgaggttgataagatcacaaaaaaggctgaaagtcttaacatcagcagagacgtatctggtgaaggtgttcagcaggcattgctgaaaatgctggaaggcacgatagtcaacgttcctgaaaaaggagcaaggaagcatcctcgtggtgataatatacagatagataccaaagatattctttttatatgtggtggcgctttcgtggatttggagaaaactatatcggagagacggcaggattcttctattggcttcggcgcaccagttcgtgcaaacatgagggtcggtggcacttcaagtgctcaagtgacatcgtccttgttggaatcggttgagagtggtgatctaatagcttatggacttatcccagaatttattggacgtttccctatccttgtgagcctcaccgctctaaatgaggaccagcttgttcaggttctcactgagccaaagaatgccctgggtaagcaattcaagaaattgtttagcatgaatgatgttaagcttcactttacagatggtgcacttagaataattgccgaaaaggcgatgtcaaaaaatactggtgcacggggtttaagaaccatccttgagaatattctcatggattctatgtatgagattccagatgcaaaatctggggagaagcgaattgatgcagtggttgtagatgaagatgcagtaggatcagtggaccaacctggctatggagccaagattctttatggtgacggtgctttggatcaatatctatcccatataaaggtggcgggagatggagtcgcaagcgaaatggatggagaagctgagctttcaccatcccgagccattggcatgtgattcctggctctgaccgcactagtgtaacctgtaaaatctaatcccagttgtatccatgtaagtagcagccttgtaaatgaaataaatatgtgcagcgtccattgttcctttgacacctgacacacgttgcccggcagcgctcacgccttgcatgatttgaagcaggattcggaagagtgtattcgagcaggttcatgtatgtaccgtcagttatgaaatttcctataagtcccagtagactccttgtgtctaattggaagaaaaaattgataaaaggcttcaatcttggaaaggaagggccctttccatcgctggtagaataactctcattaattcttgcatcacaaatactcctatctatcatatgtccatgtacctgtttcccaaaacaacagttaaaaaaatggactccatcaggaggaaatttctctggcagggaggaggcgatgaaaagaagtaccattttatcaactggaaaaagtttgtaataaaaaagaatgggggtcttggtatcaaggaccttatgttgttaaacgttagtgtgctttataagtggtggtggaaattagaaaatgaggaaaatctatgacaagaattaatcaaaaataaatatatgcacactaagaatgtgcataaagtttctttcagtgctgatgactatcatgtttggcatgacttgttgaaggtcaagaatttgtatttaatgtgtagacaagttattacgaaatctggagataaaacgagattttgggaagattgctggttggataatcaacctctctgtcgtattaatccggagttatatgatatctgcgattgcaaagacattatggttaaggatgtcatggaggcgaacgtccagatatcttctccatgatattatagaaaaatgggaaaatattggtatgaaagctgagaatttcaattatcaatctgtctcggatataatcatctggaaattggagaaaactcgtatgttctcgatcaaatctatgtattctcagttgattaagacagaccttagtccccatttgaaacatatatggaaaagcaagattcctcccaagatcaaaatctttatgtggtttctagaaaacaatgtgcttttaattaaagacaatttgattagtaagaggtgg

SEQ ID NO: 50513 - DNA, 2594 bp, Zea Mays
cataacatgcactttccccaccgcggtttcactttgctaagccctgcagctctctgactttctgtttagttgtaaaaatgtgctatctgttgcagtttacaaccactataaacggatataccatcaatctttacaaaagggatttgggtggttttgatggggaagctgatgacgacaacaatgtggaactagagaaaagcaatgtcctgttaatgggacctactggctctggtaaaactttacttgcaaagacattagctcgttttgtgaatgtaccatttgtaattgctgatgcaacgacattaacccaggcaggttatgtaggagaggatgtagaatctatattatacaagttactcacggtggcagattttaatgtgcaagcagcacagcaagggatggtgtacatagacgaggttgataagatcacaaaaaaggctgaaagtcttaacatcagcagagacgtatctggtgaaggtgttcagcaggcattgctgaaaatgctggaaggcacgatagtcaacgttcctgaaaaaggagcaaggaagcatcctcgtggtgataatatacagatcagccactttcctggctaggtgttcctgccttcttagtcctgcggctaaactgctttccccacatgacacatgcacgatccaatgctattgatcagatagataccaaagatattctttttatatgtggtggcgctttcgtggatttggagaaaactatatcggagagacggcaggattcttctattggcttcggcgcaccagttcgtgcaaacatgagggtcggtggcacttcaagtgctcaagtgacatcgtccttgttggaatcggttgagagtggtgatctaatagcttatggacttatcccagaatttattggacgtttccctatccttgtgagcctcaccgctctaaatgaggaccagcttgttcaggttctcactgagccaaagaatgccctgggtaagcaattcaagaaattgtttagcatgaatgatgttaagcttcactttacagatggtgcacttagaataattgccgaaaaggcgatgtcaaaaaatactggtgcacggggtttaagaaccatccttgagaatattctcatggattctatgtatgaggtttgtcgcatgatggttttgtattctctttctattcacctaacctgtaaagtctatggagtcggcatactgattgttgttacaattgatttgcttccttacagattccagatgcaaaatctggggagaagcgaattgatgcagtggttgtagatgaagatgcagtaggatcagtggaccaacctggctatggagccaagattctttatggtgacggtgctttggatcaatatctatcccatataaaggtggcgggagatggagtcgcaagcgaaatggatggagaagctgagctttcaccatcccgagccattggcatgtgattcctggctctgaccgcactagtgtaacctgtaaaatctaatcccagttgtatccatgtaagtagcagccttgtaaatgaaataaatatgtgcagcgtccattgttcctttgacacctgacacacgttgcccggcagcgctcacgccttgcatgatttgaagcaggattcggaagagtgtattcgagcaggttcatgtatgtaccgtcagttatgaaatttcctataagtcccagtagactccttgtgtctaattggaagaaaaaattgataaaaggcttcaatcttggaaaggaagggccctttccatcgctggtagaataactctcattaattcttgcatcacaaatactcctatctatcatatgtccatgtacctgtttcccaaaacaacagttaaaaaaatggactccatcaggaggaaatttctctggcagggaggaggcgatgaaaagaagtaccattttatcaactggaaaaagtttgtaataaaaaagaatgggggtcttggtatcaaggaccttatgttgttaaacgttagtgtgctttataagtggtggtggaaattagaaaatgaggaaaatctatgacaagaattaatcaaaaataaatatatgcacactaagaatgtgcataaagtttctttcagtgctgatgactatcatgtttggcatgacttgttgaaggtcaagaatttgtatttaatgtgtagacaagttattacgaaatctggagataaaacgagattttgggaagattgctggttggataatcaacctctctgtcgtattaatccggagttatatgatatctgcgattgcaaagacattatggttaaggatgtcatggaggcgaacgtccagatatcttctccatgatattatagaaaaatgggaaaatattggtatgaaagctgagaatttcaattatcaatctgtctcggatataatcatctggaaattggagaaaactcgtatgttctcgatcaaatctatgtattctcagttgattaagacagaccttagtccccatttgaaacatatatggaaaagcaagattcctcccaagatcaaaatctttatgtggtttctagaaaacaatgtgcttttaattaaagacaatttgattagtaagaggtgg

SEQ ID NO: 50514 - DNA, 2245 bp, Zea Mays
gatttgggtggttttgatggggaagctgatgacgacaacaatgtggaactagagaaaagcaatgtcctgttaatgggacctactggctctggtaaaactttacttgcaaagacattagctcgttttgtgaatgtaccatttgtaattgctgatgcaacgacattaacccaggcaggttatgtaggagaggatgtagaatctatattatacaagttactcacggtggcagattttaatgtgcaagcagcacagcaagggatggtgtacatagacgaggttgataagatcacaaaaaaggctgaaagtcttaacatcagcagagacgtatctggtgaaggtgttcagcaggcattgctgaaaatgctggaaggcacgatagtcaacgttcctgaaaaaggagcaaggaagcatcctcgtggtgataatatacagatagataccaaagatattctttttatatgtggtggcgctttcgtggatttggagaaaactatatcggagagacggcaggattcttctattggcttcggcgcaccagttcgtgcaaacatgagggtcggtggcacttcaagtgctcaagtgacatcgtccttgttggaatcggttgagagtggtgatctaatagcttatggacttatcccagaatttattggacgtttccctatccttgtgagcctcaccgctctaaatgaggaccagcttgttcaggttctcactgagccaaagaatgccctgggtaagcaattcaagaaattgtttagcatgaatgatgttaagcttcactttacagatggtgcacttagaataattgccgaaaaggcgatgtcaaaaaatactggtgcacggggtttaagaaccatccttgagaatattctcatggattctatattccagatgcaaaatctggggagaagcgaattgatgcagtggttgtagatgaagatgcagtaggatcagtggaccaacctggctatggagccaagattctttatggtgacggtgctttggatcaatatctatcccatataaaggtggcgggagatggagtcgcaagcgaaatggatggagaagctgagctttcaccatcccgagccattggcatgtgattcctggctctgaccgcactagtgtaacctgtaaaatctaatcccagttgtatccatgtaagtagcagccttgtaaatgaaataaatatgtgcagcgtccattgttcctttgacacctgacacacgttgcccggcagcgctcacgccttgcatgatttgaagcaggattcggaagagtgtattcgagcaggttcatgtatgtaccgtcagttatgaaatttcctataagtcccagtagactccttgtgtctaattggaagaaaaaattgataaaaggcttcaatcttggaaaggaagggccctttccatcgctggtagaataactctcattaattcttgcatcacaaatactcctatctatcatatgtccatgtacctgtttcccaaaacaacagttaaaaaaatggactccatcaggaggaaatttctctggcagggaggaggcgatgaaaagaagtaccattttatcaactggaaaaagtttgtaataaaaaagaatgggggtcttggtatcaaggaccttatgttgttaaacgttagtgtgctttataagtggtggtggaaattagaaaatgaggaaaatctatgacaagaattaatcaaaaataaatatatgcacactaagaatgtgcataaagtttctttcagtgctgatgactatcatgtttggcatgacttgttgaaggtcaagaatttgtatttaatgtgtagacaagttattacgaaatctggagataaaacgagattttgggaagattgctggttggataatcaacctctctgtcgtattaatccggagttatatgatatctgcgattgcaaagacattatggttaaggatgtcatggaggcgaacgtccagatatcttctccatgatattatagaaaaatgggaaaatattggtatgaaagctgagaatttcaattatcaatctgtctcggatataatcatctggaaattggagaaaactcgtatgttctcgatcaaatctatgtattctcagttgattaagacagaccttagtccccatttgaaacatatatggaaaagcaagattcctcccaagatcaaaatctttatgtggtttctagaaaacaatgtgcttttaattaaagacaatttgattagtaagaggtgg

SEQ ID NO: 50515 - DNA, 2190 bp, Zea Mays
gaaggagagccctcgaccatagaacggacaccaggcactgttcacgcgcgaccctgccgcgtggggccctggccgggctcccctgccataacaaacaggatgcgaggtttttcttcaattcgtcgcaagtgctcactgcgcgtgctcgagctcgccacacacacacacacggctacctcctccagctccgggtcgcgtcgcgcgccatggctcttcctaaacattcacagggggcgggggcagaggtggcggcggacggctccacctccacctccacttcgcccgtggaagacgatggcggcacattagatgatctgggacaggggcagcggcagggccatcacgaagaagacaacgacgacgaccatcacttctcctcgtcctcgtccaccgggaataagcataagcagacgagctgcctcctgccagcacgcagcctgagatcaacagatgaagcaagccatagccagcaagcagactgcggggtccgttcgctatccttctccaagatcttgagcttcagaatgtgggcgcccggcggctccagctcccccacctgcttggaggattacattgctggtcagcatcaactagagcacgatgatgatgaggccgacaagctgatgaagcaggtatgtcggtcgcagtccgtgccagctacgagcgtggccaggcggcgatccagcggcaccaccgcaaaagggaaagggtcgaggagagtggcagactccagctccctcaggcgcctcagagtggtgccactgcgtgttcctcttcctcctcctccacctctccaagatgaggccgcaaggggcaccgccgatgctattgctactaccgttaccaccggagaagaggaagaagatcaagacatcgcggctgaggaggcggtgtgccgcatctgcatggtagccctgtcggaggaggcggtgttcaagctggagtgctgctgcaagggcgagctggccttggcgcacagggcgtgcgccatcaagtggttcagcatcaagggcaacggcagctgcgacgtgtgcagccaagaggtgctcaaccttccagtcaccctgcgacgcctcccggaccatccgtccgtcattcaggcggcggcggctctggcacaggcacaggcgcaggcgcaggctcagggcactcaagctgacggtggtggtggcgatcctaccgcaaccaccaacaccaccagatacagggtgtggcacggcacgccaatcctcatcatcgtcagcatgctcgcctacttctgcttcctggaacagctgcttgtcggcgaccatggcacggcggctctggccatctccttgcccttcgcctgcgtccttggcctcttctcctccctatccacaacaaagatggtgtccaggagatacgtatggatctactctgcagcgcagttcctcttcatcgtgctcttcacgcacatcttctacagatacgtgcggctgcaagccgtgatcgccatcatcctgtccgccttcgccggcttcagcgtcgccatctgcaccaattactccctcctccagattctcagatggaggcgggcgagacacgctgtggcatcgcccacctcaaccgctagagctgccgacgacggaggcctccatggttccagtcccagggatccaccatcagcaccagtggcagtggcagtgacagtggcggaggtggaccttgagatggctctgcctcctacatatgcaccacctgcccatgcgtagagagagcgctccccttcactatcatccagccgacgagttcactccagctccagctatacatccagtctgtgtgtgtatatatatacagatccactgtttgttttctgagacctcgatgtatactgaaagaaaaagtaaagacagcaaaacagacgcataaaggaatagatttgattatatagctgatttcattcctctaagcacatggacccttgtactacggcctccagacgcccgaatcatcgtagggaaatgggtcttccggggccggtttggaagttgattattttcttttgagaatactgtagtatttaagatactgtggtattttttcagtacagtgttaaaaacactattttcaaaaccgcagttttagttatgctgcaatactttcacagtttaggaaactttttagctttagaacaaaattcccaatactgtggtaaaaaaactgtgg

SEQ ID NO: 50516 - DNA, 2137 bp, Zea Mays
gaaggagagccctcgaccatagaacggacaccaggcactgttcacgcgcgaccctgccgcgtggggccctggccgggctcccctgccataacaaacaggatgcgaggtttttcttcaattcgtcgcaagtgctcactgcgcgtgctcgagctcgccacacacacacacacggctacctcctccagctccgggtcgcgtcgcgcgccatggctcttcctaaacattcacagggggcgggggcagaggtggcggcggacggctccacctccacctccacttcgcccgtggaagacgatggcggcacattagatgatctgggacaggggcagcggcagggccatcacgaagaagacaacgacgacgaccatcacttctcctcgtcctcgtccaccgggaataagcataagcagacgagctgcctcctgccagcacgcagcctgagatcaacagatgaagcaagccatagccagcaagcagactgcggggtccgttcgctatccttctccaagatcttgagcttcagaatgtgggcgcccggcggctccagctcccccacctgcttggaggattacattgctggtcagcatcaactagagcacgatgatgatgaggccgacaagctgatgaagcaggtatgtcggtcgcagtccgtgccagctacgagcgtggccaggcggcgatccagcggcaccaccgcaaaagggaaagggtcgaggagagtggcagactccagctccctcaggcgcctcagagtggtgccactgcgtgttcctcttcctcctcctccacctctccaagatgaggccgcaaggggcaccgccgatgctattgctactaccgttaccaccggagaagaggaagaagatcaagacatcgcggctgaggaggcggtgtgccgcatctgcatggtagccctgtcggaggaggcggtgttcaagctggagtgctgctgcaagggcgagctggccttggcgcacagggcgtgcgccatcaagtggttcagcatcaagggcaacggcagctgcgacgtgtgcagccaagaggtgctcaaccttccagtcaccctgcgacgcctcccggaccatccgtccgtcattcaggcggcggcggctctggcacaggcacaggcgcaggcgcaggctcagggcactcaagctgacggtggtggtggcgatcctaccgcaaccaccaacaccaccagatacagggtgtggcacggcacgccaatcctcatcatcgtcagcatgctcgcctacttctgcttcctggaacagctgcttgtcggcgaccatggcacggcggctctggccatctccttgcccttcgcctgcgtccttggcctcttctcctccctatccacaacaaagatggtgtccaggagatacgtatggatctactctgcagcgcagttcctcttcatcgtgctcttcacgcacatcttctacagataccgtcgccatctgcaccaattactccctcctccagattctcagatggaggcgggcgagacacgctgtggcatcgcccacctcaaccgctagagctgccgacgacggaggcctccatggttccagtcccagggatccaccatcagcaccagtggcagtggcagtgacagtggcggaggtggaccttgagatggctctgcctcctacatatgcaccacctgcccatgcgtagagagagcgctccccttcactatcatccagccgacgagttcactccagctccagctatacatccagtctgtgtgtgtatatatatacagatccactgtttgttttctgagacctcgatgtatactgaaagaaaaagtaaagacagcaaaacagacgcataaaggaatagatttgattatatagctgatttcattcctctaagcacatggacccttgtactacggcctccagacgcccgaatcatcgtagggaaatgggtcttccggggccggtttggaagttgattattttcttttgagaatactgtagtatttaagatactgtggtattttttcagtacagtgttaaaaacactattttcaaaaccgcagttttagttatgctgcaatactttcacagtttaggaaactttttagctttagaacaaaattcccaatactgtggtaaaaaaactgtgg

SEQ ID NO: 50517 - DNA, 2098 bp, Zea Mays
ctttcctctccccaccgcacgcatccagtggctgctgccgcctcgcccccgctcctcctcctctcccgccacccacgccgcgcaggcctcacctactggtcgtcgttgcctaggggccagaacgcagggcccacagccccgccgcccgccaccgcctccaagcctgctgcgccgctcactgtcaacctgcctcgccaagtcgcccggatctcgacgccccacctgcggccggcggcggccccgccaagctccgccactgccgccacctccctgctccaaccccgcacctccgcttcgccatgaacccttcgtcgtcatccacctcctcctctggcgggtaccactctagggccgctgcctttgcttccccgcagccgcgcggcggtggcggtggcggcggccgagatgggagcgaccgcatcgacgccctcggtcgcctcctgacgagggtgttgcgccacatggcggcggagctgcgcatagatatgaggaccgatggatacgtgcgcgtccgcgacctgttgaagctcaaccttcagaccttcgccaaggcccctctcaagtctcacactgttgacgagatcagggaggcagtcaggcaggacaacaagcagcggtttagtctgttggaggaagatggcgagctgttgatccgggcgaaccaggggcacacagtaacaactgtcacatcagagagcctgctgaagcccattttgtcccccgacgaagtgtcagtttgtgtgcatggaacttacagaaaaaaccttgactcgattttgcaatttgggctaaagcgtatggcaaggttacacatacatttctcaagcggcttaccatcagatggagaagtaaccagtggtgtacggcagaatgtaaacatcttgatacatctggacgttagtaaagcacttaaaggtgggatgaagctttatatttcagacaacaaagtgatcttgacagaaggttttgatggcgtcgtcccggtgaaatactttgaaagagtcgaaacatggccaggacgagctccaataccgttccagagataacaggccatgttaccatttttcggtaattcacatacatgattttttttttggggggggggagggggggcttaatatgcattgtgggtgtggaatatatcagcatttggtaaaatttgattgtgctgggacctctcagtgattcgattgatgattttccggactccgtgaaaagctgtggttctttgtgtgtcttttcggtttttgtgtaacgaaaccaaaagacgagttagtttctctgtgcctgaggatgtcaagagggtttgccaaccatctatcctaattaatggagtacgagaagtttgcggagtatgagcagaagtactcagaggatgcagcaaccaaacattgaaaagtatcatggggagttgcctgcctgctgggctgatgcccttcctctcagtttggcaacttccagaagcatacgcctgaggtgcgcaacgtctgcttcggagcgagggagcatggcatgggcggcatttgcaacggtgggcacagcccagggctccgtttcatggccaacgactgctatgcaagcagtccttctttacaagcgtgcaagcaaacatccggtccattagattacgatccaaccacagatataactataatttgttatggttttttataaagattattgagttggtggtgaaaaggtttaagtattaaatgtgacctacggttgaatcacgatctaatggaccagatggtttgcttatggtttgcttgcacgcttgcaaagaaggactgcttgcatagcagtcgttgccccgttctatgttgttggtacctatcttgcttctctgatcgatcaataaaaggagacattatttgagggaccctttttgggtgccttgtatgctgtagctgttcaagtggctgaataaggctgcaagtcttgtgtaaggtgagactctgatgcataagctttgcaacttgcaagtgatgttggattttggaatgttatcaactttagtacacgttttctggccgtctgatcgaatcctggacaccaggggtagaattaattggtcgatcagagctgttaatcgtcc

SEQ ID NO: 50518 - DNA, 1828 bp, Zea Mays
ccccaccgcacgcatccagtggctgctgccgcctcgcccccgctcctcctcctctcccgccacccacgccgcgcaggcctcacctactggtcgtcgttgcctaggggccagaacgcagggcccacagccccgccgcccgccaccgcctccaagcctgctgcgccgctcactgtcaacctgcctcgccaagtcgcccggatctcgacgccccacctgcggccggcggcggccccgccaaggtgccctgacagacgcggagacgccaccagaaccacggagttcgtgcgctggctggttgtctgcggaagactctccctctggcagtcaggcaggacaacaagcagcggtttagtctgttggaggaagatggcgagctgttgatccgggcgaaccaggggcacacagtaacaactgtcacatcagagagcctgctgaagcccattttgtcccccgacgaagtgtcagtttgtgtgcatggaacttacagaaaaaaccttgactcgattttgcaatttgggctaaagcgtatggcaaggttacacatacatttctcaagcggcttaccatcagatggagaagtaaccagtggtgtacggcagaatgtaaacatcttgatacatctggacgttagtaaagcacttaaaggtgggatgaagctttatatttcagacaacaaagtgatcttgacagaaggttttgatggcgtcgtcccggtgaaatactttgaaagagtcgaaacatggccaggacgagctccaataccgttccagagataacaggccatgttaccatttttcggtaattcacatacatgattttttttttggggggggggagggggggcttaatatgcattgtgggtgtggaatatatcagcatttggtaaaatttgattgtgctgggacctctcagtgattcgattgatgattttccggactccgtgaaaagctgtggttctttgtgtgtcttttcggtttttgtgtaacgaaaccaaaagacgagttagtttctctgtgcctgaggatgtcaagagggtttgccaaccatctatcctaattaatggagtacgagaagtttgcggagtatgagcagaagtactcagaggatgcagcaaccaaacattgaaaagtatcatggggagttgcctgcctgctgggctgatgcccttcctctcagtttggcaacttccagaagcatacgcctgaggtgcgcaacgtctgcttcggagcgagggagcatggcatgggcggcatttgcaacggtgggcacagcccagggctccgtttcatggccaacgactgctatgcaagcagtccttctttacaagcgtgcaagcaaacatccggtccattagattacgatccaaccacagatataactataatttgttatggttttttataaagattattgagttggtggtgaaaaggtttaagtattaaatgtgacctacggttgaatcacgatctaatggaccagatggtttgcttatggtttgcttgcacgcttgcaaagaaggactgcttgcatagcagtcgttgccccgttctatgttgttggtacctatcttgcttctctgatcgatcaataaaaggagacattatttgagggaccctttttgggtgccttgtatgctgtagctgttcaagtggctgaataaggctgcaagtcttgtgtaaggtgagactctgatgcataagctttgcaacttgcaagtgatgttggattttggaatgttatcaactttagtacacgttttctggccgtctgatcgaatcctggacaccaggggtagaattaattggtcgatcagagctgttaatcgtcc

SEQ ID NO: 50519 - DNA, 1940 bp, Zea Mays
ccccaccgcacgcatccagtggctgctgccgcctcgcccccgctcctcctcctctcccgccacccacgccgcgcaggcctcacctactggtcgtcgttgcctaggggccagaacgcagggcccacagccccgccgcccgccaccgcctccaagcctgctgcgccgctcactgtcaacctgcctcgccaagtcgcccggatctcgacgccccacctgcggccggcggcggccccgccaaggtgccctgacagacgcggagacgccaccagaaccacggagttcgtgcgctggctggttgtctgcggaagactctccctctgctccgccactgccgccacctccctgctccaaccccgcacctccgcttcgccatgaacccttcgtcgtcatccacctcctcctctggcgggtaccactctagggccgctgcctttgcttccccgcagccgcgcggcggtggcggtggcggcggccgagatgggagcgaccgcatcgacgccctcggtcgcctcctgacgagggtgttgcgccacatggcggcggagctgcgcatagatatgaggaccgatggatacgtgcgcgtccgcgacctgttgaagctcaaccttcagaccttcgccaaggcccctctcaagtctcacactgttgacgagatcagggaggcagtcaggcaggacaacaagcagcggtttagtctgttggaggaagatggcgagctgttgatccgggcgaaccaggggcacacagtaacaactgtcacatcagagagcctgctgaagcccattttgtcccccgacgaagtgtcagtttgtgtgcatggaacttacagaaaaaaccttgactcgattttgcaatttgggctaaagcgtatggcaaggttacacatacatttctcaagcggcttaccatcagatggagaagtaaccagtggtgtacggcagaatgtaaacatcttgatacatctggacgttagtaaagcacttaaaggtgggatgaagctttatatttcagacaacaaagtgatcttgacagaaggttttgatggcgtcgtcccggtgaaatactttgaaagagtcgaaacatggccaggacgagctccaataccgttccagagataacaggccatgttaccatttttcgagggtttgccaaccatctatcctaattaatggagtacgagaagtttgcggagtatgagcagaagtactcagaggatgcagcaaccaaacattgaaaagtatcatggggagttgcctgcctgctgggctgatgcccttcctcagctcagtttggcaacttccagaagcatacgcctgaggtgcgcaacgtctgcttcggagcgagggagcatggcatgggcggcatttgcaacggtgggcacagcccagggctccgtttcatggccaacgactgctatgcaagcagtccttctttacaagcgtgcaagcaaacatccggtccattagattacgatccaaccacagatataactataatttgttatggttttttataaagattattgagttggtggtgaaaaggtttaagtattaaatgtgacctacggttgaatcacgatctaatggaccagatggtttgcttatggtttgcttgcacgcttgcaaagaaggactgcttgcatagcagtcgttgccccgttctatgttgttggtacctatcttgcttctctgatcgatcaataaaaggagacattatttgagggaccctttttgggtgccttgtatgctgtagctgttcaagtggctgaataaggctgcaagtcttgtgtaaggtgagactctgatgcataagctttgcaacttgcaagtgatgttggattttggaatgttatcaactttagtacacgttttctggccgtctgatcgaatcctggacaccaggggtagaattaattggtcgatcagagctgttaatcgtcc

SEQ ID NO: 50520 - DNA, 1952 bp, Zea Mays
ccccaccgcacgcatccagtggctgctgccgcctcgcccccgctcctcctcctctcccgccacccacgccgcgcaggcctcacctactggtcgtcgttgcctaggggccagaacgcagggcccacagccccgccgcccgccaccgcctccaagcctgctgcgccgctcactgtcaacctgcctcgccaagtcgcccggatctcgacgccccacctgcggccggcggcggccccgccaaggtgccctgacagacgcggagacgccaccagaaccacggagttcgtgcgctggctggttgtctgcggaagactctccctctgctccgccactgccgccacctccctgctccaaccccgcacctccgcttcgccatgaacccttcgtcgtcatccacctcctcctctggcgggtaccactctagggccgctgcctttgcttccccgcagccgcgcggcggtggcggtggcggcggccgagatgggagcgaccgcatcgacgccctcggtcgcctcctgacgagggtgttgcgccacatggcggcggagctgcgcatagatatgaggaccgatggatacgtgcgcgtccgcgacctgttgaagctcaaccttcagaccttcgccaaggcccctctcaagtctcacactgttgacgagatcagggaggcagtcaggcaggacaacaagcagcggtttagtctgttggaggaagatggcgagctgttgatccgggcgaaccaggggcacacagtaacaactgtcacatcagagagcctgctgaagcccattttgtcccccgacgaagtgtcagaaaaaaccttgactcgattttgcaatttgggctaaagcgtatggcaaggttacacatacatttctcaagcggcttaccatcagatggagaagtaaccagtggtgtacggcagaatgtaaacatcttgatacatctggacgttagtaaagcacttaaaggtgggatgaagctttatatttcagacaacaaagtgatcttgacagaaggttttgatggcgtcgtcccggtgaaatactttgaaagagtcgaaacatggccaggacgagctccaataccgttccagagataacaggccatgttaccatttttcgacgagttagtttctctgtgcctgaggatgtcaagagggtttgccaaccatctatcctaattaatggagtacgagaagtttgcggagtatgagcagaagtactcagaggatgcagcaaccaaacattgaaaagtatcatggggagttgcctgcctgctgggctgatgcccttcctcagctcagtttggcaacttccagaagcatacgcctgaggtgcgcaacgtctgcttcggagcgagggagcatggcatgggcggcatttgcaacggtgggcacagcccagggctccgtttcatggccaacgactgctatgcaagcagtccttctttacaagcgtgcaagcaaacatccggtccattagattacgatccaaccacagatataactataatttgttatggttttttataaagattattgagttggtggtgaaaaggtttaagtattaaatgtgacctacggttgaatcacgatctaatggaccagatggtttgcttatggtttgcttgcacgcttgcaaagaaggactgcttgcatagcagtcgttgccccgttctatgttgttggtacctatcttgcttctctgatcgatcaataaaaggagacattatttgagggaccctttttgggtgccttgtatgctgtagctgttcaagtggctgaataaggctgcaagtcttgtgtaaggtgagactctgatgcataagctttgcaacttgcaagtgatgttggattttggaatgttatcaactttagtacacgttttctggccgtctgatcgaatcctggacaccaggggtagaattaattggtcgatcagagctgttaatcgtcc

SEQ ID NO: 50521 - DNA, 1831 bp, Zea Mays
ccccaccgcacgcatccagtggctgctgccgcctcgcccccgctcctcctcctctcccgccacccacgccgcgcaggcctcacctactggtcgtcgttgcctaggggccagaacgcagggcccacagccccgccgcccgccaccgcctccaagcctgctgcgccgctcactgtcaacctgcctcgccaagtcgcccggatctcgacgccccacctgcggccggcggcggccccgccaaggtgccctgacagacgcggagacgccaccagaaccacggagttcgtgcgctggctggttgtctgcggaagactctccctctggcagtcaggcaggacaacaagcagcggtttagtctgttggaggaagatggcgagctgttgatccgggcgaaccaggggcacacagtaacaactgtcacatcagagagcctgctgaagcccattttgtcccccgacgaagtgtcagtttgtgtgcatggaacttacagaaaaaaccttgactcgattttgcaatttgggctaaagcgtatggcaaggttacacatacatttctcaagcggcttaccatcagatggagaagtaaccagtggtgtacggcagaatgtaaacatcttgatacatctggacgttagtaaagcacttaaaggtgggatgaagctttatatttcagacaacaaagtgatcttgacagaaggttttgatggcgtcgtcccggtgaaatactttgaaagagtcgaaacatggccaggacgagctccaataccgttccagagataacaggccatgttaccatttttcggtaattcacatacatgattttttttttggggggggggagggggggcttaatatgcattgtgggtgtggaatatatcagcatttggtaaaatttgattgtgctgggacctctcagtgattcgattgatgattttccggactccgtgaaaagctgtggttctttgtgtgtcttttcggtttttgtgtaacgaaaccaaaagacgagttagtttctctgtgcctgaggatgtcaagagggtttgccaaccatctatcctaattaatggagtacgagaagtttgcggagtatgagcagaagtactcagaggatgcagcaaccaaacattgaaaagtatcatggggagttgcctgcctgctgggctgatgcccttcctcagctcagtttggcaacttccagaagcatacgcctgaggtgcgcaacgtctgcttcggagcgagggagcatggcatgggcggcatttgcaacggtgggcacagcccagggctccgtttcatggccaacgactgctatgcaagcagtccttctttacaagcgtgcaagcaaacatccggtccattagattacgatccaaccacagatataactataatttgttatggttttttataaagattattgagttggtggtgaaaaggtttaagtattaaatgtgacctacggttgaatcacgatctaatggaccagatggtttgcttatggtttgcttgcacgcttgcaaagaaggactgcttgcatagcagtcgttgccccgttctatgttgttggtacctatcttgcttctctgatcgatcaataaaaggagacattatttgagggaccctttttgggtgccttgtatgctgtagctgttcaagtggctgaataaggctgcaagtcttgtgtaaggtgagactctgatgcataagctttgcaacttgcaagtgatgttggattttggaatgttatcaactttagtacacgttttctggccgtctgatcgaatcctggacaccaggggtagaattaattggtcgatcagagctgttaatcgtcc

SEQ ID NO: 50522 - DNA, 2114 bp, Zea Mays
ccccaccgcacgcatccagtggctgctgccgcctcgcccccgctcctcctcctctcccgccacccacgccgcgcaggcctcacctactggtcgtcgttgcctaggggccagaacgcagggcccacagccccgccgcccgccaccgcctccaagcctgctgcgccgctcactgtcaacctgcctcgccaagtcgcccggatctcgacgccccacctgcggccggcggcggccccgccaaggtgccctgacagacgcggagacgccaccagaaccacggagttcgtgcgctggctggttgtctgcggaagactctccctctgctccgccactgccgccacctccctgctccaaccccgcacctccgcttcgccatgaacccttcgtcgtcatccacctcctcctctggcgggtaccactctagggccgctgcctttgcttccccgcagccgcgcggcggtggcggtggcggcggccgagatgggagcgaccgcatcgacgccctcggtcgcctcctgacgagggtgttgcgccacatggcggcggagctgcgcatagatatgaggaccgatggatacgtgcgcgtccgcgacctgttgaagctcaaccttcagaccttcgccaaggcccctctcaagtctcacactgttgacgagatcagggaggcagtcaggcaggacaacaagcagcggtttagtctgttggaggaagatggcgagctgttgatccgggcgaaccaggggcacacagtaacaactgtcacatcagagagcctgctgaagcccattttgtcccccgacgaagtgtcagcgtatggcaaggttacacatacatttctcaagcggcttaccatcagatggagaagtaaccagtggtgtacggcagaatgtaaacatcttgatacatctggacgttagtaaagcacttaaaggtgggatgaagctttatatttcagacaacaaagtgatcttgacagaaggttttgatggcgtcgtcccggtgaaatactttgaaagagtcgaaacatggccaggacgagctccaataccgttccagagataacaggccatgttaccatttttcggtaattcacatacatgattttttttttggggggggggagggggggcttaatatgcattgtgggtgtggaatatatcagcatttggtaaaatttgattgtgctgggacctctcagtgattcgattgatgattttccggactccgtgaaaagctgtggttctttgtgtgtcttttcggtttttgtgtaacgaaaccaaaagacgagttagtttctctgtgcctgaggatgtcaagagggtttgccaaccatctatcctaattaatggagtacgagaagtttgcggagtatgagcagaagtactcagaggatgcagcaaccaaacattgaaaagtatcatggggagttgcctgcctgctgggctgatgcccttcctcagctcagtttggcaacttccagaagcatacgcctgaggtgcgcaacgtctgcttcggagcgagggagcatggcatgggcggcatttgcaacggtgggcacagcccagggctccgtttcatggccaacgactgctatgcaagcagtccttctttacaagcgtgcaagcaaacatccggtccattagattacgatccaaccacagatataactataatttgttatggttttttataaagattattgagttggtggtgaaaaggtttaagtattaaatgtgacctacggttgaatcacgatctaatggaccagatggtttgcttatggtttgcttgcacgcttgcaaagaaggactgcttgcatagcagtcgttgccccgttctatgttgttggtacctatcttgcttctctgatcgatcaataaaaggagacattatttgagggaccctttttgggtgccttgtatgctgtagctgttcaagtggctgaataaggctgcaagtcttgtgtaaggtgagactctgatgcataagctttgcaacttgcaagtgatgttggattttggaatgttatcaactttagtacacgttttctggccgtctgatcgaatcctggacaccaggggtagaattaattggtcgatcagagctgttaatcgtcc

SEQ ID NO: 50523 - DNA, 1953 bp, Zea Mays
ccccaccgcacgcatccagtggctgctgccgcctcgcccccgctcctcctcctctcccgccacccacgccgcgcaggcctcacctactggtcgtcgttgcctaggggccagaacgcagggcccacagccccgccgcccgccaccgcctccaagcctgctgcgccgctcactgtcaacctgcctcgccaagtcgcccggatctcgacgccccacctgcggccggcggcggccccgccaaggtgccctgacagacgcggagacgccaccagaaccacggagttcgtgcgctggctggttgtctgcggaagactctccctctggacgagggtgttgcgccacatggcggcggagctgcgcatagatatgaggaccgatggatacgtgcgcgtccgcgacctgttgaagctcaaccttcagaccttcgccaaggcccctctcaagtctcacactgttgacgagatcagggagtcaggcaggacaacaagcagcggtttagtctgttggaggaagatggcgagctgttgatccgggcgaaccaggggcacacagtaacaactgtcacatcagagagcctgctgaagcccattttgtcccccgacgaagtgtcagaaaaaaccttgactcgattttgcaatttgggctaaagcgtatggcaaggttacacatacatttctcaagcggcttaccatcagatggagaagtaaccagtggtgtacggcagaatgtaaacatcttgatacatctggacgttagtaaagcacttaaaggtgggatgaagctttatatttcagacaacaaagtgatcttgacagaaggttttgatggcgtcgtcccggtgaaatactttgaaagagtcgaaacatggccaggacgagctccaataccgttccagagataacaggccatgttaccatttttcggtaattcacatacatgattttttttttggggggggggagggggggcttaatatgcattgtgggtgtggaatatatcagcatttggtaaaatttgattgtgctgggacctctcagtgattcgattgatgattttccggactccgtgaaaagctgtggttctttgtgtgtcttttcggtttttgtgtaacgaaaccaaaagacgagttagtttctctgtgcctgaggatgtcaagagggtttgccaaccatctatcctaattaatggagtacgagaagtttgcggagtatgagcagaagtactcagaggatgcagcaaccaaacattgaaaagtatcatggggagttgcctgcctgctgggctgatgcccttcctcagctcagtttggcaacttccagaagcatacgcctgaggtgcgcaacgtctgcttcggagcgagggagcatggcatgggcggcatttgcaacggtgggcacagcccagggctccgtttcatggccaacgactgctatgcaagcagtccttctttacaagcgtgcaagcaaacatccggtccattagattacgatccaaccacagatataactataatttgttatggttttttataaagattattgagttggtggtgaaaaggtttaagtattaaatgtgacctacggttgaatcacgatctaatggaccagatggtttgcttatggtttgcttgcacgcttgcaaagaaggactgcttgcatagcagtcgttgccccgttctatgttgttggtacctatcttgcttctctgatcgatcaataaaaggagacattatttgagggaccctttttgggtgccttgtatgctgtagctgttcaagtggctgaataaggctgcaagtcttgtgtaaggtgagactctgatgcataagctttgcaacttgcaagtgatgttggattttggaatgttatcaactttagtacacgttttctggccgtctgatcgaatcctggacaccaggggtagaattaattggtcgatcagagctgttaatcgtcc

SEQ ID NO: 50524 - DNA, 2067 bp, Zea Mays
ccccaccgcacgcatccagtggctgctgccgcctcgcccccgctcctcctcctctcccgccacccacgccgcgcaggcctcacctactggtcgtcgttgcctaggggccagaacgcagggcccacagccccgccgcccgccaccgcctccaagcctgctgcgccgctcactgtcaacctgcctcgccaagtcgcccggatctcgacgccccacctgcggccggcggcggccccgccaagctccgccactgccgccacctccctgctccaaccccgcacctccgcttcgccatgaacccttcgtcgtcatccacctcctcctctggcgggtaccactctagggccgctgcctttgcttccccgcagccgcgcggcggtggcggtggcggcggccgagatgggagcgaccgcatcgacgccctcggtcgcctcctgacgagggtgttgcgccacatggcggcggagctgcgcatagatatgaggaccgatggatacgtgcgcgtccgcgacctgttgaagctcaaccttcagaccttcgccaaggcccctctcaagtctcacactgttgacgagatcagggaggcagtcaggcaggacaacaagcagcggtttagtctgttggaggaagatggcgagctgttgatccgggcgaaccaggggcacacagtaacaactgtcacatcagagagcctgctgaagcccattttgtcccccgacgaagtgtcagaaaaaaccttgactcgattttgcaatttgggctaaagcgtatggcaaggttacacatacatttctcaagcggcttaccatcagatggagaagtaaccagtggtgtacggcagaatgtaaacatcttgatacatctggacgttagtaaagcacttaaaggtgggatgaagctttatatttcagacaacaaagtgatcttgacagaaggttttgatggcgtcgtcccggtgaaatactttgaaagagtcgaaacatggccaggacgagctccaataccgttccagagataacaggccatgttaccatttttcggtaattcacatacatgattttttttttggggggggggagggggggcttaatatgcattgtgggtgtggaatatatcagcatttggtaaaatttgattgtgctgggacctctcagtgattcgattgatgattttccggactccgtgaaaagctgtggttctttgtgtgtcttttcggtttttgtgtaacgaaaccaaaagacgagttagtttctctgtgcctgaggatgtcaagagggtttgccaaccatctatcctaattaatggagtacgagaagtttgcggagtatgagcagaagtactcagaggatgcagcaaccaaacattgaaaagtatcatggggagttgcctgcctgctgggctgatgcccttcctctcagtttggcaacttccagaagcatacgcctgaggtgcgcaacgtctgcttcggagcgagggagcatggcatgggcggcatttgcaacggtgggcacagcccagggctccgtttcatggccaacgactgctatgcaagcagtccttctttacaagcgtgcaagcaaacatccggtccattagattacgatccaaccacagatataactataatttgttatggttttttataaagattattgagttggtggtgaaaaggtttaagtattaaatgtgacctacggttgaatcacgatctaatggaccagatggtttgcttatggtttgcttgcacgcttgcaaagaaggactgcttgcatagcagtcgttgccccgttctatgttgttggtacctatcttgcttctctgatcgatcaataaaaggagacattatttgagggaccctttttgggtgccttgtatgctgtagctgttcaagtggctgaataaggctgcaagtcttgtgtaaggtgagactctgatgcataagctttgcaacttgcaagtgatgttggattttggaatgttatcaactttagtacacgttttctggccgtctgatcgaatcctggacaccaggggtagaattaattggtcgatcagagctgttaatcgtcc

SEQ ID NO: 50525 - DNA, 1956 bp, Zea Mays
ccccaccgcacgcatccagtggctgctgccgcctcgcccccgctcctcctcctctcccgccacccacgccgcgcaggcctcacctactggtcgtcgttgcctaggggccagaacgcagggcccacagccccgccgcccgccaccgcctccaagcctgctgcgccgctcactgtcaacctgcctcgccaagtcgcccggatctcgacgccccacctgcggccggcggcggccccgccaagctccgccactgccgccacctccctgctccaaccccgcacctccgcttcgccatgaacccttcgtcgtcatccacctcctcctctggcgggtaccactctagggccgctgcctttgcttccccgcagccgcgcggcggtggcggtggcggcggccgagatgggagcgaccgcatcgacgccctcggtcgcctcctgacgagggtgttgcgccacatggcggcggagctgcgcatagatatgaggaccgatggatacgtgcgcgtccgcgacctgttgaagctcaaccttcagaccttcgccaaggcccctctcaagtctcacactgttgacgagatcagggaggcagtcaggcaggacaacaagcagcggtttagtctgttggaggaagatggcgagctgttgatccgggcgaaccaggggcacacagtaacaactgtcacatcagagagcctgctgaagcccattttgtcccccgacgaagtgtcagaaaaaaccttgactcgattttgcaatttgggctaaagcgtatggcaaggttacacatacatttctcaagcggcttaccatcagatggagaagtaaccagtggtgtacggcagaatgtaaacatcttgatacatctggacgttagtaaagcacttaaaggtgggatgaagctttatatttcagacaacaaagtgatcttgacagaaggttttgatggcgtcgtcccggtgaaatactttgaaagagtcgaaacatggccaggacgagctccaataccgttccagagataacaggccatgttaccatttttcgtgattcgattgatgattttccggactccgtgaaaagctgtggttctttgtgtgtcttttcggtttttgtgtaacgaaaccaaaagacgagttagtttctctgtgcctgaggatgtcaagagggtttgccaaccatctatcctaattaatggagtacgagaagtttgcggagtatgagcagaagtactcagaggatgcagcaaccaaacattgaaaagtatcatggggagttgcctgcctgctgggctgatgcccttcctcagctcagtttggcaacttccagaagcatacgcctgaggtgcgcaacgtctgcttcggagcgagggagcatggcatgggcggcatttgcaacggtgggcacagcccagggctccgtttcatggccaacgactgctatgcaagcagtccttctttacaagcgtgcaagcaaacatccggtccattagattacgatccaaccacagatataactataatttgttatggttttttataaagattattgagttggtggtgaaaaggtttaagtattaaatgtgacctacggttgaatcacgatctaatggaccagatggtttgcttatggtttgcttgcacgcttgcaaagaaggactgcttgcatagcagtcgttgccccgttctatgttgttggtacctatcttgcttctctgatcgatcaataaaaggagacattatttgagggaccctttttgggtgccttgtatgctgtagctgttcaagtggctgaataaggctgcaagtcttgtgtaaggtgagactctgatgcataagctttgcaacttgcaagtgatgttggattttggaatgttatcaactttagtacacgttttctggccgtctgatcgaatcctggacaccaggggtagaattaattggtcgatcagagctgttaatcgtcc

SEQ ID NO: 50526 - DNA, 1976 bp, Zea Mays
ccccaccgcacgcatccagtggctgctgccgcctcgcccccgctcctcctcctctcccgccacccacgccgcgcaggcctcacctactggtcgtcgttgcctaggggccagaacgcagggcccacagccccgccgcccgccaccgcctccaagcctgctgcgccgctcactgtcaacctgcctcgccaagtcgcccggatctcgacgccccacctgcggccggcggcggccccgccaaggtgccctgacagacgcggagacgccaccagaaccacggagttcgtgcgctggctggttgtctgcggaagactctccctctggacgagggtgttgcgccacatggcggcggagctgcgcatagatatgaggaccgatggatacgtgcgcgtccgcgacctgttgaagctcaaccttcagaccttcgccaaggcccctctcaagtctcacactgttgacgagatcagggaggcagtcaggcaggacaacaagcagcggtttagtctgttggaggaagatggcgagctgttgatccgggcgaaccaggggcacacagtaacaactgtcacatcagagagcctgctgaagcccattttgtcccccgacgaagtgtcagtttgtgtgcatggaacttacagaaaaaaccttgactcgattttgcaatttgggctaaagcgtatggcaaggttacacatacatttctcaagcggcttaccatcagatggagaagtaaccagtggtgtacggcagaatgtaaacatcttgatacatctggacgttagtaaagcacttaaaggtgggatgaagctttatatttcagacaacaaagtgatcttgacagaaggttttgatggcgtcgtcccggtgaaatactttgaaagagtcgaaacatggccaggacgagctccaataccgttccagagataacaggccatgttaccatttttcggtaattcacatacatgattttttttttggggggggggagggggggcttaatatgcattgtgggtgtggaatatatcagcatttggtaaaatttgattgtgctgggacctctcagtgattcgattgatgattttccggactccgtgaaaagctgtggttctttgtgtgtcttttcggtttttgtgtaacgaaaccaaaagacgagttagtttctctgtgcctgaggatgtcaagagggtttgccaaccatctatcctaattaatggagtacgagaagtttgcggagtatgagcagaagtactcagaggatgcagcaaccaaacattgaaaagtatcatggggagttgcctgcctgctgggctgatgcccttcctctcagtttggcaacttccagaagcatacgcctgaggtgcgcaacgtctgcttcggagcgagggagcatggcatgggcggcatttgcaacggtgggcacagcccagggctccgtttcatggccaacgactgctatgcaagcagtccttctttacaagcgtgcaagcaaacatccggtccattagattacgatccaaccacagatataactataatttgttatggttttttataaagattattgagttggtggtgaaaaggtttaagtattaaatgtgacctacggttgaatcacgatctaatggaccagatggtttgcttatggtttgcttgcacgcttgcaaagaaggactgcttgcatagcagtcgttgccccgttctatgttgttggtacctatcttgcttctctgatcgatcaataaaaggagacattatttgagggaccctttttgggtgccttgtatgctgtagctgttcaagtggctgaataaggctgcaagtcttgtgtaaggtgagactctgatgcataagctttgcaacttgcaagtgatgttggattttggaatgttatcaactttagtacacgttttctggccgtctgatcgaatcctggacaccaggggtagaattaattggtcgatcagagctgttaatcgtcc

SEQ ID NO: 50527 - DNA, 1957 bp, Zea Mays
ccccaccgcacgcatccagtggctgctgccgcctcgcccccgctcctcctcctctcccgccacccacgccgcgcaggcctcacctactggtcgtcgttgcctaggggccagaacgcagggcccacagccccgccgcccgccaccgcctccaagcctgctgcgccgctcactgtcaacctgcctcgccaagtcgcccggatctcgacgccccacctgcggccggcggcggccccgccaaggtgccctgacagacgcggagacgccaccagaaccacggagttcgtgcgctggctggttgtctgcggaagactctccctctggacgagggtgttgcgccacatggcggcggagctgcgcatagatatgaggaccgatggatacgtgcgcgtccgcgacctgttgaagctcaaccttcagaccttcgccaaggcccctctcaagtctcacactgttgacgagatcagggaggcagtcaggcaggacaacaagcagcggtttagtctgttggaggaagatggcgagctgttgatccgggcgaaccaggggcacacagtaacaactgtcacatcagagagcctgctgaagcccattttgtcccccgacgaagtgtcagaaaaaaccttgactcgattttgcaatttgggctaaagcgtatggcaaggttacacatacatttctcaagcggcttaccatcagatggagaagtaaccagtggtgtacggcagaatgtaaacatcttgatacatctggacgttagtaaagcacttaaaggtgggatgaagctttatatttcagacaacaaagtgatcttgacagaaggttttgatggcgtcgtcccggtgaaatactttgaaagagtcgaaacatggccaggacgagctccaataccgttccagagataacaggccatgttaccatttttcggtaattcacatacatgattttttttttggggggggggagggggggcttaatatgcattgtgggtgtggaatatatcagcatttggtaaaatttgattgtgctgggacctctcagtgattcgattgatgattttccggactccgtgaaaagctgtggttctttgtgtgtcttttcggtttttgtgtaacgaaaccaaaagacgagttagtttctctgtgcctgaggatgtcaagagggtttgccaaccatctatcctaattaatggagtacgagaagtttgcggagtatgagcagaagtactcagaggatgcagcaaccaaacattgaaaagtatcatggggagttgcctgcctgctgggctgatgcccttcctcagctcagtttggcaacttccagaagcatacgcctgaggtgcgcaacgtctgcttcggagcgagggagcatggcatgggcggcatttgcaacggtgggcacagcccagggctccgtttcatggccaacgactgctatgcaagcagtccttctttacaagcgtgcaagcaaacatccggtccattagattacgatccaaccacagatataactataatttgttatggttttttataaagattattgagttggtggtgaaaaggtttaagtattaaatgtgacctacggttgaatcacgatctaatggaccagatggtttgcttatggtttgcttgcacgcttgcaaagaaggactgcttgcatagcagtcgttgccccgttctatgttgttggtacctatcttgcttctctgatcgatcaataaaaggagacattatttgagggaccctttttgggtgccttgtatgctgtagctgttcaagtggctgaataaggctgcaagtcttgtgtaaggtgagactctgatgcataagctttgcaacttgcaagtgatgttggattttggaatgttatcaactttagtacacgttttctggccgtctgatcgaatcctggacaccaggggtagaattaattggtcgatcagagctgttaatcgtcc

SEQ ID NO: 50528 - DNA, 1979 bp, Zea Mays
ccccaccgcacgcatccagtggctgctgccgcctcgcccccgctcctcctcctctcccgccacccacgccgcgcaggcctcacctactggtcgtcgttgcctaggggccagaacgcagggcccacagccccgccgcccgccaccgcctccaagcctgctgcgccgctcactgtcaacctgcctcgccaagtcgcccggatctcgacgccccacctgcggccggcggcggccccgccaaggtgccctgacagacgcggagacgccaccagaaccacggagttcgtgcgctggctggttgtctgcggaagactctccctctggacgagggtgttgcgccacatggcggcggagctgcgcatagatatgaggaccgatggatacgtgcgcgtccgcgacctgttgaagctcaaccttcagaccttcgccaaggcccctctcaagtctcacactgttgacgagatcagggaggcagtcaggcaggacaacaagcagcggtttagtctgttggaggaagatggcgagctgttgatccgggcgaaccaggggcacacagtaacaactgtcacatcagagagcctgctgaagcccattttgtcccccgacgaagtgtcagtttgtgtgcatggaacttacagaaaaaaccttgactcgattttgcaatttgggctaaagcgtatggcaaggttacacatacatttctcaagcggcttaccatcagatggagaagtaaccagtggtgtacggcagaatgtaaacatcttgatacatctggacgttagtaaagcacttaaaggtgggatgaagctttatatttcagacaacaaagtgatcttgacagaaggttttgatggcgtcgtcccggtgaaatactttgaaagagtcgaaacatggccaggacgagctccaataccgttccagagataacaggccatgttaccatttttcggtaattcacatacatgattttttttttggggggggggagggggggcttaatatgcattgtgggtgtggaatatatcagcatttggtaaaatttgattgtgctgggacctctcagtgattcgattgatgattttccggactccgtgaaaagctgtggttctttgtgtgtcttttcggtttttgtgtaacgaaaccaaaagacgagttagtttctctgtgcctgaggatgtcaagagggtttgccaaccatctatcctaattaatggagtacgagaagtttgcggagtatgagcagaagtactcagaggatgcagcaaccaaacattgaaaagtatcatggggagttgcctgcctgctgggctgatgcccttcctcagctcagtttggcaacttccagaagcatacgcctgaggtgcgcaacgtctgcttcggagcgagggagcatggcatgggcggcatttgcaacggtgggcacagcccagggctccgtttcatggccaacgactgctatgcaagcagtccttctttacaagcgtgcaagcaaacatccggtccattagattacgatccaaccacagatataactataatttgttatggttttttataaagattattgagttggtggtgaaaaggtttaagtattaaatgtgacctacggttgaatcacgatctaatggaccagatggtttgcttatggtttgcttgcacgcttgcaaagaaggactgcttgcatagcagtcgttgccccgttctatgttgttggtacctatcttgcttctctgatcgatcaataaaaggagacattatttgagggaccctttttgggtgccttgtatgctgtagctgttcaagtggctgaataaggctgcaagtcttgtgtaaggtgagactctgatgcataagctttgcaacttgcaagtgatgttggattttggaatgttatcaactttagtacacgttttctggccgtctgatcgaatcctggacaccaggggtagaattaattggtcgatcagagctgttaatcgtcc

SEQ ID NO: 50529 - DNA, 1714 bp, Zea Mays
tactggttttatttcgttggttgattgattgatgaactgctgtcgaacttgttaggctacttgatttgtgctaaacgctgtttcttctcattactcctagcttgtataggtagacttgccttttggaatgctggcatgctcttgatttctttggattatgaattttgccgtgaactatgagcaatactcagtttgatgagaaattgtgacattttggctggcgtgcaggcagtcaggcaggacaacaagcagcggtttagtctgttggaggaagatggcgagctgttgatccgggcgaaccaggggcacacagtaacaactgtcacatcagagagcctgctgaagcccattttgtcccccgacgaagtgtcagaaaaaaccttgactcgattttgcaatttgggctaaagcgtatggcaaggttacacatacatttctcaagcggcttaccatcagatggagaagtaaccagtggtgtacggcagaatgtaaacatcttgatacatctggacgttagtaaagcacttaaaggtgggatgaagctttatatttcagacaacaaagtgatcttgacagaaggttttgatggcgtcgtcccggtgaaatactttgaaagagtcgaaacatggccaggacgagctccaataccgttccagagataacaggccatgttaccatttttcggtaattcacatacatgattttttttttggggggggggagggggggcttaatatgcattgtgggtgtggaatatatcagcatttggtaaaatttgattgtgctgggacctctcagtgattcgattgatgattttccggactccgtgaaaagctgtggttctttgtgtgtcttttcggtttttgtgtaacgaaaccaaaagacgagttagtttctctgtgcctgaggatgtcaagagggtttgccaaccatctatcctaattaatggagtacgagaagtttgcggagtatgagcagaagtactcagaggatgcagcaaccaaacattgaaaagtatcatggggagttgcctgcctgctgggctgatgcccttcctctcagtttggcaacttccagaagcatacgcctgaggtgcgcaacgtctgcttcggagcgagggagcatggcatgggcggcatttgcaacggtgggcacagcccagggctccgtttcatggccaacgactgctatgcaagcagtccttctttacaagcgtgcaagcaaacatccggtccattagattacgatccaaccacagatataactataatttgttatggttttttataaagattattgagttggtggtgaaaaggtttaagtattaaatgtgacctacggttgaatcacgatctaatggaccagatggtttgcttatggtttgcttgcacgcttgcaaagaaggactgcttgcatagcagtcgttgccccgttctatgttgttggtacctatcttgcttctctgatcgatcaataaaaggagacattatttgagggaccctttttgggtgccttgtatgctgtagctgttcaagtggctgaataaggctgcaagtcttgtgtaaggtgagactctgatgcataagctttgcaacttgcaagtgatgttggattttggaatgttatcaactttagtacacgttttctggccgtctgatcgaatcctggacaccaggggtagaattaattggtcgatcagagctgttaatcgtcc

SEQ ID NO: 50530 - DNA, 1603 bp, Zea Mays
tactggttttatttcgttggttgattgattgatgaactgctgtcgaacttgttaggctacttgatttgtgctaaacgctgtttcttctcattactcctagcttgtataggtagacttgccttttggaatgctggcatgctcttgatttctttggattatgaattttgccgtgaactatgagcaatactcagtttgatgagaaattgtgacattttggctggcgtgcaggcagtcaggcaggacaacaagcagcggtttagtctgttggaggaagatggcgagctgttgatccgggcgaaccaggggcacacagtaacaactgtcacatcagagagcctgctgaagcccattttgtcccccgacgaagtgtcagaaaaaaccttgactcgattttgcaatttgggctaaagcgtatggcaaggttacacatacatttctcaagcggcttaccatcagatggagaagtaaccagtggtgtacggcagaatgtaaacatcttgatacatctggacgttagtaaagcacttaaaggtgggatgaagctttatatttcagacaacaaagtgatcttgacagaaggttttgatggcgtcgtcccggtgaaatactttgaaagagtcgaaacatggccaggacgagctccaataccgttccagagataacaggccatgttaccatttttcgtgattcgattgatgattttccggactccgtgaaaagctgtggttctttgtgtgtcttttcggtttttgtgtaacgaaaccaaaagacgagttagtttctctgtgcctgaggatgtcaagagggtttgccaaccatctatcctaattaatggagtacgagaagtttgcggagtatgagcagaagtactcagaggatgcagcaaccaaacattgaaaagtatcatggggagttgcctgcctgctgggctgatgcccttcctcagctcagtttggcaacttccagaagcatacgcctgaggtgcgcaacgtctgcttcggagcgagggagcatggcatgggcggcatttgcaacggtgggcacagcccagggctccgtttcatggccaacgactgctatgcaagcagtccttctttacaagcgtgcaagcaaacatccggtccattagattacgatccaaccacagatataactataatttgttatggttttttataaagattattgagttggtggtgaaaaggtttaagtattaaatgtgacctacggttgaatcacgatctaatggaccagatggtttgcttatggtttgcttgcacgcttgcaaagaaggactgcttgcatagcagtcgttgccccgttctatgttgttggtacctatcttgcttctctgatcgatcaataaaaggagacattatttgagggaccctttttgggtgccttgtatgctgtagctgttcaagtggctgaataaggctgcaagtcttgtgtaaggtgagactctgatgcataagctttgcaacttgcaagtgatgttggattttggaatgttatcaactttagtacacgttttctggccgtctgatcgaatcctggacaccaggggtagaattaattggtcgatcagagctgttaatcgtcc

SEQ ID NO: 50531 - DNA, 1680 bp, Zea Mays
tactggttttatttcgttggttgattgattgatgaactgctgtcgaacttgttaggctacttgatttgtgctaaacgctgtttcttctcattactcctagcttgtataggtagacttgccttttggaatgctggcatgctcttgatttctttggattatgaattttgccgtgaactatgagcaatactcagtttgatgagaaattgtgacattttggctggcgtgcaggcagtcaggcaggacaacaagcagcggtttagtctgttggaggaagatggcgagctgttgatccgggcgaaccaggggcacacagtaacaactgtcacatcagagagcctgctgaagcccattttgtcccccgacgaagtgtcagcgtatggcaaggttacacatacatttctcaagcggcttaccatcagatggagaagtaaccagtggtgtacggcagaatgtaaacatcttgatacatctggacgttagtaaagcacttaaaggtgggatgaagctttatatttcagacaacaaagtgatcttgacagaaggttttgatggcgtcgtcccggtgaaatactttgaaagagtcgaaacatggccaggacgagctccaataccgttccagagataacaggccatgttaccatttttcggtaattcacatacatgattttttttttggggggggggagggggggcttaatatgcattgtgggtgtggaatatatcagcatttggtaaaatttgattgtgctgggacctctcagtgattcgattgatgattttccggactccgtgaaaagctgtggttctttgtgtgtcttttcggtttttgtgtaacgaaaccaaaagacgagttagtttctctgtgcctgaggatgtcaagagggtttgccaaccatctatcctaattaatggagtacgagaagtttgcggagtatgagcagaagtactcagaggatgcagcaaccaaacattgaaaagtatcatggggagttgcctgcctgctgggctgatgcccttcctcagctcagtttggcaacttccagaagcatacgcctgaggtgcgcaacgtctgcttcggagcgagggagcatggcatgggcggcatttgcaacggtgggcacagcccagggctccgtttcatggccaacgactgctatgcaagcagtccttctttacaagcgtgcaagcaaacatccggtccattagattacgatccaaccacagatataactataatttgttatggttttttataaagattattgagttggtggtgaaaaggtttaagtattaaatgtgacctacggttgaatcacgatctaatggaccagatggtttgcttatggtttgcttgcacgcttgcaaagaaggactgcttgcatagcagtcgttgccccgttctatgttgttggtacctatcttgcttctctgatcgatcaataaaaggagacattatttgagggaccctttttgggtgccttgtatgctgtagctgttcaagtggctgaataaggctgcaagtcttgtgtaaggtgagactctgatgcataagctttgcaacttgcaagtgatgttggattttggaatgttatcaactttagtacacgttttctggccgtctgatcgaatcctggacaccaggggtagaattaattggtcgatcagagctgttaatcgtcc

SEQ ID NO: 50532 - DNA, 1736 bp, Zea Mays
tactggttttatttcgttggttgattgattgatgaactgctgtcgaacttgttaggctacttgatttgtgctaaacgctgtttcttctcattactcctagcttgtataggtagacttgccttttggaatgctggcatgctcttgatttctttggattatgaattttgccgtgaactatgagcaatactcagtttgatgagaaattgtgacattttggctggcgtgcaggcagtcaggcaggacaacaagcagcggtttagtctgttggaggaagatggcgagctgttgatccgggcgaaccaggggcacacagtaacaactgtcacatcagagagcctgctgaagcccattttgtcccccgacgaagtgtcagtttgtgtgcatggaacttacagaaaaaaccttgactcgattttgcaatttgggctaaagcgtatggcaaggttacacatacatttctcaagcggcttaccatcagatggagaagtaaccagtggtgtacggcagaatgtaaacatcttgatacatctggacgttagtaaagcacttaaaggtgggatgaagctttatatttcagacaacaaagtgatcttgacagaaggttttgatggcgtcgtcccggtgaaatactttgaaagagtcgaaacatggccaggacgagctccaataccgttccagagataacaggccatgttaccatttttcggtaattcacatacatgattttttttttggggggggggagggggggcttaatatgcattgtgggtgtggaatatatcagcatttggtaaaatttgattgtgctgggacctctcagtgattcgattgatgattttccggactccgtgaaaagctgtggttctttgtgtgtcttttcggtttttgtgtaacgaaaccaaaagacgagttagtttctctgtgcctgaggatgtcaagagggtttgccaaccatctatcctaattaatggagtacgagaagtttgcggagtatgagcagaagtactcagaggatgcagcaaccaaacattgaaaagtatcatggggagttgcctgcctgctgggctgatgcccttcctctcagtttggcaacttccagaagcatacgcctgaggtgcgcaacgtctgcttcggagcgagggagcatggcatgggcggcatttgcaacggtgggcacagcccagggctccgtttcatggccaacgactgctatgcaagcagtccttctttacaagcgtgcaagcaaacatccggtccattagattacgatccaaccacagatataactataatttgttatggttttttataaagattattgagttggtggtgaaaaggtttaagtattaaatgtgacctacggttgaatcacgatctaatggaccagatggtttgcttatggtttgcttgcacgcttgcaaagaaggactgcttgcatagcagtcgttgccccgttctatgttgttggtacctatcttgcttctctgatcgatcaataaaaggagacattatttgagggaccctttttgggtgccttgtatgctgtagctgttcaagtggctgaataaggctgcaagtcttgtgtaaggtgagactctgatgcataagctttgcaacttgcaagtgatgttggattttggaatgttatcaactttagtacacgttttctggccgtctgatcgaatcctggacaccaggggtagaattaattggtcgatcagagctgttaatcgtcc

SEQ ID NO: 50533 - DNA, 1540 bp, Zea Mays
tactggttttatttcgttggttgattgattgatgaactgctgtcgaacttgttaggctacttgatttgtgctaaacgctgtttcttctcattactcctagcttgtataggtagacttgccttttggaatgctggcatgctcttgatttctttggattatgaattttgccgtgaactatgagcaatactcagtttgatgagaaattgtgacattttggctggcgtgcaggcagtcaggcaggacaacaagcagcggtttagtctgttggaggaagatggcgagctgttgatccgggcgaaccaggggcacacagtaacaactgtcacatcagagagcctgctgaagcccattttgtcccccgacgaagtgtcagtttgtgtgcatggaacttacagaaaaaaccttgactcgattttgcaatttgggctaaagcgtatggcaaggttacacatacatttctcaagcggcttaccatcagatggagaagtaaccagtggtgtacggcagaatgtaaacatcttgatacatctggacgttagtaaagcacttaaaggtgggatgaagctttatatttcagacaacaaagtgatcttgacagaaggttttgatggcgtcgtcccggtgaaatactttgaaagagtcgaaacatggccaggacgagctccaataccgttccagagataacaggccatgttaccatttttcgacgagttagtttctctgtgcctgaggatgtcaagagggtttgccaaccatctatcctaattaatggagtacgagaagtttgcggagtatgagcagaagtactcagaggatgcagcaaccaaacattgaaaagtatcatggggagttgcctgcctgctgggctgatgcccttcctcagctcagtttggcaacttccagaagcatacgcctgaggtgcgcaacgtctgcttcggagcgagggagcatggcatgggcggcatttgcaacggtgggcacagcccagggctccgtttcatggccaacgactgctatgcaagcagtccttctttacaagcgtgcaagcaaacatccggtccattagattacgatccaaccacagatataactataatttgttatggttttttataaagattattgagttggtggtgaaaaggtttaagtattaaatgtgacctacggttgaatcacgatctaatggaccagatggtttgcttatggtttgcttgcacgcttgcaaagaaggactgcttgcatagcagtcgttgccccgttctatgttgttggtacctatcttgcttctctgatcgatcaataaaaggagacattatttgagggaccctttttgggtgccttgtatgctgtagctgttcaagtggctgaataaggctgcaagtcttgtgtaaggtgagactctgatgcataagctttgcaacttgcaagtgatgttggattttggaatgttatcaactttagtacacgttttctggccgtctgatcgaatcctggacaccaggggtagaattaattggtcgatcagagctgttaatcgtcc

SEQ ID NO: 50534 - DNA, 2797 bp, Zea Mays
gtaaagctcaccagtgcgtcggcccattacaccgctgaccttatcgtcgccgctgggcgctgcctcgtcgcccgacaccgatggccgccgcacctccgcctgctgcgctgccgtcccacatgtccgccgctctcatcaccttgccctcctcccactcctatccttccctccccgcgcaacccaagcccccaacccccaggccccctcaactccacctcgtcccccgcgtcgccgcataccccgccgcatccgcggccaccccacgccgcaaagcctcctccgcttccgccacggaacgtctccgcgttctcgtacgccgtggcgaactggacgatgccctccgcctcgtcgactcactcgcgggcctcaacccaccctcgccagccgcggtggggccctgcgccgcgctcatcaagaagctctgcgcgtcgggccgcacagcggacgcgcgccgcgtgctggctgcgagcgggcctgatgtcatggtctacaacgccatggtggcgggctactgcggggccgggcagctcgacgccgcgcgcaggctcgtggcggacatgcccgtggagcccgacgcgtacacctacaacacgctcatccgaggcctctgtggccgcggccgaaccagcaacgccctggcggtgctcgaggatatgttccgccgcggctgcttgcccgacgtcgtcacgtacaccattctgctcgaggccacctgcaagaggagcgggtacaagcaggccatgaagctactcgatgagatgcatgacaaggggtgcgccccggacattgtcacctataatgtcgtcctcaatggtatctgccaggaaggccgggttgaggacgcaatggagttcttgaagaacttaccgtcctatgggtgcgagccgaacactgttagctacaacattgtgctgaagggtttgttcactgcagaacggtgggaagatgccgagaagctcatggaagagatggcacacaagggttgccctccgaatgtggtaacatttaatatgctcatcagtttcttgtgtcgtagaggattggttgagcccgcaatggaagttcttgagcagatgccccagtacggatgcacgcctaattcattgagttacaacccgcttcttcatgccttctgcaaacaaaagaagatacataaagcaatggaatttgtggaactaatggtgtccaggggttgttacccagacatcgtttcatacaacactctacttacagcactctgccgcaatggggaagttgatgttgctattgaattgcttcatcaactcaaggacaaaggctgtagcccggtcttgattagttataacacggtcattgatggccttactaaggctggcaaaacaaaggaagcgttagaactgttggatgagatgaccagtaaagggctccaaccagatatcattacttattcgacaatagcttctggtctttgtagagaagacaggattgaggaggcggttagaacattttgtaaagtgcaagatatgggtataaggcccactgcggcactgtacaatgctattcttcttgggctctgcaaacggcgtgaaacacacaacgctatcgacctgtttgcgtacatgatatcgagtggctgcatgccaaatgaatcgacttacactatacttgttgaaggcttggcttatgaaggcttggtaaaggaggcaagagaattgtttgctcaattgtgctctagaggagttgtgaataagaaacttatgaagaaaggatccattaaaatgctagatgggcctacacaaacttagtgatgatgagttagtgtacactatatgaacatctttggcaggggactttcttgacagtacggttgtgatgtcttaactgatgccactttcttattaacatctggagtgccttttgtcaaattttcagcataaagcccactccattttttcataagactagaaattttctggcattatttatttatttatttattgtgcacacaatcatctttggtatggtaggtttattctgtttagttctgtttagatgcaattcgaatgaaagatgtttcacaactagctactgcttggaaccagagatccaaatctggattgcaatttgcattattacataaaaatctcaattgaacaaaaattaatcccccagatttcccaatgtcccatgttgttaaaaaaatatggaaaattggcctgtagccagaagtgtgattcaaaatctcactctcaatagcttatgttcctgcttggaatggagggaatattgaaattgttacattcagattttccactgatacatgtatcattgtatctcaactggtatagagtaaaacaggccttgagagctattaagtactgtgacagttcctagcaggagttaacctgaaccttttacttatttattgattttttttgctggtattgagagaatgacagggatgctcacctctgccatttcgatccaattggttcaagacatgatgtagtttcgaggaatcgaggtagtcggtaaaagatcaagtaacaaatcactacctgaatcatgtcaaattatgcaggatcaaccttcacttcacatgttatactttagaaatttgctgacctttttctttaggaaaaggcttctgagtgtttttatcctttttaatttttgctgacctttttctatttacagtgctcaaatgctagtgggagacaaccgcagtattcatcagcacgtcatgtgatctggacacatgtgcaatgcctccctagtggtcataatgcaaacaaccggtgaaagttttgcatgtcca

SEQ ID NO: 50535 - DNA, 1764 bp, Zea Mays
cttatcgtcgccgctgggcgctgcctcgtcgcccgacaccgatggccgccgcacctccgcctgctgcgctgccgtcccacatgtccgccgctctcatcaccttgccctcctcccactcctatccttccctccccgcgcaacccaagcccccaacccccaggccccctcaactccacctcgtcccccgcgtcgccgcataccccgccgcatccgcggccaccccacgccgcaaagcctcctccgcttccgccacggaacgtctccgcgttctcgtacgccgtggcgaactggacgatgccctccgcctcgtcgactcactcgcgggcctcaacccaccctcgccagccgcggtggggccctgcgccgcgctcatcaagaagctctgcgcgtcgggccgcacagcggacgcgcgccgcgtgctggctgcgagcgggcctgatgtcatggtctacaacgccatggtggcgggctactgcggggccgggcagctcgacgccgcgcgcaggctcgtggcggacatgcccgtggagcccgacgcgtacacctacaacacgctcatccgaggcctctgtggccgcggccgaaccagcaacgccctggcggtgctcgaggatatgttccgccgcggctgcttgcccgacgtcgtcacgtacaccattctgctcgaggccacctgcaagaggagcgggtacaagcaggccatgaagctactcgatgagatgcatgacaaggggtgcgccccggacattgtcacctataatgtcgtcctcaatggtatctgccaggaaggccgggttgaggacgcaatggagttcttgaagaacttaccgtcctatgggtgcgagccgaacactgttagctacaacattgtgctgaagggtttgttcactgcagaacggtgggaagatgccgagaagctcatggaagagatggcacacaagggttgccctccgaatgtggtaacatttaatatgctcatcagtttcttgtgtcgtagaggattggttgagcccgcaatggaagttcttgagcagatgccccagtacggatgcacgcctaattcattgagttacaacccgcttcttcatgccttctgcaaacaaaagaagatacataaagcaatggaatttgtggaactaatggtgtccaggggttgttacccagacatcgtttcatacaacactctacttacagcactctgccgcaatggggaagttgatgttgctattgaattgcttcatcaactcaaggacaaaggctgtagcccggtcttgattagttataacacggtcattgatggccttactaaggctggcaaaacaaaggaagcgttagaactgttggatgagatgaccagtaaagggctccaaccagatatcattacttattcgacaatagcttctggtctttgtagagaagacaggattgaggaggcggttagaacattttgtaaagtgcaagatatgggtataaggcccactgcggcactgtacaatgctattcttcttgggctctgcaaacggcgtgaaacacacaacgctatcgacctgtttgcgtacatgatatcgagtggctgcatgccaaatgaatcgacttacactatacttgttgaaggcttggcttatgaaggcttggtaaaggagtgctcaaatgctagtgggagacaaccgcagtattcatcagcacgtcatgtgatctggacacatgtgcaatgcctccctagtggtcataatgcaaacaaccggtgaaagttttgcatgtcca

SEQ ID NO: 50536 - DNA, 1292 bp, Zea Mays
cttctctcatgtctcatcctctctactaacctcccaagaacttcgtattttatctgaagttatattatgatatattgaaattttgttgaagatgaaactatagcgaatcgatttactggaaatggtccgaatttttctttgcaccttccttgccgtgccgtgtccgctgtcttggagttggaattggaagcacctccggtcgagcgcggcaagcaagcaactaacatccgggtgacagatggagcggattggcggcctgatcgataggaactatgccccagcgcagcaaggcccccaacgttgtctctgtccattcatgaccccctcgctcaaaactacaaattctacgcgcggcacaccaattatgtccgtgtgccgcggcgtccgtaataaccagccagctagagagcggccgggagagatagagaggtggagcagatggctctgtcgaggacggcgtggatcgccggcggtctggtcgcgcggctgctgctgatcgccgtcctggccttgaccgtgcagtcgaggttctcgaacagaacctactacgacttcaaggccgccggctacaacaacgatctccagagctacacgtacgcggtggtcgtctacctcctctgcaggggcaagcggatgatgacgcccaggcgcccagctcgctcatcctcgacgtcagtatgtacgccgacattgtggtcaccgtggtgctggccagcggcgtgggcgcgggcttcggcgccaccgacgacgtcttggagtacgtcgagcatggctcgcggtgggcggaagaggccacgcaagatctcgtcaagtactaccacaaggggctcatcgccatcgtcttcctcctcatcggcatggtcctgtccgtgtgcgccactgtcgtctccaccaggctccgggtcagggcagcaagcaacgacgacatcgccgacgacgtctgaccagtggatccgggcgcgcgcgagagagattaagcaaactcaacctgtgcgttagttcagaatgcatgaccctcctatgtgtggtaaattggtaatcagctggggacaagaggctccccctcttgccttgcctcagaatcttgttaacaatgttgcacgatatatatatatatatatgtccatttgtgtgattaagttatttctgaaatcctctcgattttttaatcgaagacctgagatgccatgccttcctagctagtttactagtagcaccgaattttagttgttgctacatgagactaaatttcataataatgtttccttccatgatctagtaccccggttgct

SEQ ID NO: 50537 - DNA, 1275 bp, Zea Mays
cgagcagggcgggtaggcgagcaaggcaaagcacgccaagcgcgagtccgtccaacaaacagcccatcactcactcgccgcggcgaccatccccgcagttctcactccagtctccacacacctctcacgagcgcgcgcgcgcgcgtccgccatggcgccgtctaagcctttattccccgtcgccgtccccgcccccgacccgtccgacgaggtcgtgcgcgagttcggcccactgctccggatctacaagagcggccgcatcgagcggcccctggtggccccgcccgtggagcctggccacgacgccgccacgggcgtccagtccaaggacgtccacctcggctcctactccgcgcggctctacctgcccccaagcgccggcgccggcgccaagctgcccgtcgtcgtgtacgtccacggcggcggcttcgtggccgagtccgccgcctcgcccaactaccacctcttcctcaacaggctcgccgccgcctgccccgcgctcgccgtctccgtcgactaccgcctggcgcccgagcaccctctgccggcgggctacgacgactgcctcgccgcgctcaagtgggtgctctccgccgccgacccatgggtcgccgcccacggggacctcgcccgcgtcttcgtcgccggggacagcgccggcggcaacgtctgccaccacctcgccatccacccggacgtcgtccaggcccagcgcgcgcgacaggccggcgcgccgccgctcaagggcgccgtgctcatccacccctggttctggggctccgaggccgtgggcgaggagcccagggaccccgccgcgcgcgccatgggcgtcggactctggctcttcgcgtgccccgagaccaacggtctggacgacccgcggatgaaccccttggcgcccgccgcgccgggactccacacgctggcgtgcgagcgcgtgatggtgtgcgccgcggagggcgacttccttaggtggcgcggccgcgcgtacgccgaggcggtggccgcggccaggggcggtgacctcggggaggccgctggcgtcgagctgttggagaccatgggagagggccacgtcttcttcctcttcaaacccgactgctacgaggctaaggagatgatgcacaagatggtcgccttcatcaacgccccctgaggcgtgaggtgcttgtgttcgcgtctcagaatcatcgttggcgtggctagcaggtttacagcaggtgtttaccagttaaggttgagcgaaataccaaggtctaagccgaggcttgtggg

SEQ ID NO: 50538 - DNA, 484 bp, Zea Mays
tctctgccacgagctccctcctctctttccaccacccctcgcaagcttcgaaccttcgacccacgcggcgcggctccagcaccaacccccggcggcgatgcagatggcagcggcagtggccccaaccgacgccccggcctcggcggctgctccggcgccgcacccgccccacgcgcacgcggcgcacggaccgccacacccgcaccaccacatgccgcaaccgcggtgggtggtcatcccgtaccctccaccacaccaccccatggtcgccgcgcctccgccacctcctccgccgttcgtcaagcatttcacgccgccggtatcggtaacaccgccgcctgctggatccggcgggaatgggggcgacgataaccggaccatctgggtgggcgacctgcagtactggatggatgagaactacctccacagctgcttcggtcccggcggcgaggcttggcggcgtagttttgggcgcaaattctgg

SEQ ID NO: 50539 - DNA, 842 bp, Zea Mays
ctcggcactcttcgcccctcttccttggtccaatggcgtcgtctctcggctccgacgacagtgccggctccgccgccgccgtctgctgcatgtgcggcgaccatggcctgccgctggagctgtaccggtgcgacctctgccgcatccgtacacagcacagcgacctgtacccggcggcggcggcggcggggccgtaccggagctgcaactggtgcctcaggcagggcggcgcagacgtcggagggggttgtcattcgccgtcaccggttaataaggtgtccgcggcggcaggaacaggaaccagacggaggatcagcatcaacggttctcgtggcgacggcgagtcggcgaccgctatggatgctccagcaggtcagcgttctcggcggaccccaggaagccgatcaagaagcctgaaaagggccgtgaagaaagagcggtgcagcggccggagccggtgctcacgacgttgtctaaggaaacgaggggggtggtgcagcctgccaagccgcggttcaaggtgaagaaggtgcggcggtacaagttactcgcggaggtgatctgctagtatcagtaatttagtatagtagtagtcagtggcggaggactaaataaaattaagatatagactgggtcgctgggccattgtagtttggatgaattgcttatgaaatattacttattagtctatggttagcagatcatgtatatagtcatgtaaaataatttttactataggatgtactatttatagaatgaactctaaagtaaaagattatataaagtagcaagcttctagagataaccttagaattagtgtggcctaaataatataagtggca

SEQ ID NO: 50540 - DNA, 750 bp, Zea Mays
ccatctggtccgcggtcatctgtcagtttgtttgcgcgaaaaaggataggaatcctcttgtgtcctggccgtcggccgtcgctgcgtcgttccagatttggggaaggaaatccggcaccgagattcgagtcgaaaaggtgagctgccgtcccgctccttgtcttgtctggaaacagtcgtttcgcgtgacgttggcaggctagccgcgcgcgcttgttggaggacatcatttgctagatggcgcgtaccaagcagaccgctcgcaagtccactggaggaaaggctcctaggaagcaactcgctacaaaggcagcccggaagtctgcacccacaactggaggagtgaagaagcctcaccgttaccgcccagggactgttgctcttcgtgagatccgcaagtaccagaagagcactgagttgctgattaggaagctgccgttccagaggcttgtgagggagattgctcaggatttcaagacggatctgcgcttccagagccatgccgtgcttgctctgcaggaggcagcagaggcctacctggttggtctcttcgaagataccaatctgtgcgcgatccatgccaagcgcgtgaccatcatgcccaaggacattcagctggcaagaaggatccgtggcgagagggcttgcattcgagctagtttatcgtgttccaacttccaaccgtggcaggtggaaggggtgatgcgagcgagcacatcgagtggtccgcgggccattcagtggaaggat

SEQ ID NO: 50541 - DNA, 2752 bp, Zea Mays
cacaaatcgagttggtgcacggttctgcctgccgaggatccccacaccgatccgccccaccctcctccccaccgctctcatctgctccgccatcaacgccctcatctgctccgccatcaacgcccgtctccaatagtggaaggtggccgaggatccgtgccatcaacgcccgccatcggacctgtacgcgataccagcaacgccgtcatggaaggttgtcgaggccgccatcaaagccatcctccccacgccattgatggcgcacgcggcaaaaccgcacacctcctccccacgccgaatctcctaccgtttcaactgaagcagcaccgacgcctggtagcagtgtggttgctggtgaaagcaccagctgacaaggggaaaatggagcacacaactgctgctgtgagtagtgtgaggtgggtttgtaggagcagatgcaaagctactgcccgtagctcatgggaagccatggtgacagctaactttggtctttggctggcaaatacttgctgcagagctcctgattatggttcacaaggtgaagtgatgcttacttttgcggaaaatggatcctcaaaagttggagtcagatttgataaaacagatccctggggccattgatcttggaggcagttgtgagcttgatcatggcctattatgttcagttgattctctatgcctcgatggtccaggatgggaagatagagccaaacattcatttgatgttgtgtttgaggtgatggaatttcttttttttctcgaacacgcaggagaactacacatcattatatttagaggaaaaatagagtccaagctggaccaaaacaaacattacaaactgacgaagctaccttcaggtggccacaaacaccaatgcacaaaaggatccattaatctagaagaaaaacagaccaaccatctaaactcaactaaagacttgcagtaggggcagtaagaagggagagctccttagcccctgctagcccccaaacatccttctcttgattagcttggttgtagtctgcacttggttgtatcgatatcttattttctttatataatttactaattgggttctcttcatagtttgcctctgaagaaagtcaacaggtgcctgtaatcctgtttgtgaaggatgttgagaaaatatgtggaaataattacacctaccatggtctaaagaataagcttgaaagtttcccagctggagttttattgttgggtcccagattcagacagatgctcggaaagataagtcaaacaatgggtctccttggctcaagttctcatacagccaagcagcaatacttgaccttgcatttcaggagctttctgaggccacgggaaccagaagaccatatcgtccaagttaatattgctgccagcaatttatgaagcgcatccgagggacttgtatttattttatgtaaagtttaatggaatacttgttcctctatttattttgtgtacttagtacactggcatgcccgtattttttttctcccacgtgaaaaagatgtttgtaattttctctcgaaacactggcctactgaagttccttgacaagttttacaacaaggctgacctaccttgggttcatttaacctagaaatgtctttacaagactagcaagcctcctcatgctaatgctaggagtcaagtgggatccttctggtggagagagatatcatgaatctctctgagaaatacttcatgcgcttgcaacatgtaatgttcataaggggggcactgcagttcttttctggcaagacttatgaacttgggtgttctgcagtgcatggactcatcctcgcttttctcctttgcaagaaaccaaaccctgccagtcaaggctttcctggcaaatacacaaaataggaaattcatttttcctctttcagtgactgcagctgaacaactcttacaactgtagtaggaacttaatcacttggatctcaatgcacaaaatgaatgatcagtggacttatatttggggatctgcaattttctctttaaaaaaggcatacactcatctcatggtgtgctacccaacctctccaattttcaagtggatgtggaagtcaaattaatgtgcaaaacaaacacagatttttcttttggttgctgctacgtgacagattaaacacaaggaatctatcaagaaggaaaaacatgttcttggagtgttactgttgtgtgccatgtgttgaggagatggaagaaagtcagcagcaacacatgttctttgactatccctttagtcaggcctgatgattattctggtaagaaagaacatgaaaatggatggtagctgtatcttgacaatattgtttgtacattgtactggatggtagaacgtgtgagcttcaaagatggcgttgacttactgctcaaaaaaatggcgtcgacttcacatgatctgagctattgggctgcaaagaaaggccgggtccatcaacgccgtcatagtgctctgtcctgcgggccacgcgggaaggtgttcagactgagtacactgaagcaagcacgagcaaacctggtgatggtgtttagtcccacaccgcttagcctagaggggattaaccaacaagcacacgtcttatacagcggcagctgaagctgatgaacccaagcagctgcgtggtgagcacaaagcgaactattctttcgccttttactaaagaatatcgtgtgcatgcacaataagcagcatactctaatttttggagggtgttttctccttaggggaaat

SEQ ID NO: 50542 - DNA, 3162 bp, Zea Mays
cacaaatcgagttggtgcacggttctgcctgccgaggatccccacaccgatccgccccaccctcctccccaccgctctcatctgctccgccatcaacgccctcatctgctccgccatcaacgcccgtctccaatagtggaaggtggccgaggatccgtgccatcaacgcccgccatcggacctgtacgcgataccagcaacgccgtcatggaaggttgtcgaggccgccatcaaagccatcctccccacgccattgatggcgcacgcggcaaaaccgcacacctcctccccacgccgaatctcctaccgtttcaactgaagcagcaccgacgcctggtagcagtgtggttgctggtgaaagcaccagctgacaaggggaaaatggagcacacaactgctgctgtgagtagtgtgaggtgggtttgtaggagcagatgcaaagctactgcccgtagctcatgggaagccatggtgacagctaactttggtctttggctggcaaatacttgctgcagagctcctgattatggttcacaaggtgaagtgatgcttacttttgcggaaaatggatcctcaaaagttggagtcagatttgataaaacagatccctggggccattgatcttggaggcagttgtgagcttgatcatggcctattatgttcagttgattctctatgcctcgatggtccaggatgggaagatagagccaaacattcatttgatgttgtgtttgaggtgatggaatttcttttttttctcgaacacgcaggagaactacacatcattatatttagaggaaaaatagagtccaagctggaccaaaacaaacattacaaactgacgaagctaccttcaggtggccacaaacaccaatgcacaaaaggatccattaatctagaagaaaaacagaccaaccatctaaactcaactaaagacttgcagtaggggcagtaagaagggagagctccttagcccctgctagcccccaaacatccttctcttgattagcttggttgtagtctgcacttggttgtatcgatatcttattttctttatataatttactaattgggttctcttcatagtttgcctctgaagaaagtcaacaggtgcctgtaatcctgtttgtgaaggatgttgagaaaatatgtggaaataattacacctaccatggtctaaagaataagcttgaaagtttcccagctggagttttattgttgggtcccagattcagacagatgctcggaaagataagtcaaacaatgggtctccttggctcaagttctcatacagccaagcagcaatacttgaccttgcatttcaggtgcagttaatagttgattctacttagcttcaaattggatttgcttacgttaaaatacttaggtgacgggtggcctgaagaatgtctatgcaattgacaccgatgaaactagcttctatgttttttagctgacaacatcatcgtacgattagtattatactctttgcatatcatagtgatttttcttattccatatctatttttatactaatttgcatatcatagtgatgtttcttattccgtatctatttttttaactctcgtagcaacacacggacacatacttagttatatattagatataattggttctctaaattgaggaagacgatgacccgctttgctattcttgggtccgctcatgacaacagcttaatcgaaggtgtattacaacgtaattaattaaccaggagctttctgaggccacgggaaccagaagaccatatcgtccaagttaatattgctgccagcaatttatgaagcgcatccgagggacttgtatttattttatgtaaagtttaatggaatacttgttcctctatttattttgtgtacttagtacactggcatgcccgtattttttttctcccacgtgaaaaagatgtttgtaattttctctcgaaacactggcctactgaagttccttgacaagttttacaacaaggctgacctaccttgggttcatttaacctagaaatgtctttacaagactagcaagcctcctcatgctaatgctaggagtcaagtgggatccttctggtggagagagatatcatgaatctctctgagaaatacttcatgcgcttgcaacatgtaatgttcataaggggggcactgcagttcttttctggcaagacttatgaacttgggtgttctgcagtgcatggactcatcctcgcttttctcctttgcaagaaaccaaaccctgccagtcaaggctttcctggcaaatacacaaaataggaaattcatttttcctctttcagtgactgcagctgaacaactcttacaactgtagtaggaacttaatcacttggatctcaatgcacaaaatgaatgatcagtggacttatatttggggatctgcaattttctctttaaaaaaggcatacactcatctcatggtgtgctacccaacctctccaattttcaagtggatgtggaagtcaaattaatgtgcaaaacaaacacagatttttcttttggttgctgctacgtgacagattaaacacaaggaatctatcaagaaggaaaaacatgttcttggagtgttactgttgtgtgccatgtgttgaggagatggaagaaagtcagcagcaacacatgttctttgactatccctttagtcaggcctgatgattattctggtaagaaagaacatgaaaatggatggtagctgtatcttgacaatattgtttgtacattgtactggatggtagaacgtgtgagcttcaaagatggcgttgacttactgctcaaaaaaatggcgtcgacttcacatgatctgagctattgggctgcaaagaaaggccgggtccatcaacgccgtcatagtgctctgtcctgcgggccacgcgggaaggtgttcagactgagtacactgaagcaagcacgagcaaacctggtgatggtgtttagtcccacaccgcttagcctagaggggattaaccaacaagcacacgtcttatacagcggcagctgaagctgatgaacccaagcagctgcgtggtgagcacaaagcgaactattctttcgccttttactaaagaatatcgtgtgcatgcacaataagcagcatactctaatttttggagggtgttttctccttaggggaaat

SEQ ID NO: 50543 - DNA, 2337 bp, Zea Mays
cacggttctgcctgccgaggatccccacaccgatccgccccaccctcctccccaccgctctcatctgctccgccatcaacgccctcatctgctccgccatcaacgcccgtctccaatagtggaaggtggccgaggatccgtgccatcaacgcccgccatcggacctgtacgcgataccagcaacgccgtcatggaaggttgtcgaggccgccatcaaagccatcctccccacgccattgatggcgcacgcggcaaaaccgcacacctcctccccacgccgaatctcctaccgtttcaactgaagcagcaccgacgcctggtagcagtgtggttgctggtgaaagcaccagctgacaaggggaaaatggagcacacaactgctgctgtgagtagtgtgaggtgggtttgtaggagcagatgcaaagctactgcccgtagctcatgggaagccatggtgacagctaactttggtctttggctggcaaatacttgctgcagagctcctgattatggttcacaaggtgaagtgatgcttacttttgcggaaaatggatcctcaaaagttggagtcagatttgataaaacagatccctggggccattgatcttggaggcagttgtgagcttgatcatggcctattatgttcagttgattctctatgcctcgatggtccaggatgggaagatagagccaaacattcatttgatgttgtgtttgaggatgttgagaaaatatgtggaaataattacacctaccatggtctaaagaataagcttgaaagtttcccagctggagttttattgttgggtcccagattcagacagatgctcggaaagataagtcaaacaatgggtctccttggctcaagttctcatacagccaagcagcaatacttgaccttgcatttcaggagctttctgaggccacgggaaccagaagaccatatcgtccaagttaatattgctgccagcaatttatgaagcgcatccgagggacttgtatttattttatgtaaagtttaatggaatacttgttcctctatttattttgtgtacttagtacactggcatgcccgtattttttttctcccacgtgaaaaagatgtttgtaattttctctcgaaacactggcctactgaagttccttgacaagttttacaacaaggctgacctaccttgggttcatttaacctagaaatgtctttacaagactagcaagcctcctcatgctaatgctaggagtcaagtgggatccttctggtggagagagatatcatgaatctctctgagaaatacttcatgcgcttgcaacatgtaatgttcataaggggggcactgcagttcttttctggcaagacttatgaacttgggtgttctgcagtgcatggactcatcctcgcttttctcctttgcaagaaaccaaaccctgccagtcaaggctttcctggcaaatacacaaaataggaaattcatttttcctctttcagtgactgcagctgaacaactcttacaactgtagtaggaacttaatcacttggatctcaatgcacaaaatgaatgatcagtggacttatatttggggatctgcaattttctctttaaaaaaggcatacactcatctcatggtgtgctacccaacctctccaattttcaagtggatgtggaagtcaaattaatgtgcaaaacaaacacagatttttcttttggttgctgctacgtgacagattaaacacaaggaatctatcaagaaggaaaaacatgttcttggagtgttactgttgtgtgccatgtgttgaggagatggaagaaagtcagcagcaacacatgttctttgactatccctttagtcaggcctgatgattattctggtaagaaagaacatgaaaatggatggtagctgtatcttgacaatattgtttgtacattgtactggatggtagaacgtgtgagcttcaaagatggcgttgacttactgctcaaaaaaatggcgtcgacttcacatgatctgagctattgggctgcaaagaaaggccgggtccatcaacgccgtcatagtgctctgtcctgcgggccacgcgggaaggtgttcagactgagtacactgaagcaagcacgagcaaacctggtgatggtgtttagtcccacaccgcttagcctagaggggattaaccaacaagcacacgtcttatacagcggcagctgaagctgatgaacccaagcagctgcgtggtgagcacaaagcgaactattctttcgccttttactaaagaatatcgtgtgcatgcacaataagcagcatactctaatttttggagggtgttttctccttaggggaaat

SEQ ID NO: 50544 - DNA, 3934 bp, Zea Mays
gttctgccaccctcctccccaccgccgccgcggtttcctcgcatcccgcccgcccgcgacgctcctttccatgctcgagcagtcgcagcttccttctatggcgctcatttccatcctcgaccgcggtttcctcgccactgcgctccgtctctcgctcctttccatccctctcctcgcccgacagctactgtgtccgtgcgtgcagcggtcgcccaactcatagcgggacaccagatctcaagttcacctagcactctacatcgttcgacggcgtcccacaatgcaggcggcgtcagctcccagagacgcctcccgcccgtcagctcccagagccgccagcgccggcgagcgcggcgaggtcgtcggttccgtcgagcgaactgcattgcccgcgcggcgctcgctgctgtacacgcaccgcgcgcagatgccattttggtgccggcacagcctctgctttctgctgctcagcgctggcgttcaccagcatctccagaagatcctatcctgtggcgcgctaattgacggcatggggagctgaactcggcacatcgcaccacattggaacacatcacacacggtggcaattctgtgaagcccaaaggttccaagtcaccatgagaaaattgaaatggcaagatctcttaatctaattgttgcaccttggaagacatatgcctctgttaagtgtcaggatcttttttgctgggaagccaattccttactgatctgagggacaacatttttgtttgcctgataaggtgatgaaggtggctggacaacacgattatgggtattttcttatcgagtgatacaagacattgttctgccactgattacagtaagcctatactagattggcttgagaattccagtgatgaggtagcatagaagtgtgatgccataacatttggtgttctgaagaatcggcaaaaaaaaacttgccgagcagttttagtatttctaacgtgcctgaatttaaatctgaaaaatgcaaatcagagacatggctgctactatgagggataagtgagtcattgatatcttcctgatgcagcatggtattctttgcaaaaatctcttctttgcatggatcatatgtgtatctaattcggctcttcacttagaaattttagacatctttgtgttcgtcctagcctcttaatctattatgttcattgtgccatgcacttggtgttcctatggacagacttgtgaaagccgcagattcagtttcggtgtgcctatctaaaggtttaggcgcccctgttggattcaatggcctttgttgacaagaaatatgaacaatacctagaggccaaaaatcttcgaaagaccctaggtggtggaatgaggcaggttggagttctgtgtgctgattctcatacactatgggaaagcttgctggtgaggatagaaaggctaaagttgtgacaggtttattttttccctcttctctaaaaaacatagaattggttgtatgctatttaaggcaagaatgttttccattgtctaaaaacgatttattttttccataatatttgtttcctagctttttatcctatttaaaacaaatcgaaactgcctgaaggctgttgttgtcttggtcttttctaattgttctttatcatgcggtttatcgaagttggtacaatggtttccccaaccacttatgctcgacgttgcctgtcatatttgatgaatggcatatgccacatgaggcattgaatgatgcaatgaatgctctggtaatatctcccacatggtcaacaacattatatctttaggcaccacatgttctgaagttgcatttcttgtttcgggttcaaaaattagtaacctggtaatttcttgtcctattttgagccctgaagatttctttgacgttttgagttctagagtttggagcttccaggtgacggatttcatctcactcaatagtctcctcgctcaaggagttcatccaagctcggtgggtgcaagcctgcaaggtgaggtactgatgatacttatttgttatcttgccttagcaacatgtgtcccgtgcttttacttgcaagctgatatgacacatgattgttatcttgctgatgtgcgcaatattgatcatgtatgttcacaatattgttcttgttatatataaatgggtcaagcattcatgctacagttcacacaaaaagtatatattggcattatgtcatattactgtcataacaggaagggcatcagatgtatcattctataacatgtattgaacacatatgtaattattgggtagaaaagcacaacgctttacttggtgccaccatcttttctgttgcagagttgtatattttttagcccactaatatgtaaagcacaacgctttacctgatgccctcaaaggttgcagttcaatttgcatctcctctttcttcatttttacagtttcaggttgcagttttcatagcctacttgagacattgcagtgtcctacaactgaacttgaaactgtcttcaacctgctacttcaggctaaacttgaaattgtcttgaacctgaaactacgaactttctaatttccagtgcacacattttcagcatttgtttatggtgcatatgttggggtatcttgccttgtttgtatatcagttacctattgtttgcagcttttacgcaatgctttactcttgttctacatatgaaaggacgaaattttgtcacttcacattttaaacgttgcacccacatcactgcttttgctaatacagttctgttgttgcttatgctaatacagttctgttgttgcttatgctattcctacccaaaattaaaaatgaaaaaacacaactcattctgtgcactcttacaacatgttcataacataaccctctatttatagtgtgtatgagcttaatggagaaaagaaaaacatggttgtaacacagtttgaaccagatgatgcaagacgttgctttcccttgttgggatgaacctgctttcaaggtttgctgctttgatttatttctcaagaccttttgttcttttaggcacaaagctacgtttacttttatttgggttgcaagaggaactagaaccgtgaatggggctgcctcggcgagggcaccattcaagcttcacactttgttttctgtacggatgagaacaacatacgaggcaaggtgaacggtgagcaaatatacgtggaactacatctgcggatctgctgctgtctcttctccttactatctcttttgactcaattcaattttcctctctctatttactcttttcgatcaaggcaattcaataaattacacctgaacctttatgcactttgttcttctatctactggcctcttcagtctctgtggtggatggtagaggcatggctctccctcacgcagcgtcgtgcctcccatcctcatcgccaacgtagctcccgtctggctcaccatatcccgcagttgttctctgtgtgtggccaaagggaagaagaaatcacattttgacgattaacacaagtaattccccttccttggtctccctcagaagtcacattttgatgatagaactttgtatgcttaacattttccttataagtcagagtattgcgtatccagtaaaacagatttcaaaagttatcttctcgtcatggattattgttattctttgttttcatgcaaaatataattttagaagcatgcatgtacgtgcatgctctttgtaatttcaaatttctagagcaatatatctcgtgacctggtgtatatctcttatctcgcatactgaaattgcaaaaaacactagaatctatcaaaagtttattttatacttattcatctgaatatctaaactctgttgatctatgatggagaatttttggattttgttattaatttacaccatccttctatggaatcaatgtattttatttgagatgtcaatgacaaag

SEQ ID NO: 50545 - DNA, 3414 bp, Zea Mays
ctcctccccaccgccgccgcggtttcctcgcatcccgcccgcccgcgacgctcctttccatgctcgagcagtcgcagcttccttctatggcgctcatttccatcctcgaccgcggtttcctcgccactgcgctccgtctctcgctcctttccatccctctcctcgcccgacagctactgtgtccgtgcgtgcagcggtcgcccaactcatagcgggacaccagatctcaagttcaccagcatctccagaagatcctatcctgtggcgcgctaattgacggcatggggagctgaactcggcacatcgcaccacattggaacacatcacacacggtggcaattctgtgaagcccaaaggttccaagtcaccatgagaaaattgaaatggcaagatctcttaatctaattgttgcaccttggaaggtctgaaccatcagagtttaactgtatcacccatttacacaagttcctaccatcacagttcaactgtatcactcatccataagcaattacttgtgttgaaatttatgagaagacatatgcctctgttaagtgtcaggatcttttttgctgggaagccaattccttactgatctgagggacaacatttttgtttgcctgataaggtgatgaaggtggctggacaacacgattatgggtattttcttatcgagtgatacaagacattgttctgccactgattacagtaagcctatactagattggcttgagaattccagtgatgaggtagcatagaagtgtgatgccataacatttggtgttctgaagaatcggcaaaaaaaaacttgccgagcagttttagtatttctaacgtgcctgaatttaaatctgaaaaatgcaaatcagagacatggctgctactatgagggataagtgagtcattgatatcttcctgatgcagcatggtattctttgcaaaaatctcttctttgcatggatcatatgtgtatctaattcggctcttcacttagaaattttagacatctttgtgttcgtcctagcctcttaatctattatgttcattgtgccatgcacttggtgttcctatggacagacttgtgaaagccgcagattcagtttcggtgtgcctatctaaaggtttaggcgcccctgttggattcaatggcctttgttgacaagaaatatgaacaatacctagaggccaaaaatcttcgaaagaccctaggtggtggaatgaggcaggttggagttctgtgtgctgattctcatacactatgggaaagcttgctggtgaggatagaaaggctaaagttgtgacagttggtacaatggtttccccaaccacttatgctcgacgttgcctgtcatatttgatgaatggcatatgccacatgaggcattgaatgatgcaatgaatgctctggtaatatctcccacatggtcaacaacattatatctttaggcaccacatgttctgaagttgcatttcttgtttcgggttcaaaaattagtaacctggtaatttcttgtcctattttgagccctgaagatttctttgacgttttgagttctagagtttggagcttccaggtgacggatttcatctcactcaatagtctcctcgctcaaggagttcatccaagctcggtgggtgcaagcctgcaaggtgaggtactgatgatacttatttgttatcttgccttagcaacatgtgtcccgtgcttttacttgcaagctgatatgacacatgattgttatcttgctgatgtgcgcaatattgatcatgtatgttcacaatattgttcttgttatatataaatgggtcaagcattcatgctacagttcacacaaaaagtatatattggcattatgtcatattactgtcataacaggaagggcatcagatgtatcattctataacatgtattgaacacatatgtaattattgggtagaaaagcacaacgctttacttggtgccaccatcttttctgttgcagagttgtatattttttagcccactaatatgtaaagcacaacgctttacctgatgccctcaaaggttgcagttcaatttgcatctcctctttcttcatttttacagtttcaggttgcagttttcatagcctacttgagacattgcagtgtcctacaactgaacttgaaactgtcttcaacctgctacttcaggctaaacttgaaattgtcttgaacctgaaactacgaactttctaatttccagtgcacacattttcagcatttgtttatggtgcatatgttggggtatcttgccttgtttgtatatcagttacctattgtttgcagcttttacgcaatgctttactcttgttctacatatgaaaggacgaaattttgtcacttcacattttaaacgttgcacccacatcactgcttttgctaatacagttctgttgttgcttatgctaatacagttctgttgttgcttatgctattcctacccaaaattaaaaatgaaaaaacacaactcattctgtgcactcttacaacatgttcataacataaccctctatttatagtgtgtatgagcttaatggagaaaagaaaaacatggttgtaacacagtttgaaccagatgatgcaagacgttgctttcccttgttgggatgaacctgctttcaaggtttgctgctttgatttatttctcaagaccttttgttcttttaggcacaaagctacgtttacttttatttgggttgcaagaggaactagaaccgtgaatggggctgcctcggcgagggcaccattcaagcttcacactttgttttctgtacggatgagaacaacatacgaggcaaggtgaacgtctctgtggtggatggtagaggcatggctctccctcacgcagcgtcgtgcctcccatcctcatcgccaacgtagctcccgtctggctcaccatatcccgcagttgttctctgtgtgtggccaaagggaagaagaaatcacattttgacgattaacacaagtaattccccttccttggtctccctcagaagtcacattttgatgatagaactttgtatgcttaacattttccttataagtcagagtattgcgtatccagtaaaacagatttcaaaagttatcttctcgtcatggattattgttattctttgttttcatgcaaaatataattttagaagcatgcatgtacgtgcatgctctttgtaatttcaaatttctagagcaatatatctcgtgacctggtgtatatctcttatctcgcatactgaaattgcaaaaaacactagaatctatcaaaagtttattttatacttattcatctgaatatctaaactctgttgatctatgatggagaatttttggattttgttattaatttacaccatccttctatggaatcaatgtattttatttgagatgtcaatgacaaag

SEQ ID NO: 50546 - DNA, 3798 bp, Zea Mays
ctcctccccaccgccgccgcggtttcctcgcatcccgcccgcccgcgacgctcctttccatgctcgagcagtcgcagcttccttctatggcgctcatttccatcctcgaccgcggtttcctcgccactgcgctccgtctctcgctcctttccatccctctcctcgcccgacagctactgtgtccgtgcgtgcagcggtcgcccaactcatagcgggacaccagatctcaagttcaccagcatctccagaagatcctatcctgtggcgcgctaattgacggcatggggagctgaactcggcacatcgcaccacattggaacacatcacacacggtggcaattctgtgaagcccaaaggttccaagtcaccatgagaaaattgaaatggcaagatctcttaatctaattgttgcaccttggaaggtctgaaccatcagagtttaactgtatcacccatttacacaagttcctaccatcacagttcaactgtatcactcatccataagcaattacttgtgttgaaatttatgagaagacatatgcctctgttaagtgtcaggatcttttttgctgggaagccaattccttactgatctgagggacaacatttttgtttgcctgataaggtgatgaaggtggctggacaacacgattatgggtattttcttatcgagtgatacaagacattgttctgccactgattacagtaagcctatactagattggcttgagaattccagtgatgaggtagcatagaagtgtgatgccataacatttggtgttctgaagaatcggcaaaaaaaaacttgccgagcagttttagtatttctaacgtgcctgaatttaaatctgaaaaatgcaaatcagagacatggctgctactatgagggataagtgagtcattgatatcttcctgatgcagcatggtattctttgcaaaaatctcttctttgcatggatcatatgtgtatctaattcggctcttcacttagaaattttagacatctttgtgttcgtcctagcctcttaatctattatgttcattgtgccatgcacttggtgttcctatggacagacttgtgaaagccgcagattcagtttcggtgtgcctatctaaaggtttaggcgcccctgttggattcaatggcctttgttgacaagaaatatgaacaatacctagaggccaaaaatcttcgaaagaccctaggtggtggaatgaggcaggttggagttctgtgtgctgattctcatacactatgggaaagcttgctggtgaggatagaaaggctaaagttgtgacaggtttattttttccctcttctctaaaaaacatagaattggttgtatgctatttaaggcaagaatgttttccattgtctaaaaacgatttattttttccataatatttgtttcctagctttttatcctatttaaaacaaatcgaaactgcctgaaggctgttgttgtcttggtcttttctaattgttctttatcatgcggtttatcgaagttggtacaatggtttccccaaccacttatgctcgacgttgcctgtcatatttgatgaatggcatatgccacatgaggcattgaatgatgcaatgaatgctctggtaatatctcccacatggtcaacaacattatatctttaggcaccacatgttctgaagttgcatttcttgtttcgggttcaaaaattagtaacctggtaatttcttgtcctattttgagccctgaagatttctttgacgttttgagttctagagtttggagcttccaggtgacggatttcatctcactcaatagtctcctcgctcaaggagttcatccaagctcggtgggtgcaagcctgcaaggtgaggtactgatgatacttatttgttatcttgccttagcaacatgtgtcccgtgcttttacttgcaagctgatatgacacatgattgttatcttgctgatgtgcgcaatattgatcatgtatgttcacaatattgttcttgttatatataaatgggtcaagcattcatgctacagttcacacaaaaagtatatattggcattatgtcatattactgtcataacaggaagggcatcagatgtatcattctataacatgtattgaacacatatgtaattattgggtagaaaagcacaacgctttacttggtgccaccatcttttctgttgcagagttgtatattttttagcccactaatatgtaaagcacaacgctttacctgatgccctcaaaggttgcagttcaatttgcatctcctctttcttcatttttacagtttcaggttgcagttttcatagcctacttgagacattgcagtgtcctacaactgaacttgaaactgtcttcaacctgctacttcaggctaaacttgaaattgtcttgaacctgaaactacgaactttctaatttccagtgcacacattttcagcatttgtttatggtgcatatgttggggtatcttgccttgtttgtatatcagttacctattgtttgcagcttttacgcaatgctttactcttgttctacatatgaaaggacgaaattttgtcacttcacattttaaacgttgcacccacatcactgcttttgctaatacagttctgttgttgcttatgctaatacagttctgttgttgcttatgctattcctacccaaaattaaaaatgaaaaaacacaactcattctgtgcactcttacaacatgttcataacataaccctctatttatagtgtgtatgagcttaatggagaaaagaaaaacatggttgtaacacagtttgaaccagatgatgcaagacgttgctttcccttgttgggatgaacctgctttcaaggtttgctgctttgatttatttctcaagaccttttgttcttttaggcacaaagctacgtttacttttatttgggttgcaagaggaactagaaccgtgaatggggctgcctcggcgagggcaccattcaagcttcacactttgttttctgtacggatgagaacaacatacgaggcaaggtgaacggtgagcaaatatacgtggaactacatctgcggatctgctgctgtctcttctccttactatctcttttgactcaattcaattttcctctctctatttactcttttcgatcaaggcaattcaataaattacacctgaacctttatgcactttgttcttctatctactggcctcttcagtctctgtggtggatggtagaggcatggctctccctcacgcagcgtcgtgcctcccatcctcatcgccaacgtagctcccgtctggctcaccatatcccgcagttgttctctgtgtgtggccaaagggaagaagaaatcacattttgacgattaacacaagtaattccccttccttggtctccctcagaagtcacattttgatgatagaactttgtatgcttaacattttccttataagtcagagtattgcgtatccagtaaaacagatttcaaaagttatcttctcgtcatggattattgttattctttgttttcatgcaaaatataattttagaagcatgcatgtacgtgcatgctctttgtaatttcaaatttctagagcaatatatctcgtgacctggtgtatatctcttatctcgcatactgaaattgcaaaaaacactagaatctatcaaaagtttattttatacttattcatctgaatatctaaactctgttgatctatgatggagaatttttggattttgttattaatttacaccatccttctatggaatcaatgtattttatttgagatgtcaatgacaaag

SEQ ID NO: 50547 - DNA, 2519 bp, Zea Mays
ccgcggtttcctcgcatcccgcccgcccgcgacgctcctttccatgctcgagcagtcgcagcttccttctatggcgctcatttccatcctcgaccgcggtttcctcgccactgcgctccgtctctcgctcctttccatccctctcctcgcccgacagctactgtgtccgtgcgtgcagcggtcgcccaactcatagcgggacaccagatctcaagttcacctagcactctacatcgttcgacggcgtcccacaatgcaggcggcgtcagctcccagagacgcctcccgcccgtcagctcccagagccgccagcgccggcgagcgcggcgaggtcgtcggttccgtcgagcgaactgcattgcccgcgcggcgctcgctgctgtacacgcaccgcgcgcagatgccattttggtgccggcacagcctctgctttctgctgctcagcgctggcgttcaccagcatctccagaagatcctatcctgtggcgcgctaattgacggcatggggagctgaactcggcacatcgcaccacattggaacacatcacacacggtggcaattctgtgaagcccaaaggttccaagtcaccatgagaaaattgaaatggcaagatctcttaatctaattgttgcaccttggaaggtctgaaccatcagagtttaactgtatcacccatttacacaagttcctaccatcacagttcaactgtatcactcatccataagcaattacttgtgttgaaatttatgagaagacatatgcctctgttaagtgtcaggatcttttttgctgggaagccaattccttactgatctgagggacaacatttttgtttgcctgataaggtgatgaaggtggctggacaacacgattatgggtattttcttatcgagtgatacaagacattgttctgccactgattacagtaagcctatactagattggcttgagaattccagtgatgaggtagcatagaagtgtgatgccataacatttggtgttctgaagaatcggcaaaaaaaaacttgccgagcagttttagtatttctaacgtgcctgaatttaaatctgaaaaatgcaaatcagagacatggctgctactatgagggataagtgagtcattgatatcttcctgatgcagcatggtattctttgcaaaaatctcttctttgcatggatcatatgtgtatctaattcggctcttcacttagaaattttagacatctttgtgttcgtcctagcctcttaatctattatgttcattgtgccatgcacttggtgttcctatggacagacttgtgaaagccgcagattcagtttcggtgtgcctatctaaaggtttaggcgcccctgttggattcaatggcctttgttgacaagaaatatgaacaatacctagaggccaaaaatcttcgaaagaccctaggtggtggaatgaggcaggttggagttctgtgtgctgattctcatacactatgggaaagcttgctggtgaggatagaaaggctaaagttgtgacagagtttggagcttccaggtgacggatttcatctcactcaatagtctcctcgctcaaggagttcatccaagctcggtgggtgcaagcctgcaaggcacaaagctacgtttacttttatttgggttgcaagaggaactagaaccgtgaatggggctgcctcggcgagggcaccattcaagcttcacactttgttttctgtacggatgagaacaacatacgaggcaaggtgaacggtgagcaaatatacgtggaactacatctgcggatctgctgctgtctcttctccttactatctcttttgactcaattcaattttcctctctctatttactcttttcgatcaaggcaattcaataaattacacctgaacctttatgcactttgttcttctatctactggcctcttcagtctctgtggtggatggtagaggcatggctctccctcacgcagcgtcgtgcctcccatcctcatcgccaacgtagctcccgtctggctcaccatatcccgcagttgttctctgtgtgtggccaaagggaagaagaaatcacattttgacgattaacacaagtaattccccttccttggtctccctcagaagtcacattttgatgatagaactttgtatgcttaacattttccttataagtcagagtattgcgtatccagtaaaacagatttcaaaagttatcttctcgtcatggattattgttattctttgttttcatgcaaaatataattttagaagcatgcatgtacgtgcatgctctttgtaatttcaaatttctagagcaatatatctcgtgacctggtgtatatctcttatctcgcatactgaaattgcaaaaaacactagaatctatcaaaagtttattttatacttattcatctgaatatctaaactctgttgatctatgatggagaatttttggattttgttattaatttacaccatccttctatggaatcaatgtattttatttgagatgtcaatgacaaag

SEQ ID NO: 50548 - DNA, 2805 bp, Zea Mays
gtttcctcgcatcccgcccgcccgcgacgctcctttccatgctcgagcagtcgcagcttccttctatggcgctcatttccatcctcgaccgcggtttcctcgccactgcgctccgtctctcgctcctttccatccctctcctcgcccgacagctactgtgtccgtgcgtgcagcggtcgcccaactcatagcgggacaccagatctcaagttcacctagcactctacatcgttcgacggcgtcccacaatgcaggcggcgtcagctcccagagacgcctcccgcccgtcagctcccagagccgccagcgccggcgagcgcggcgaggtcgtcggttccgtcgagcgaactgcattgcccgcgcggcgctcgctgctgtacacgcaccgcgcgcagatgccattttggtgccggcacagcctctgctttctgctgctcagcgctggcgttcaccagcatctccagaagatcctatcctgtggcgcgctaattgacggcatggggagctgaactcggcacatcgcaccacattggaacacatcacacacggtggcaattctgtgaagcccaaaggttccaagtcaccatgagaaaattgaaatggcaagatctcttaatctaattgttgcaccttggaaggtctgaaccatcagagtttaactgtatcacccatttacacaagttcctaccatcacagttcaactgtatcactcatccataagcaattacttgtgttgaaatttatgagaagacatatgcctctgttaagtgtcaggatcttttttgctgggaagccaattccttactgatctgagggacaacatttttgtttgcctgataaggtgatgaaggtggctggacaacacgattatgggtattttcttatcgagtgatacaagacattgttctgccactgattacagtaagcctatactagattggcttgagaattccagtgatgaggtagcatagaagtgtgatgccataacatttggtgttctgaagaatcggcaaaaaaaaacttgccgagcagttttagtatttctaacgtgcctgaatttaaatctgaaaaatgcaaatcagagacatggctgctactatgagggataagtgagtcattgatatcttcctgatgcagcatggtattctttgcaaaaatctcttctttgcatggatcatatgtgtatctaattcggctcttcacttagaaattttagacatctttgtgttcgtcctagcctcttaatctattatgttcattgtgccatgcacttggtgttcctatggacagacttgtgaaagccgcagattcagtttcggtgtgcctatctaaaggtttaggcgcccctgttggattcaatggcctttgttgacaagaaatatgaacaatacctagaggccaaaaatcttcgaaagaccctaggtggtggaatgaggcaggttggagttctgtgtgctgattctcatacactatgggaaagcttgctggtgaggatagaaaggctaaagttgtgacaggtttattttttccctcttctctaaaaaacatagaattggttgtatgctatttaaggcaagaatgttttccattgtctaaaaacgatttattttttccataatatttgtttcctagctttttatcctatttaaaacaaatcgaaactgcctgaaggctgttgttgtcttggtcttttctaattgttctttatcatgcggtttatcgaagttggtacaatggtttccccaaccacttatgctcgacgttgcctgtcatatttgatgaatggcatatgccacatgaggcattgaatgatgcaatgaatgctctggtaatatctcccacatggtcaacaacattatatctttaggcaccacatgttctgaagttgcatttcttgtttcgggttcaaaaattagtaacctggtaatttcttgtcctattttgagccctgaagatttctttgacgttttgagttctagagtttggagcttccaggtgacggatttcatctcactcaatagtctcctcgctcaaggagttcatccaagctcggtgggtgcaagcctgcaaggtgaggcacaaagctacgtttacttttatttgggttgcaagaggaactagaaccgtgaatggggctgcctcggcgagggcaccattcaagcttcacactttgttttctgtacggatgagaacaacatacgaggcaaggtgaacgtctctgtggtggatggtagaggcatggctctccctcacgcagcgtcgtgcctcccatcctcatcgccaacgtagctcccgtctggctcaccatatcccgcagttgttctctgtgtgtggccaaagggaagaagaaatcacattttgacgattaacacaagtaattccccttccttggtctccctcagaagtcacattttgatgatagaactttgtatgcttaacattttccttataagtcagagtattgcgtatccagtaaaacagatttcaaaagttatcttctcgtcatggattattgttattctttgttttcatgcaaaatataattttagaagcatgcatgtacgtgcatgctctttgtaatttcaaatttctagagcaatatatctcgtgacctggtgtatatctcttatctcgcatactgaaattgcaaaaaacactagaatctatcaaaagtttattttatacttattcatctgaatatctaaactctgttgatctatgatggagaatttttggattttgttattaatttacaccatccttctatggaatcaatgtattttatttgagatgtcaatgacaaag

SEQ ID NO: 50549 - DNA, 2249 bp, Zea Mays
gtttcctcgcatcccgcccgcccgcgacgctcctttccatgctcgagcagtcgcagcttccttctatggcgctcatttccatcctcgaccgcggtttcctcgccactgcgctccgtctctcgctcctttccatccctctcctcgcccgacagctactgtgtccgtgcgtgcagcggtcgcccaactcatagcgggacaccagatctcaagttcaccagcatctccagaagatcctatcctgtggcgcgctaattgacggcatggggagctgaactcggcacatcgcaccacattggaacacatcacacacggtggcaattctgtgaagcccaaaggttccaagtcaccatgagaaaattgaaatggcaagatctcttaatctaattgttgcaccttggaaggtctgaaccatcagagtttaactgtatcacccatttacacaagttcctaccatcacagttcaactgtatcactcatccataagcaattacttgtgttgaaatttatgagaagacatatgcctctgttaagtgtcaggatcttttttgctgggaagccaattccttactgatctgagggacaacatttttgtttgcctgataaggtgatgaaggtggctggacaacacgattatgggtattttcttatcgagtgatacaagacattgttctgccactgattacagtaagcctatactagattggcttgagaattccagtgatgaggtagcatagaagtgtgatgccataacatttggtgttctgaagaatcggcaaaaaaaaacttgccgagcagttttagtatttctaacgtgcctgaatttaaatctgaaaaatgcaaatcagagacatggctgctactatgagggataagtgagtcattgatatcttcctgatgcagcatggtattctttgcaaaaatctcttctttgcatggatcatatgtgtatctaattcggctcttcacttagaaattttagacatctttgtgttcgtcctagcctcttaatctattatgttcattgtgccatgcacttggtgttcctatggacagacttgtgaaagccgcagattcagtttcggtgtgcctatctaaaggtttaggcgcccctgttggattcaatggcctttgttgacaagaaatatgaacaatacctagaggccaaaaatcttcgaaagaccctaggtggtggaatgaggcaggttggagttctgtgtgctgattctcatacactatgggaaagcttgctggtgaggatagaaaggctaaagttgtgacagagtttggagcttccaggtgacggatttcatctcactcaatagtctcctcgctcaaggagttcatccaagctcggtgggtgcaagcctgcaagtgtgtatgagcttaatggagaaaagaaaaacatggttgtaacacagtttgaaccagatgatgcaagacgttgctttcccttgttgggatgaacctgctttcaaggtttgctgctttgatttatttctcaagaccttttgttcttttaggcacaaagctacgtttacttttatttgggttgcaagaggaactagaaccgtgaatggggctgcctcggcgagggcaccattcaagcttcacactttgttttctgtacggatgagaacaacatacgaggcaaggtgaacgtctctgtggtggatggtagaggcatggctctccctcacgcagcgtcgtgcctcccatcctcatcgccaacgtagctcccgtctggctcaccatatcccgcagttgttctctgtgtgtggccaaagggaagaagaaatcacattttgacgattaacacaagtaattccccttccttggtctccctcagaagtcacattttgatgatagaactttgtatgcttaacattttccttataagtcagagtattgcgtatccagtaaaacagatttcaaaagttatcttctcgtcatggattattgttattctttgttttcatgcaaaatataattttagaagcatgcatgtacgtgcatgctctttgtaatttcaaatttctagagcaatatatctcgtgacctggtgtatatctcttatctcgcatactgaaattgcaaaaaacactagaatctatcaaaagtttattttatacttattcatctgaatatctaaactctgttgatctatgatggagaatttttggattttgttattaatttacaccatccttctatggaatcaatgtattttatttgagatgtcaatgacaaag

SEQ ID NO: 50550 - DNA, 3337 bp, Zea Mays
gtttcctcgcatcccgcccgcccgcgacgctcctttccatgctcgagcagtcgcagcttccttctatggcgctcatttccatcctcgaccgcggtttcctcgccactgcgctccgtctctcgctcctttccatccctctcctcgcccgacagctactgtgtccgtgcgtgcagcggtcgcccaactcatagcgggacaccagatctcaagttcacctagcactctacatcgttcgacggcgtcccacaatgcaggcggcgtcagctcccagagacgcctcccgcccgtcagctcccagagccgccagcgccggcgagcgcggcgaggtcgtcggttccgtcgagcgaactgcattgcccgcgcggcgctcgctgctgtacacgcaccgcgcgcagatgccattttggtgccggcacagcctctgctttctgctgctcagcgctggcgttcaccagcatctccagaagatcctatcctgtggcgcgctaattgacggcatggggagctgaactcggcacatcgcaccacattggaacacatcacacacggtggcaattctgtgaagcccaaaggttccaagtcaccatgagaaaattgaaatggcaagatctcttaatctaattgttgcaccttggaagacatatgcctctgttaagtgtcaggatcttttttgctgggaagccaattccttactgatctgagggacaacatttttgtttgcctgataaggtgatgaaggtggctggacaacacgattatgggtattttcttatcgagtgatacaagacattgttctgccactgattacagtaagcctatactagattggcttgagaattccagtgatgaggtagcatagaagtgtgatgccataacatttggtgttctgaagaatcggcaaaaaaaaacttgccgagcagttttagtatttctaacgtgcctgaatttaaatctgaaaaatgcaaatcagagacatggctgctactatgagggataaacttgtgaaagccgcagattcagtttcggtgtgcctatctaaaggtttaggcgcccctgttggattcaatggcctttgttgacaagaaatatgaacaatacctagaggccaaaaatcttcgaaagaccctaggtggtggaatgaggcaggttggagttctgtgtgctgattctcatacactatgggaaagcttgctggtgaggatagaaaggctaaagttgtgacagttggtacaatggtttccccaaccacttatgctcgacgttgcctgtcatatttgatgaatggcatatgccacatgaggcattgaatgatgcaatgaatgctctggtaatatctcccacatggtcaacaacattatatctttaggcaccacatgttctgaagttgcatttcttgtttcgggttcaaaaattagtaacctggtaatttcttgtcctattttgagccctgaagatttctttgacgttttgagttctagagtttggagcttccaggtgacggatttcatctcactcaatagtctcctcgctcaaggagttcatccaagctcggtgggtgcaagcctgcaaggtgaggtactgatgatacttatttgttatcttgccttagcaacatgtgtcccgtgcttttacttgcaagctgatatgacacatgattgttatcttgctgatgtgcgcaatattgatcatgtatgttcacaatattgttcttgttatatataaatgggtcaagcattcatgctacagttcacacaaaaagtatatattggcattatgtcatattactgtcataacaggaagggcatcagatgtatcattctataacatgtattgaacacatatgtaattattgggtagaaaagcacaacgctttacttggtgccaccatcttttctgttgcagagttgtatattttttagcccactaatatgtaaagcacaacgctttacctgatgccctcaaaggttgcagttcaatttgcatctcctctttcttcatttttacagtttcaggttgcagttttcatagcctacttgagacattgcagtgtcctacaactgaacttgaaactgtcttcaacctgctacttcaggctaaacttgaaattgtcttgaacctgaaactacgaactttctaatttccagtgcacacattttcagcatttgtttatggtgcatatgttggggtatcttgccttgtttgtatatcagttacctattgtttgcagcttttacgcaatgctttactcttgttctacatatgaaaggacgaaattttgtcacttcacattttaaacgttgcacccacatcactgcttttgctaatacagttctgttgttgcttatgctaatacagttctgttgttgcttatgctattcctacccaaaattaaaaatgaaaaaacacaactcattctgtgcactcttacaacatgttcataacataaccctctatttatagtgtgtatgagcttaatggagaaaagaaaaacatggttgtaacacagtttgaaccagatgatgcaagacgttgctttcccttgttgggatgaacctgctttcaaggtttgctgctttgatttatttctcaagaccttttgttcttttaggcacaaagctacgtttacttttatttgggttgcaagaggaactagaaccgtgaatggggctgcctcggcgagggcaccattcaagcttcacactttgttttctgtacggatgagaacaacatacgaggcaaggtgaacgtctctgtggtggatggtagaggcatggctctccctcacgcagcgtcgtgcctcccatcctcatcgccaacgtagctcccgtctggctcaccatatcccgcagttgttctctgtgtgtggccaaagggaagaagaaatcacattttgacgattaacacaagtaattccccttccttggtctccctcagaagtcacattttgatgatagaactttgtatgcttaacattttccttataagtcagagtattgcgtatccagtaaaacagatttcaaaagttatcttctcgtcatggattattgttattctttgttttcatgcaaaatataattttagaagcatgcatgtacgtgcatgctctttgtaatttcaaatttctagagcaatatatctcgtgacctggtgtatatctcttatctcgcatactgaaattgcaaaaaacactagaatctatcaaaagtttattttatacttattcatctgaatatctaaactctgttgatctatgatggagaatttttggattttgttattaatttacaccatccttctatggaatcaatgtattttatttgagatgtcaatgacaaag

SEQ ID NO: 50551 - DNA, 3310 bp, Zea Mays
ctcgcatcccgcccgcccgcgacgctcctttccatgctcgagcagtcgcagcttccttctatggcgctcatttccatcctcgaccgcggtttcctcgccactgcgctccgtctctcgctcctttccatccctctcctcgcccgacagctactgtgtccgtgcgtgcagcggtcgcccaactcatagcgggacaccagatctcaagttcaccagcatctccagaagatcctatcctgtggcgcgctaattgacggcatggggagctgaactcggcacatcgcaccacattggaacacatcacacacggtggcaattctgtgaagcccaaaggttccaagtcaccatgagaaaattgaaatggcaagatctcttaatctaattgttgcaccttggaaggtctgaaccatcagagtttaactgtatcacccatttacacaagttcctaccatcacagttcaactgtatcactcatccataagcaattacttgtgttgaaatttatgagaagacatatgcctctgttaagtgtcaggatcttttttgctgggaagccaattccttactgatctgagggacaacatttttgtttgcctgataaggtgatgaaggtggctggacaacacgattatgggtattttcttatcgagtgatacaagacattgttctgccactgattacagtaagcctatactagattggcttgagaattccagtgatgaggtagcatagaagtgtgatgccataacatttggtgttctgaagaatcggcaaaaaaaaacttgccgagcagttttagtatttctaacgtgcctgaatttaaatctgaaaaatgcaaatcagagacatggctgctactatgagggataagtgagtcattgatatcttcctgatgcagcatggtattctttgcaaaaatctcttctttgcatggatcatatgtgtatctaattcggctcttcacttagaaattttagacatctttgtgttcgtcctagcctcttaatctattatgttcattgtgccatgcacttggtgttcctatggacagacttgtgaaagccgcagattcagtttcggtgtgcctatctaaaggtttaggcgcccctgttggattcaatggcctttgttgacaagaaatatgaacaatacctagaggccaaaaatcttcgaaagaccctaggtggtggaatgaggcaggttggagttctgtgtgctgattctcatacactatgggaaagcttgctggtgaggatagaaaggctaaagttgtgacagagtttggagcttccaggtgacggatttcatctcactcaatagtctcctcgctcaaggagttcatccaagctcggtgggtgcaagcctgcaaggtgaggtactgatgatacttatttgttatcttgccttagcaacatgtgtcccgtgcttttacttgcaagctgatatgacacatgattgttatcttgctgatgtgcgcaatattgatcatgtatgttcacaatattgttcttgttatatataaatgggtcaagcattcatgctacagttcacacaaaaagtatatattggcattatgtcatattactgtcataacaggaagggcatcagatgtatcattctataacatgtattgaacacatatgtaattattgggtagaaaagcacaacgctttacttggtgccaccatcttttctgttgcagagttgtatattttttagcccactaatatgtaaagcacaacgctttacctgatgccctcaaaggttgcagttcaatttgcatctcctctttcttcatttttacagtttcaggttgcagttttcatagcctacttgagacattgcagtgtcctacaactgaacttgaaactgtcttcaacctgctacttcaggctaaacttgaaattgtcttgaacctgaaactacgaactttctaatttccagtgcacacattttcagcatttgtttatggtgcatatgttggggtatcttgccttgtttgtatatcagttacctattgtttgcagcttttacgcaatgctttactcttgttctacatatgaaaggacgaaattttgtcacttcacattttaaacgttgcacccacatcactgcttttgctaatacagttctgttgttgcttatgctaatacagttctgttgttgcttatgctattcctacccaaaattaaaaatgaaaaaacacaactcattctgtgcactcttacaacatgttcataacataaccctctatttatagtgtgtatgagcttaatggagaaaagaaaaacatggttgtaacacagtttgaaccagatgatgcaagacgttgctttcccttgttgggatgaacctgctttcaaggtttgctgctttgatttatttctcaagaccttttgttcttttaggcacaaagctacgtttacttttatttgggttgcaagaggaactagaaccgtgaatggggctgcctcggcgagggcaccattcaagcttcacactttgttttctgtacggatgagaacaacatacgaggcaaggtgaacggtgagcaaatatacgtggaactacatctgcggatctgctgctgtctcttctccttactatctcttttgactcaattcaattttcctctctctatttactcttttcgatcaaggcaattcaataaattacacctgaacctttatgcactttgttcttctatctactggcctcttcagtctctgtggtggatggtagaggcatggctctccctcacgcagcgtcgtgcctcccatcctcatcgccaacgtagctcccgtctggctcaccatatcccgcagttgttctctgtgtgtggccaaagggaagaagaaatcacattttgacgattaacacaagtaattccccttccttggtctccctcagaagtcacattttgatgatagaactttgtatgcttaacattttccttataagtcagagtattgcgtatccagtaaaacagatttcaaaagttatcttctcgtcatggattattgttattctttgttttcatgcaaaatataattttagaagcatgcatgtacgtgcatgctctttgtaatttcaaatttctagagcaatatatctcgtgacctggtgtatatctcttatctcgcatactgaaattgcaaaaaacactagaatctatcaaaagtttattttatacttattcatctgaatatctaaactctgttgatctatgatggagaatttttggattttgttattaatttacaccatccttctatggaatcaatgtattttatttgagatgtcaatgacaaag

SEQ ID NO: 50552 - DNA, 2263 bp, Zea Mays
cgacgctcctttccatgctcgagcagtcgcagcttccttctatggcgctcatttccatcctcgaccgcggtttcctcgccactgcgctccgtctctcgctcctttccatccctctcctcgcccgacagctactgtgtccgtgcgtgcagcggtcgcccaactcatagcgggacaccagatctcaagttcacctagcactctacatcgttcgacggcgtcccacaatgcaggcggcgtcagctcccagagacgcctcccgcccgtcagctcccagagccgccagcgccggcgagcgcggcgaggtcgtcggttccgtcgagcgaactgcattgcccgcgcggcgctcgctgctgtacacgcaccgcgcgcagatgccattttggtgccggcacagcctctgctttctgctgctcagcgctggcgttcaccagcatctccagaagatcctatcctgtggcgcgctaattgacggcatggggagctgaactcggcacatcgcaccacattggaacacatcacacacggtggcaattctgtgaagcccaaaggttccaagtcaccatgagaaaattgaaatggcaagatctcttaatctaattgttgcaccttggaagacatatgcctctgttaagtgtcaggatcttttttgctgggaagccaattccttactgatctgagggacaacatttttgtttgcctgataaggtgatgaaggtggctggacaacacgattatgggtattttcttatcgagacttgtgaaagccgcagattcagtttcggtgtgcctatctaaaggtttaggcgcccctgttggattcaatggcctttgttgacaagaaatatgaacaatacctagaggccaaaaatcttcgaaagaccctaggtggtggaatgaggcaggttggagttctgtgtgctgattctcatacactatgggaaagcttgctggtgaggatagaaaggctaaagttgtgacaggtttattttttccctcttctctaaaaaacatagaattggttgtatgctatttaaggcaagaatgttttccattgtctaaaaacgatttattttttccataatatttgtttcctagctttttatcctatttaaaacaaatcgaaactgcctgaaggctgttgttgtcttggtcttttctaattgttctttatcatgcggtttatcgaagttggtacaatggtttccccaaccacttatgctcgacgttgcctgtcatatttgatgaatggcatatgccacatgaggcattgaatgatgcaatgaatgctctggtaatatctcccacatggtcaacaacattatatctttaggcaccacatgttctgaagttgcatttcttgtttcgggttcaaaaattagtaacctggtaatttcttgtcctattttgagccctgaagatttctttgacgttttgagttctagagtttggagcttccaggtgacggatttcatctcactcaatagtctcctcgctcaaggagttcatccaagctcggtgggtgcaagcctgcaaggcacaaagctacgtttacttttatttgggttgcaagaggaactagaaccgtgaatggggctgcctcggcgagggcaccattcaagcttcacactttgttttctgtacggatgagaacaacatacgaggcaaggtgaacgtctctgtggtggatggtagaggcatggctctccctcacgcagcgtcgtgcctcccatcctcatcgccaacgtagctcccgtctggctcaccatatcccgcagttgttctctgtgtgtggccaaagggaagaagaaatcacattttgacgattaacacaagtaattccccttccttggtctccctcagaagtcacattttgatgatagaactttgtatgcttaacattttccttataagtcagagtattgcgtatccagtaaaacagatttcaaaagttatcttctcgtcatggattattgttattctttgttttcatgcaaaatataattttagaagcatgcatgtacgtgcatgctctttgtaatttcaaatttctagagcaatatatctcgtgacctggtgtatatctcttatctcgcatactgaaattgcaaaaaacactagaatctatcaaaagtttattttatacttattcatctgaatatctaaactctgttgatctatgatggagaatttttggattttgttattaatttacaccatccttctatggaatcaatgtattttatttgagatgtcaatgacaaag

SEQ ID NO: 50553 - DNA, 4129 bp, Zea Mays
gtttgctgtggtgctttactgcttttccacgaggcacggcatatattagaccgatggaagcagtgagctgatccatcggactttgacacgtagatctttatccatttatctgcccgcctcccctggacgatgggatcaccaaaggccaaagatatatacgattccaattaacctgaccaacttgtcggtaaaaagcaaacttgttgaactcccgaatcgtacccaccagctagctgcttggagtgagccagtgaggtgatgagtactccagtggcacagcagcgtaccacacgcccgagcccccgaccgacctcgttccctgcagctagtactagcattagcagggatgctcacggtcacactcacggggacggggcgctattgcagttgcaggacccacctgacagtggctaagcacgagttccacgggaatctagtcactcgagttcttttttctcacgcaaaatgggcaaaacaaaaatggagatggaatattatgggggaggctaagggcaggcgagagcacgaggagataaatggcccagacgaaaaggcgagagcaaatccaaaccaaccaatcccaatatccgcagacctccctctgcgctggaccacacacctcgcctctcccgcagcccagcctcgcaaagcccctctgccaattctctgcagagtcattgacgctgtctgggctctctctgtttttttttgttccaatcatcatcgtcatcaaggaggagaagagtagattggattggtcagattactctctctcctccactgcagtctctctgaagagaagaggctaatccaatcaagcccagcccagcctttccacagttcctggagaaaatcctcactcgggtgcgcgaagcagcttgattcgcctgcgcagctcatcggaagagagccaggagcttgttcttggctgctggaccgatccttgagcagccgccgctgatcttgccggagggccaagagcctgtgttcttgcaccggagaattctcggccagccgtcccggatagggttgagggtgtgccatgtcagcgtcacagtcctcgatgagcggcgccggggagccgggggcgcgggcggtggtctggttcaggcgggacctgcgcgtggaggacaacccggcgctggcggcggccgctcgggcggccggggaggtcgtgccggcgtacgtgtgggcgcccgaggaggacggggcctactaccccggcagggtgtctcggtggtggctcagccagagcctcaagcacctggacgcctcgctccgccggctcggcgccgcccgcctcgtcacccgccgctccaacgacgccgtcgccgcgctgctcgacctcgtccgctgcaccggcgccacgcacctcttcttcaaccacctctacgacccgctgtcgctggtccgggactaccgcgtcaaggagcagctggcggccgagggcatcgacgtgcagtccttcaatgccgatctgctgtacgagccgtgggaggtcctcgacgaagaccgccgccccttcaccatgttcgcgccattctggaacaggtgcctgtgcatgccggaccccgccgcaccgctgctgccgcccaagaggatcaattcaggtgacctgtccaggtgcccgtgggacgagctggtctttgaggacgagtccgagaggggcagcaacgcgctgctcgcgcgggcgtggtcaccagggtggcagaatgctgacaaggcgctgacggccttcctcaacggcccgctgatggactactccgtgaaccgcaagaaggccgacagcgccagcacgtcgctgctgtccccgtacctgcacttcggcgagctcagcgtccggaaggtcttccaccaggtccggatgaagcagctcatgtggagcaatgacggcaaccacgccggcgaggagagctgcaccctgttcctccgctccatcggcctgcgggagtactcgaggtacctcaccttcaaccacccctgcagccacgagaagcccctcctgtcgcacctcaggttcttcccctgggtcgtcaatgaggtgtacttcaaggtctggaggcaagggaggaccggctaccctctcgtcgacgccggcatgagggagctctgggccaccggctgggtccatgaccgcatacgcgtcgttgtctcgagcttcttcgtcaaggtgctccagctgccatggcgctgggggatgaagtacttctgggacaccttgctggatgctgaccttgagagcgacgcgctaggctggcagtacatttctgggtctctccctgatggccgtgagcttgaccgcatcgacaaccctcagtttgaagggtacaagtttgatccgcacggggagtacgtccggcgatggctaccggagctggcaaggctgccaacggaatggatacaccatccctgggatgcacctgagtctgtgcttcaggctgcaggggttgagctaggatctaactacccacgccccattgtcgagttagatgcagccaattccaggttgcaggatgccctgtcagagatgtgggagcttgaggcagcctctcgtgctgccatggagaacggaatggaagaaggcctcggcgattccacggatgagccgccgatcgacttccctcaagaactacggatggaagtggaccgacagccggttcaacctgctatccacgcaccgggagtgactggtcggagacgagaggatcagatggtgcccagcatgacttcctcgttcattagagctgagaccgaactcactgcagattttggccacaccagtgaggacagtaggccagaagtgccatcaaacatccaccatttgcaggctcgcccggagagggaagagacagttgacggtggcactggcaatgctgtcagggtgcatggcaaccatcaccagcagaaccttcagaacaacatgcaccgcgtgctaggtatcgctccatcgatttcagaggcatcaagcagttggacgggcagggatggtggagtggtaccagtctggtcgcctccggcagcttcgggacactctgattcttatgctgccgatgaggctgacatttccagtaggggttatctggacaggcatccacagtcacatacgatgatgaactggagccagctctctcagtcattgtgagttcagttgcacggtaacttgtttttttcacagagaaatgcattgtcataaattggaaattcgcagtgtgtcgcaacagagtagtcgtgttaagccattgttagtgtggtagttaaaatgaactgacaacttgaatttgatgatgtgtagtagctgagtagaacattccaaatgcctactaatgatgtttttttaatgaatgaatctctttgcaggacaacagggtgggaagtggataattagcgctgtgtgtccggatttaattgcttaggatttcggcagagagaattatacatatgtaaattatcagattttgttcgtctatatagccttggtgtgcatgcaagtcatcaatcatgcagcttcctggatgcaataatggttatgtgaagctagttgtacagaaccttgtggtataggttgctaggtgtccacaagatatatgtattattcgtcagaagagttttctagcatcaggttcattttgtatctggttactgtcttattatagtctttggtgatgacagaggtgtgttctcagtttggtagacagaacatacctgctatcggtgaggactcaaaagggaacatcttggcagtgagattgggtgccactcttacctgctgctagttttgccgaagtaaagaagttgccgcatgaaacttctcaatgcacaatggcggattaatcaggtgatctgaaagacatagaagtgaaagtttaggatgataaacaatgagatttactagaagcaaaaaacggagacaacagataattaagcaatcacatggcaacccctctaccataagctgggacgagcacatcacgcacatgttgctttgtccaggctgagtgggagacgtagcatgggcatcaccaatcgccaagcaaaaccatcggaactagagtcttgcaggataaagttaacaactaacatagtgcagattctcaacgagaaggatccggcacacaataattggttttta

SEQ ID NO: 50554 - DNA, 3927 bp, Zea Mays
gtttgctgtggtgctttactgcttttccacgaggcacggcatatattagaccgatggaagcagtgagctgatccatcggactttgacacgtagatctttatccatttatctgcccgcctcccctggacgatgggatcaccaaaggccaaagatatatacgattccaattaacctgaccaacttgtcggtaaaaagcaaacttgttgaactcccgaatcgtacccaccagctagctgcttggagtgagccagtgaggtgatgagtactccagtggcacagcagcgtaccacacgcccgagcccccgaccgacctcgttccctgcagctagtactagcattagcagggatgctcacggtcacactcacggggacggggcgctattgcagttgcaggacccacctgacagtggctaagcacgagttccacgggaatctagtcactcgagttcttttttctcacgcaaaatgggcaaaacaaaaatggagatggaatattatgggggaggctaagggcaggcgagagcacgaggagataaatggcccagacgaaaaggcgagagcaaatccaaaccaaccaatcccaatatccgcagacctccctctgcgctggaccacacacctcgcctctcccgcagcccagcctcgcaaagcccctctgccaattctctgcagagtcattgacgctgtctgggctctctctgtttttttttgttccaatcatcatcgtcatcaaggaggagaagagtagattggattggtcagattactctctctcctccactgcagtctctctgaagagaagaggctaatccaatcaagcccagcccagcctttccacagttcctggagaaaatcctcactcgggtgcgcgaagcagcttgattcgcctgcgcagctcatcggaagagagccaggagcttgttcttggctgctggaccgatccttgagcagccgccgctgatcttgccggagggccaagagcctgtgttcttgcaccggagaattctcggccagccgtcccggatagggttgagggtgtgccatgtcagcgtcacagtcctcgatgagcggcgccggggagccgggggcgcgggcggtggtctggttcaggcgggacctgcgcgtggaggacaacccggcgctggcggcggccgctcgggcggccggggaggtcgtgccggcgtacgtgtgggcgcccgaggaggacggggcctactaccccggcagggtgtctcggtggtggctcagccagagcctcaagcacctggacgcctcgctccgccggctcggcgccgcccgcctcgtcacccgccgctccaacgacgccgtcgccgcgctgctcgacctcgtccgctgcaccggcgccacgcacctcttcttcaaccacctctacgacccgctgtcgctggtccgggactaccgcgtcaaggagcagctggcggccgagggcatcgacgtgcagtccttcaatgccgatctgctgtacgagccgtgggaggtcctcgacgaagaccgccgccccttcaccatgttcgcgccattctggaacaggtgcctgtgcatgccggaccccgccgcaccgctgctgccgcccaagaggatcaattcaggtgacctgtccaggtgcccgtgggacgagctggtctttgaggacgagtccgagaggggcagcaacgcgctgctcgcgcgggcgtggtcaccagggtggcagaatgctgacaaggcgctgacggccttcctcaacggcccgctgatggactactccgtgaaccgcaagaaggccgacagcgccagcacgtcgctgctgtccccgtacctgcacttcggcgagctcagcgtccggaaggtcttccaccaggtccggatgaagcagctcatgtggagcaatgacggcaaccacgccggcgaggagagctgcaccctgttcctccgctccatcggcctgcgggagtactcgaggtacctcaccttcaaccacccctgcagccacgagaagcccctcctgtcgcacctcaggttcttcccctgggtcgtcaatgaggtgtacttcaaggtctggaggcaagggaggaccggctaccctctcgtcgacgccggcatgagggagctctgggccaccggctgggtccatgaccgcatacgcgtcgttgtctcgagcttcttcgtcaaggtgctccagctgccatggcgctgggggatgaagtacttctgggacaccttgctggatgctgaccttgagagcgacgcgctaggctggcagtacatttctgggtctctccctgatggccgtgagcttgaccgcatcgacaaccctcagtttgaagggtacaagtttgatccgcacggggagtacgtccggcgatggctaccggagctggcaaggctgccaacggaatggatacaccatccctgggatgcacctgagtctgtgcttcaggctgcaggggttgagctaggatctaactacccacgccccattgtcgagttagatgcagccaattccaggttgcaggatgccctgtcagagatgtgggagcttgaggcagcctctcgtgctgccatggagaacggaatggaagaaggcctcggcgattccacggatgagccgccgatcgacttccctcaagaactacggatggaagtggaccgacagccggttcaacctgctatccacgcaccgggagtgactggtcggagacgagaggatcagatggtgcccagcatgacttcctcgttcattagagctgagaccgaactcactgcagattttggccacaccagtgaggacagtaggccagaagtgccatcaaacatccaccatttgcaggctcgcccggagagggaagagacagttgacggtggcactggcaatgctgtcagggtgcatggcaaccatcaccagcagaaccttcagaacaacatgcaccgcgtgctaggtatcgctccatcgatttcagaggcatcaagcagttggacgggcagggatggtggagtggtaccagtctggtcgcctccggcagcttcgggacactctgattcttatgctgccgatgaggctgacatttccagtaggggttatctggacaggcatccacagtcacatacgatgatgaactggagccagctctctcagtcattgtgagttcagttgcacggacaacagggtgggaagtggataattagcgctgtgtgtccggatttaattgcttaggatttcggcagagagaattatacatatgtaaattatcagattttgttcgtctatatagccttggtgtgcatgcaagtcatcaatcatgcagcttcctggatgcaataatggttatgtgaagctagttgtacagaaccttgtggtataggttgctaggtgtccacaagatatatgtattattcgtcagaagagttttctagcatcaggttcattttgtatctggttactgtcttattatagtctttggtgatgacagaggtgtgttctcagtttggtagacagaacatacctgctatcggtgaggactcaaaagggaacatcttggcagtgagattgggtgccactcttacctgctgctagttttgccgaagtaaagaagttgccgcatgaaacttctcaatgcacaatggcggattaatcaggtgatctgaaagacatagaagtgaaagtttaggatgataaacaatgagatttactagaagcaaaaaacggagacaacagataattaagcaatcacatggcaacccctctaccataagctgggacgagcacatcacgcacatgttgctttgtccaggctgagtgggagacgtagcatgggcatcaccaatcgccaagcaaaaccatcggaactagagtcttgcaggataaagttaacaactaacatagtgcagattctcaacgagaaggatccggcacacaataattggttttta

SEQ ID NO: 50555 - DNA, 4025 bp, Zea Mays
agcaaatccaaaccaaccaatcccaatatccgcagacctccctctgcgctggaccacacacctcgcctctcccgcagcccagcctcgcaaagcccctctgccaattctctgcagagtcattgacgctgtctgggctctctctgtttttttttgttccaatcatcatcgtcatcaaggaggagaagagtagattggattggtcagattactctctctcctccactgcagtctctctgaagagaagaggctaatccaatcaagcccagcccagcctttccacagttcctggagaaaatcctcactcgggtgcgcgaagcagcttgattcgcctgcgcagctcatcggaagagagccaggagcttgttcttggctgctggaccgatccttgagcagccgccgctgatcttgccggagggccaagagcctgtgttcttgcaccggagaattctcggccagccgtcccggatagggttgagggtgtgccatgtcagcgtcacagtcctcgatgagcggcgccggggagccgggggcgcgggcggtggtctggttcaggcgggacctgcgcgtggaggacaacccggcgctggcggcggccgctcgggcggccggggaggtcgtgccggcgtacgtgtgggcgcccgaggaggacggggcctactaccccggcagggtgtctcggtggtggctcagccagagcctcaagcacctggacgcctcgctccgccggctcggcgccgcccgcctcgtcacccgccgctccaacgacgccgtcgccgcgctgctcgacctcgtccgctgcaccggcgccacgcacctcttcttcaaccacctctacggttcgattcgattcgatccctctcgctctggatgtgccatgttgcagctgttcttggcttcttggtgccacagagtacatgcaaatcgtcagctcaaaatcctggtgttctagccttgctctgtctggtttggttgaacgggatcccgtccttcacgatccaaatagcaattatttatttatttatgagatgagagaagagaagaggatcttttcatgaacagtttttgcctgtacacatctgccattaatggatcttccatatactaccctataataatacccttactgcacacgtaaaccaacaccaagtttagcaattagcatcctgccttactgactttggtcgccgtcgccctctctattaattccaaaaagtccttgcacccagccactggcactcaccaaacaacctgcatctttcttctccggagtttccttttctcccaagaaccatcattaaagaaaaaaaaaacttttagcaccttaccatctgggccggctgatatgaacgaacggtcttccggtactcaccaatccctgtcccattctcgccgtgcagacccgctgtcgctggtccgggactaccgcgtcaaggagcagctggcggccgagggcatcgacgtgcagtccttcaatgccgatctgctgtacgagccgtgggaggtcctcgacgaagaccgccgccccttcaccatgttcgcgccattctggaacaggtgcctgtgcatgccggaccccgccgcaccgctgctgccgcccaagaggatcaattcaggtatccaaatgcacaaccgacagagctctaaccgtcatactgtaggcggggatccggtccgtgcagatcggatccagtcactgacatggaaaatgcttcgatcgcttcacaggtgacctgtccaggtgcccgtgggacgagctggtctttgaggacgagtccgagaggggcagcaacgcgctgctcgcgcgggcgtggtcaccagggtggcagaatgctgacaaggcgctgacggccttcctcaacggcccgctgatggactactccgtgaaccgcaagaaggccgacagcgccagcacgtcgctgctgtccccgtacctgcacttcggcgagctcagcgtccggaaggtcttccaccaggtccggatgaagcagctcatgtggagcaatgacggcaaccacgccggcgaggagagctgcaccctgttcctccgctccatcggcctgcgggagtactcgaggtacctcaccttcaaccacccctgcagccacgagaagcccctcctgtcgcacctcaggttcttcccctgggtcgtcaatgaggtgtacttcaaggtctggaggcaagggaggaccggctaccctctcgtcgacgccggcatgagggagctctgggccaccggctgggtccatgaccgcatacgcgtcgttgtctcgagcttcttcgtcaaggtgctccagctgccatggcgctgggggatgaagtacttctgggacaccttgctggatgctgaccttgagagcgacgcgctaggctggcagtacatttctgggtctctccctgatggccgtgagcttgaccgcatcgacaaccctcagtttgaagggtacaagtttgatccgcacggggagtacgtccggcgatggctaccggagctggcaaggctgccaacggaatggatacaccatccctgggatgcacctgagtctgtgcttcaggctgcaggggttgagctaggatctaactacccacgccccattgtcgagttagatgcagccaattccaggttgcaggatgccctgtcagagatgtgggagcttgaggcagcctctcgtgctgccatggagaacggaatggaagaaggcctcggcgattccacggatgagccgccgatcgacttccctcaagaactacggatggaagtggaccgacagccggttcaacctgctatccacgcaccgggagtgactggtcggagacgagaggatcagatggtgcccagcatgacttcctcgttcattagagctgagaccgaactcactgcagattttggccacaccagtgaggacagtaggccagaagtgccatcaaacatccaccatttgcaggctcgcccggagagggaagagacagttgacggtggcactggcaatgctgtcagggtgcatggcaaccatcaccagcagaaccttcagaacaacatgcaccgcgtgctaggtatcgctccatcgatttcagaggcatcaagcagttggacgggcagggatggtggagtggtaccagtctggtcgcctccggcagcttcgggacactctgattcttatgctgccgatgaggctgacatttccagtaggggttatctggacaggcatccacagtcacatacgatgatgaactggagccagctctctcagtcattgacaacagggtgggaagtggataattagcgctgtgtgtccggatttaattgcttaggatttcggcagagagaattatacatatgtaaattatcagattttgttcgtctatatagccttggtgtgcatgcaagtcatcaatcatgcagcttcctggatgcaataatggttatgtgaagctagttgtacagaaccttgtggtataggttgctaggtgtccacaagatatatgtattattcgtcagaagagttttctagcatcaggttcattttgtatctggttactgtcttattatagtctttggtgatgacagaggtgtgttctcagtttggtagacagaacatacctgctatcggtgaggactcaaaagggaacatcttggcagtgagattgggtgccactcttacctgctgctagttttgccgaagtaaagaagttgccgcatgaaacttctcaatgcacaatggcggattaatcaggtgatctgaaagacatagaagtgaaagtttaggatgataaacaatgagatttactagaagcaaaaaacggagacaacagataattaagcaatcacatggcaacccctctaccataagctgggacgagcacatcacgcacatgttgctttgtccaggctgagtgggagacgtagcatgggcatcaccaatcgccaagcaaaaccatcggaactagagtcttgcaggataaagttaacaactaacatagtgcagattctcaacgagaaggatccggcacacaataattggttttta

SEQ ID NO: 50556 - DNA, 3115 bp, Zea Mays
gcttgcccgggggcgtctcggggactcgcttcctagcaccaccactccttcctccattcctccaagccacgccacacctcggcgcgtcccgccaaaaccccatcgatacccaaaccctagccagcccctctcccacgcgccatgtccgtcgcgtctgcggcggcggcggcctccctcatcgcctctacctcgctctccgtcccagaccgcatccgcctccatccccgccccgcgcttcctccactaccgtgcttccgccggcgatcgcgggtctgcctcgtacgcgccatcctcgaggaccgcccgtccccgcctgccgaggaggacgctaagcgctacgggctcaacgggaacgggagcgggctcggatacgacgatgccgccgtccaagcgtacctcggaagcaacggtaacgggagcgccagcggtaacggcggggcggtgaagcagaaccccgaggttgccgggagcagcgcggccatagtcccggccccggtcccgccggcggagggtgagaggagaaggaaggagagagtggaggagatcgggagggaggatgcctggttcaagcagagcagcgcagagaacattggaaatatggggattcgtttttacatttatattcaaggcttggctcaacaatcaaaagttcacatacagaggggggatgactgaggagaaaaagataatgaggaggaaagttcttgccaagtggctaaaggagagtcttttgagattaggccccacattcatcaaaatagggcaacaattctcaaccagggtggatattctcccacaggaatatgtggatcaactatcggagttacaggatcaagttcctccatttccttctgagacagctgtaaaaattgttgaagaagagctgggggcatctgtaaatgagatatttgatcgatttgattttgaaccaatagctgctgctagcctcggccaggttcatcgggcacgtctgaatggccaagaggttgtgatcaaagtgcaacggcctggtctgaaggagctgttcgatattgatctgaagaatttaagggtaatagctgaataccttcagaaagtggacccaaaatcagatggcgccaagagagactgggttgctatttatgatgagtgtgcatctgttttatatcaggaaatagactatatgaaggaagcatttaacgctgaaaaatttgctgaaaacttcaaaaaattggattatgtgaaggttcctgaaatttactgggcacacactactcctcaggttttaacaatggagtatgtcccaggaattaaaattaacagaataaagcagttagataagttaggagtcgatagaaaaagattaggtcgttatgctgttgagtcctaccttgagcagatcttatcccatgggtttttccatgctgacccgcatccaggaaacattgctgttgatgatgtcaatggagggagacttatcttctatgacttcgggatgatgggaagtatcagtcaaaatattcgggaaggattgcttgaagtattctatggagtttatgaaaaggatcctgacaaagtgcttcaagcaatggttcaaatgggtgtccttgttcctactggagatatgactgctgtcagaagaaccgctcaatttttccttaatagctttcaagagcgcctagcagcacaaaggaaggagagagaaatggcaaccgcagaactgggattcaaaaagcaattaactaaggaggagaagtttgaaaagaggaagcagagacttgctgcaatcggagaggatcttttggcgattgctgctgatcaaccatttcgcttccctgccacatttacatttgtggtcagagcattctcagttctagatggtattgggaaaggccttgatcctaggtttgatattacagagattgctaagccatatgccaaggaattgctaagatttaatgacgctggtgttgaaatagttgtgaaggatgcaaagaagagatgggaaaggcagtcccgtgccttttacaatttgttccgccaacccgatagagttgaaaagctcgcacaaattattgaacgtttggagcaaggtgaactcaagcttcgtgtcagaacgctggaatcagaaagagcatttcaaagagttgccgctgtacagaaaacaattggatatggagttgctgcaggtagtttgatgaaccttgcaacaatgttgtacttcaattcaatccggggaccagcaaccattgcatactccctctgcgcatttttcgggctgcaagttctgatcgggcttgtcaaggttaagaagttggatcggcaggagagactgataaccggtactgcatgagctatgagttattcacgatcaatcggtgaggactgaattacaccacttttcagcgttgtcgcgacacctttttttttcttttgcccaaattttacccccaccacgatttagcataggcatgccatacccccccttccgggttgtatgtaaatgtaatgataacatataaagatgtacatagtgtataatagacattctccttgtattgtttcgttttcatgatgtaccagtatgtacaggattttgtttcacatgctacctgattggtttgctggctgcgcatacccaggctatcgtcagacttgtggcgggtccgatatggacatttttggcgtaggcaaataacttcaaaaggacttattttgtatccgctcatggtactaacgtctctcgcgtgcaggcaattaaatatatgctcggccaaagtcaatgcacattggcgcataatgagatggtatggataaccaaactgatggatgatgattcaaggtgaaatgatcgatttggaaagtgatttttctatatctttctcacaactttattgctgacccgagtgtttgagattcgaacctagagcatatgatgacgtcgttactcaacatatcatcaacactactctagcctaacattgttgtgaatttaatctacaataactcttcgtcaaattgatatgttcttgaccttgttgaactatactacttgatatgttttatctccttttgctgaatgaaaggagcatagtatgttgttcttgatctgctataaacttatggtttagtggac

SEQ ID NO: 50557 - DNA, 3169 bp, Zea Mays
gcttgcccgggggcgtctcggggactcgcttcctagcaccaccactccttcctccattcctccaagccacgccacacctcggcgcgtcccgccaaaaccccatcgatacccaaaccctagccagcccctctcccacgcgccatgtccgtcgcgtctgcggcggcggcggcctccctcatcgcctctacctcgctctccgtcccagaccgcatccgcctccatccccgccccgcgcttcctccactaccgtgcttccgccggcgatcgcgggtctgcctcgtacgcgccatcctcgaggaccgcccgtccccgcctgccgaggaggacgctaagcgctacgggctcaacgggaacgggagcgggctcggatacgacgatgccgccgtccaagcgtacctcggaagcaacggtaacgggagcgccagcggtaacggcggggcggtgaagcagaaccccgaggttgccgggagcagcgcggccatagtcccggccccggtcccgccggcggagggtgagaggagaaggaaggagagagtggaggagatcgggagggaggatgcctggttcaagcagagcagcgcagaggtttctgttgctcctggtggtcgctggaatcggtttaaaacctattcaacaattcaaagaacattggaaatatggggattcgtttttacatttatattcaaggcttggctcaacaatcaaaagttcacatacagaggggggatgactgaggagaaaaagataatgaggaggaaagttcttgccaagtggctaaaggagagtcttttgagattaggccccacattcatcaaaatagggcaacaattctcaaccagggtggatattctcccacaggaatatgtggatcaactatcggagttacaggatcaagttcctccatttccttctgagacagctgtaaaaattgttgaagaagagctgggggcatctgtaaatgagatatttgatcgatttgattttgaaccaatagctgctgctagcctcggttcatcgggcacgtctgaatggccaagaggttgtgatcaaagtgcaacggcctggtctgaaggagctgttcgatattgatctgaagaatttaagggtaatagctgaataccttcagaaagtggacccaaaatcagatggcgccaagagagactgggttgctatttatgatgagtgtgcatctgttttatatcaggaaatagactatatgaaggaagcatttaacgctgaaaaatttgctgaaaacttcaaaaaattggattatgtgaaggttcctgaaatttactgggcacacactactcctcaggttttaacaatggagtatgtcccaggaattaaaattaacagaataaagcagttagataagttaggagtcgatagaaaaagattaggtcgttatgctgttgagtcctaccttgagcagatcttatcccatgggtttttccatgctgacccgcatccaggaaacattgctgttgatgatgtcaatggagggagacttatcttctatgacttcgggatgatgggaagtatcagtcaaaatattcgggaaggattgcttgaagtattctatggagtttatgaaaaggatcctgacaaagtgcttcaagcaatggttcaaatgggtgtccttgttcctactggagatatgactgctgtcagaagaaccgctcaatttttccttaatagctttcaagagcgcctagcagcacaaaggaaggagagagaaatggcaaccgcagaactgggattcaaaaagcaattaactaaggaggagaagtttgaaaagaggaagcagagacttgctgcaatcggagaggatcttttggcgattgctgctgatcaaccatttcgcttccctgccacatttacatttgtggtcagagcattctcagttctagatggtattgggaaaggccttgatcctaggtttgatattacagagattgctaagccatatgccaaggaattgctaagatttaatgacgctggtgttgaaatagttgtgaaggatgcaaagaagagatgggaaaggcagtcccgtgccttttacaatttgttccgccaacccgatagagttgaaaagctcgcacaaattattgaacgtttggagcaaggtgaactcaagcttcgtgtcagaacgctggaatcagaaagagcatttcaaagagttgccgctgtacagaaaacaattggatatggagttgctgcaggtagtttgatgaaccttgcaacaatgttgtacttcaattcaatccggggaccagcaaccattgcatactccctctgcgcatttttcgggctgcaagttctgatcgggcttgtcaaggttaagaagttggatcggcaggagagactgataaccggtactgcatgagctatgagttattcacgatcaatcggtgaggactgaattacaccacttttcagcgttgtcgcgacacctttttttttcttttgcccaaattttacccccaccacgatttagcataggcatgccatacccccccttccgggttgtatgtaaatgtaatgataacatataaagatgtacatagtgtataatagacattctccttgtattgtttcgttttcatgatgtaccagtatgtacaggattttgtttcacatgctacctgattggtttgctggctgcgcatacccaggctatcgtcagacttgtggcgggtccgatatggacatttttggcgtaggcaaataacttcaaaaggacttattttgtatccgctcatggtactaacgtctctcgcgtgcaggcaattaaatatatgctcggccaaagtcaatgcacattggcgcataatgagatggtatggataaccaaactgatggatgatgattcaaggtgaaatgatcgatttggaaagtgatttttctatatctttctcacaactttattgctgacccgagtgtttgagattcgaacctagagcatatgatgacgtcgttactcaacatatcatcaacactactctagcctaacattgttgtgaatttaatctacaataactcttcgtcaaattgatatgttcttgaccttgttgaactatactacttgatatgttttatctccttttgctgaatgaaaggagcatagtatgttgttcttgatctgctataaacttatggtttagtggac

SEQ ID NO: 50558 - DNA, 3167 bp, Zea Mays
gcttgcccgggggcgtctcggggactcgcttcctagcaccaccactccttcctccattcctccaagccacgccacacctcggcgcgtcccgccaaaaccccatcgatacccaaaccctagccagcccctctcccacgcgccatgtccgtcgcgtctgcggcggcggcggcctccctcatcgcctctacctcgctctccgtcccagaccgcatccgcctccatccccgccccgcgcttcctccactaccgtgcttccgccggcgatcgcgggtctgcctcgtacgcgccatcctcgaggaccgcccgtccccgcctgccgaggaggacgctaagcgctacgggctcaacgggaacgggagcgggctcggatacgacgatgccgccgtccaagcgtacctcggaagcaacggtaacgggagcgccagcggtaacggcggggcggtgaagcagaaccccgaggttgccgggagcagcgcggccatagtcccggccccggtcccgccggcggagggtgagaggagaaggaaggagagagtggaggagatcgggagggaggatgcctggttcaagcagagcagcgcagaggtttctgttgctcctggtggtcgctggaatcggtttaaaacctattcaacaattcaaagaacattggaaatatggggattcgtttttacatttatattcaaggcttggctcaacaatcaaaagttcacatacagaggggggatgactgaggagaaaaagataatgaggaggaaagttcttgccaagtggctaaaggagagtcttttgagattaggccccacattcatcaaaatagggcaacaattctcaaccagggtggatattctcccacaggaatatgtggatcaactatcggagttacaggatcaagttcctccatttccttctgagacagctgtaaaaattgttgaagaagagctgggggcatctgtaaatgagatatttgatcgatttgattttgaaccaatagctgctgctagcctcggccaggttcatcgggcacgtctgaatggccaagaggttgtgatcaaagtgcaacggcctggtctgaaggagctgttcgatattgatctgaagaatttaagggtaatagctgaataccttcagaaagtggacccaaaatcagatggcgccaagagagactgggttgctatttatgatgagtgtgcatctgttttatatcaggaaatagactatatgaaggaagcatttaacgctgaaaaatttgctgaaaacttcaaaaaattggattatgtgaaggttcctgaaatttactgggcacacactactcctcaggttttaacaatggagtatgtcccaggaattaaaattaacagaataaagcagttagataagttaggagtcgatagaaaaagattaggtcgttatgctgttgagtcctaccttgagcagatcttatcccatgggtttttccatgctgacccggaaacattgctgttgatgatgtcaatggagggagacttatcttctatgacttcgggatgatgggaagtatcagtcaaaatattcgggaaggattgcttgaagtattctatggagtttatgaaaaggatcctgacaaagtgcttcaagcaatggttcaaatgggtgtccttgttcctactggagatatgactgctgtcagaagaaccgctcaatttttccttaatagctttcaagagcgcctagcagcacaaaggaaggagagagaaatggcaaccgcagaactgggattcaaaaagcaattaactaaggaggagaagtttgaaaagaggaagcagagacttgctgcaatcggagaggatcttttggcgattgctgctgatcaaccatttcgcttccctgccacatttacatttgtggtcagagcattctcagttctagatggtattgggaaaggccttgatcctaggtttgatattacagagattgctaagccatatgccaaggaattgctaagatttaatgacgctggtgttgaaatagttgtgaaggatgcaaagaagagatgggaaaggcagtcccgtgccttttacaatttgttccgccaacccgatagagttgaaaagctcgcacaaattattgaacgtttggagcaaggtgaactcaagcttcgtgtcagaacgctggaatcagaaagagcatttcaaagagttgccgctgtacagaaaacaattggatatggagttgctgcaggtagtttgatgaaccttgcaacaatgttgtacttcaattcaatccggggaccagcaaccattgcatactccctctgcgcatttttcgggctgcaagttctgatcgggcttgtcaaggttaagaagttggatcggcaggagagactgataaccggtactgcatgagctatgagttattcacgatcaatcggtgaggactgaattacaccacttttcagcgttgtcgcgacacctttttttttcttttgcccaaattttacccccaccacgatttagcataggcatgccatacccccccttccgggttgtatgtaaatgtaatgataacatataaagatgtacatagtgtataatagacattctccttgtattgtttcgttttcatgatgtaccagtatgtacaggattttgtttcacatgctacctgattggtttgctggctgcgcatacccaggctatcgtcagacttgtggcgggtccgatatggacatttttggcgtaggcaaataacttcaaaaggacttattttgtatccgctcatggtactaacgtctctcgcgtgcaggcaattaaatatatgctcggccaaagtcaatgcacattggcgcataatgagatggtatggataaccaaactgatggatgatgattcaaggtgaaatgatcgatttggaaagtgatttttctatatctttctcacaactttattgctgacccgagtgtttgagattcgaacctagagcatatgatgacgtcgttactcaacatatcatcaacactactctagcctaacattgttgtgaatttaatctacaataactcttcgtcaaattgatatgttcttgaccttgttgaactatactacttgatatgttttatctccttttgctgaatgaaaggagcatagtatgttgttcttgatctgctataaacttatggtttagtggac

SEQ ID NO: 50559 - DNA, 2802 bp, Zea Mays
gcttgcccgggggcgtctcggggactcgcttcctagcaccaccactccttcctccattcctccaagccacgccacacctcggcgcgtcccgccaaaaccccatcgatacccaaaccctagccagcccctctcccacgcgccatgtccgtcgcgtctgcggcggcggcggcctccctcatcgcctctacctcgctctccgtcccagaccgcatccgcctccatccccgccccgcgcttcctccactaccgtgcttccgccggcgatcgcgggtctgcctcgtacgcgccatcctcgaggaccgcccgtccccgcctgccgaggaggacgctaagcgctacgggctcaacgggaacgggagcgggctcggatacgacgatgccgccgtccaagcgtacctcggaagcaacggtaacgggagcgccagcggtaacggcggggcggtgaagcagaaccccgaggttgccgggagcagcgcggccatagtcccggccccggtcccgccggcggagggtgagaggagaaggaaggagagagtggaggagatcgggagggaggatgcctggttcaagcagagcagcgcagaggtttctgttgctcctggtggtcgctggaatcggtttaaaacctattcaacaattcaaagaacattggaaatatggggattcgtttttacatttatattcaaggcttggctcaacaatcaaaagttcacatacagagcttctgcaggggggatgactgaggagaaaaagataatgaggaggaaagttcttgccaagtggctaaaggagagtcttttgagattaggccccacattcatcaaaatagggcaacaattctcaaccagggtggatattctcccacaggaatatgtggatcaactatcggagttacaggatcaagttcctccatttccttctgagacagctgtaaaaattgttgaagaagagctgggggcatctgtaaatgagatatttgatcgatttgattttgaaccaatagctgctgctagcctcggccaggttcatcgggcacgtctgaatggccaagaggttgtgatcaaagtgcaacggcctggtctgaaggagctgttcgatattgatctgaagaatttaagggtaatagctgaataccttcagaaagtggacccaaaatcagatggcgccaagagagactgggttgctatttatgatgagtgtgcatctgttttatatcaggaaatagactatatgaaggaagcatttaacgctgaaaaatttgctgaaaacttcaaaaaattggattatgtgaaggttcctgaaatttactgggcacacactactcctcaggttttaacaatggagtatgtcccaggaattaaaattaacagaataaagcagttagataagttaggagtcgatagaaaaagattaggtcgttatgctgttgagtcctaccttgagcagatcttatcccatgggtttttccatgctgacccgcatccaggaaacattgctgttgatgatgtcaatggagggagacttatcttctatgacttcgggatgatgggaagtcaaaatattcgggaaggattgcttgaagtattctatggagtttatgaaaaggatcctgacaaagtgcttcaagcaatggttcaaatgggtgtccttgttcctactggagatatgactgctgtcagaagaaccgctcaatttttccttaatagctttcaagagcgcctagcagcacaaaggaaggagagagaaatggcaaccgcagaactgggattcaaaaagcaattaactaaggaggagaagtttgaaaagaggaagcagagacttgctgcaatcggagaggatcttttggcgattgctgctgatcaaccatttcgcttccctgccacatttacatttgtggtcagagcattctcagttctagatggtattgggaaaggccttgatcctaggtttgatattacagagattgctaagccatatgccaaggaattgctaagatttaatgacgctggtgttgaaatagttgtgaaggatgcaaagaagagatgggaaaggcagtcccgtgccttttacaatttgttccgccaacccgatagagttgaaaagctcgcacaaattattgaacgtttggagcaaggtgaactcaagcttcgtgtcagaacgctggaatcagaaagagcatttcaaagagttgccgctgtacagaaaacaattggatatggagttgctgcaggtagtttgatgaaccttgcaacaatgttgtacttcaattcaatccggggaccagcaaccattgcatactccctctgcgcatttttcgggctgcaagttctgatcgggcttgtcaaggttaagaagttggatcggcaggagagactgataaccggtactgcatgagctatgagttattcacgatcaatcggcaattaaatatatgctcggccaaagtcaatgcacattggcgcataatgagatggtatggataaccaaactgatggatgatgattcaaggtgaaatgatcgatttggaaagtgatttttctatatctttctcacaactttattgctgacccgagtgtttgagattcgaacctagagcatatgatgacgtcgttactcaacatatcatcaacactactctagcctaacattgttgtgaatttaatctacaataactcttcgtcaaattgatatgttcttgaccttgttgaactatactacttgatatgttttatctccttttgctgaatgaaaggagcatagtatgttgttcttgatctgctataaacttatggtttagtggac

SEQ ID NO: 50560 - DNA, 3177 bp, Zea Mays
gcttgcccgggggcgtctcggggactcgcttcctagcaccaccactccttcctccattcctccaagccacgccacacctcggcgcgtcccgccaaaaccccatcgatacccaaaccctagccagcccctctcccacgcgccatgtccgtcgcgtctgcggcggcggcggcctccctcatcgcctctacctcgctctccgtcccagaccgcatccgcctccatccccgccccgcgcttcctccactaccgtgcttccgccggcgatcgcgggtctgcctcgtacgcgccatcctcgaggaccgcccgtccccgcctgccgaggaggacgctaagcgctacgggctcaacgggaacgggagcgggctcggatacgacgatgccgccgtccaagcgtacctcggaagcaacggtaacgggagcgccagcggtaacggcggggcggtgaagcagaaccccgaggttgccgggagcagcgcggccatagtcccggccccggtcccgccggcggagggtgagaggagaaggaaggagagagtggaggagatcgggagggaggatgcctggttcaagcagagcagcgcagaggtttctgttgctcctggtggtcgctggaatcggtttaaaacctattcaacaattcaaagaacattggaaatatggggattcgtttttacatttatattcaaggcttggctcaacaatcaaaagttcacatacagagcttctgcaggggggatgactgaggagaaaaagataatgaggaggaaagttcttgccaagtggctaaaggagagtcttttgagattaggccccacattcatcaaaatagggcaacaattctcaaccagggtggatattctcccacaggaatatgtggatcaactatcggagttacaggatcaagttcctccatttccttctgagacagctgtaaaaattgttgaagaagagctgggggcatctgtaaatgagatatttgatcgatttgattttgaaccaatagctgctgctagcctcggccaggttcatcgggcacgtctgaatggccaagaggttgtgatcaaagtgcaacggcctggtctgaaggagctgttcgatattgatctgaagaatttaagggtaatagctgaataccttcagaaagtggacccaaaatcagatggcgccaagagagactgggttgctatttatgatgagtgtgcatctgttttatatcaggaaatagactatatgaaggaagcatttaacgctgaaaaatttgctgaaaacttcaaaaaattggattatgtgaaggttcctgaaatttactgggcacacactactcctcaggttttaacaatggagtatgtcccaggaattaaaattaacagaataaagcagttagataagttaggagtcgatagaaaaagattaggtcgttatgctgttgagtcctaccttgagcagatcttatcccatgggtttttccatgctgacccgcatccaggaaacattgctgttgatgatgtcaatggagggagacttatcttctatgacttcgggatgatgggaagtcaaaatattcgggaaggattgcttgaagtattctatggagtttatgaaaaggatcctgacaaagtgcttcaagcaatggttcaaatgggtgtccttgttcctactggagatatgactgctgtcagaagaaccgctcaatttttccttaatagctttcaagagcgcctagcagcacaaaggaaggagagagaaatggcaaccgcagaactgggattcaaaaagcaattaactaaggaggagaagtttgaaaagaggaagcagagacttgctgcaatcggagaggatcttttggcgattgctgctgatcaaccatttcgcttccctgccacatttacatttgtggtcagagcattctcagttctagatggtattgggaaaggccttgatcctaggtttgatattacagagattgctaagccatatgccaaggaattgctaagatttaatgacgctggtgttgaaatagttgtgaaggatgcaaagaagagatgggaaaggcagtcccgtgccttttacaatttgttccgccaacccgatagagttgaaaagctcgcacaaattattgaacgtttggagcaaggtgaactcaagcttcgtgtcagaacgctggaatcagaaagagcatttcaaagagttgccgctgtacagaaaacaattggatatggagttgctgcaggtagtttgatgaaccttgcaacaatgttgtacttcaattcaatccggggaccagcaaccattgcatactccctctgcgcatttttcgggctgcaagttctgatcgggcttgtcaaggttaagaagttggatcggcaggagagactgataaccggtactgcatgagctatgagttattcacgatcaatcggtgaggactgaattacaccacttttcagcgttgtcgcgacacctttttttttcttttgcccaaattttacccccaccacgatttagcataggcatgccatacccccccttccgggttgtatgtaaatgtaatgataacatataaagatgtacatagtgtataatagacattctccttgtattgtttcgttttcatgatgtaccagtatgtacaggattttgtttcacatgctacctgattggtttgctggctgcgcatacccaggctatcgtcagacttgtggcgggtccgatatggacatttttggcgtaggcaaataacttcaaaaggacttattttgtatccgctcatggtactaacgtctctcgcgtgcaggcaattaaatatatgctcggccaaagtcaatgcacattggcgcataatgagatggtatggataaccaaactgatggatgatgattcaaggtgaaatgatcgatttggaaagtgatttttctatatctttctcacaactttattgctgacccgagtgtttgagattcgaacctagagcatatgatgacgtcgttactcaacatatcatcaacactactctagcctaacattgttgtgaatttaatctacaataactcttcgtcaaattgatatgttcttgaccttgttgaactatactacttgatatgttttatctccttttgctgaatgaaaggagcatagtatgttgttcttgatctgctataaacttatggtttagtggac

SEQ ID NO: 50561 - DNA, 2791 bp, Zea Mays
gcttgcccgggggcgtctcggggactcgcttcctagcaccaccactccttcctccattcctccaagccacgccacacctcggcgcgtcccgccaaaaccccatcgatacccaaaccctagccagcccctctcccacgcgccatgtccgtcgcgtctgcggcggcggcggcctccctcatcgcctctacctcgctctccgtcccagaccgcatccgcctccatccccgccccgcgcttcctccactaccgtgcttccgccggcgatcgcgggtctgcctcgtacgcgccatcctcgaggaccgcccgtccccgcctgccgaggaggacgctaagcgctacgggctcaacgggaacgggagcgggctcggatacgacgatgccgccgtccaagcgtacctcggaagcaacggtaacgggagcgccagcggtaacggcggggcggtgaagcagaaccccgaggttgccgggagcagcgcggccatagtcccggccccggtcccgccggcggagggtgagaggagaaggaaggagagagtggaggagatcgggagggaggatgcctggttcaagcagagcagcgcagaggtttctgttgctcctggtggtcgctggaatcggtttaaaacctattcaacaattcaaagaacattggaaatatggggattcgtttttacatttatattcaaggcttggctcaacaatcaaaagttcacatacagaggggggatgactgaggagaaaaagataatgaggaggaaagttcttgccaagtggctaaaggagagtcttttgagattaggccccacattcatcaaaatagggcaacaattctcaaccagggtggatattctcccacaggaatatgtggatcaactatcggagttacaggatcaagttcctccatttccttctgagacagctgtaaaaattgttgaagaagagctgggggcatctgtaaatgagatatttgatcgatttgattttgaaccaatagctgctgctagcctcggccaggttcatcgggcacgtctgaatggccaagaggttgtgatcaaagtgcaacggcctggtctgaaggagctgttcgatattgatctgaagaatttaagggtaatagctgaataccttcagaaagtggacccaaaatcagatggcgccaagagagactgggttgctatttatgatgagtgtgcatctgttttatatcaggaaatagactatatgaaggaagcatttaacgctgaaaaatttgctgaaaacttcaaaaaattggattatgtgaaggttcctgaaatttactgggcacacactactcctcaggttttaacaatggagtatgtcccaggaattaaaattaacagaataaagcagttagataagttaggagtcgatagaaaaagattaggtcgttatgctgttgagtcctaccttgagcagatcttatcccatgggtttttccatgctgacccgcatccaggaaacattgctgttgatgatgtcaatggagggagacttatcttctatgacttcgggatgatgggaagtatcagtcaaaatattcgggaaggattgcttgaagtattctatggagtttatgaaaaggatcctgacaaatgcttcaagcaatggttcaaatgggtgtccttgttcctactggagatatgactgctgtcagaagaaccgctcaatttttccttaatagctttcaagagcgcctagcagcacaaaggaaggagagagaaatggcaaccgcagaactgggattcaaaaagcaattaactaaggaggagaagtttgaaaagaggaagcagagacttgctgcaatcggagaggatcttttggcgattgctgctgatcaaccatttcgcttccctgccacatttacatttgtggtcagagcattctcagttctagatggtattgggaaaggccttgatcctaggtttgatattacagagattgctaagccatatgccaaggaattgctaagatttaatgacgctggtgttgaaatagttgtgaaggatgcaaagaagagatgggaaaggcagtcccgtgccttttacaatttgttccgccaacccgatagagttgaaaagctcgcacaaattattgaacgtttggtgaactcaagcttcgtgtcagaacgctggaatcagaaagagcatttcaaagagttgccgctgtacagaaaacaattggatatggagttgctgcaggtagtttgatgaaccttgcaacaatgttgtacttcaattcaatccggggaccagcaaccattgcatactccctctgcgcatttttcgggctgcaagttctgatcgggcttgtcaaggttaagaagttggatcggcaggagagactgataaccggtactgcatgagctatgagttattcacgatcaatcggcaattaaatatatgctcggccaaagtcaatgcacattggcgcataatgagatggtatggataaccaaactgatggatgatgattcaaggtgaaatgatcgatttggaaagtgatttttctatatctttctcacaactttattgctgacccgagtgtttgagattcgaacctagagcatatgatgacgtcgttactcaacatatcatcaacactactctagcctaacattgttgtgaatttaatctacaataactcttcgtcaaattgatatgttcttgaccttgttgaactatactacttgatatgttttatctccttttgctgaatgaaaggagcatagtatgttgttcttgatctgctataaacttatggtttagtggac

SEQ ID NO: 50562 - DNA, 2550 bp, Zea Mays
caaaaaatggtctgtactgcctctgcgtgcctccccgtaataaattctccctcccttcctcctctctactctctcttcgcgcgcctgcgattctctccgctgggatgcaagaagaatctttatcctttctccatttccggcaagcggcaggtgttggtaggcagcccaattcgtgttgtagtctgaagaattcgctggcggtggtgcagcttggcttcctctgcttctttttgacgatcaactgtcagggaacgtaacgtaactacatggtcacaattttgatgctggagcaaggcactcatggaccggacagacacatctggatttgttaccggtggatcagacgatgagtaccggttctgcgggtgtcttcctgcaccgtggaaaccaggctctcatggatgattctgcagtgccaattggcttctcaatgacgagctacacgacaggtaaccagtttcagagtcggataacatttggtatagaccaactgggttcagcagtgaacaatagcagcagccatggccgcagaggtttccagaggtggattcatgcgcctgctcaagatgatgggtgcagactagtcctcgggctgggtccgacgccggacccagacgttaactctcctgatcagcagcctgccggtgccggagcagacaagtcgagaccaccacctgtaactttgtttggccagagcttctccttcgctgatccggggacgctgagccttgggattcatcagggccgtagtacgggagcaaataaacacttgggcgccggaaccatcatctctttttccactgtggacgagggctccacgtctgccaggagtagctccggcggctacatgccatcgctgctctttgctcgtcggccaaactgttcgacagctgaagaggaacagggtttgctagatgacacagacacagacaacagtaacgatggtactgaaccttcggcatccatgacggaggcttcatttggtggcgtgagctctgatgctgtgaccctggtaagcaactctggacagcaggctcaacgccggcaccccaagaagtgcaggttcaaagggtgctccaagggcgcgcgaggcgcgacgggcctgtgcatcgctcacggcggcgggcagaggtgccagaagcccgggtgccacaagggcgccgagagccgcacggcctactgcaaggcccacggcggggggcgccggtgcctgcagctcggctgcaccaagagcgcggaagggaagacggaccactgcatcgcccatggcggcggccagcggtgcggctaccctgactgccctaaagccgcgcgtggcaagtccgggcggtgcatcaagcacggcggcgggaagaggtgctcggtcgagggctgcatcaggagcgccgagggaagggtcgggctgtgcatctctcacggcggcgggcggcggtgccagttcccggactgccgcaggggagcgcagggcagcaccctgtactgcaagtcgcacggcggcgggaagcgctgcgtcttcgaggggtgcggcaagggcgccgaaggcagcacgccgctgtgcaaggcgcacggcggcgggaagcggtgcgtgtatgagggcggcggcgtgtgccccaagagcgtccacggcggcacagacttctgcgtggctcacggcggcgggaagcggtgcgcggtgcctgggtgcagcaagagcgcgcgcgggagcaccgattgctgcaaggctcacggtggcgggaagaggtgcaacttcggcgacggccaatgcgagaagttcgcgcgcggccggagcgggctctgcgcggcgcacgacactctggtggcctcacagcagcgccgcggtggcggcatgatcgggccgggcctcttccacggcatcgttcgctctgccagcgttgcaaacatgaacagcgactactcgtcgtcgggcgtgagcacggtgtccgactgcgacggctcgcctgaggcggcgacgaggaggcaggagctgatccctccccaggtgctggtcccccggtccatgaaatctttgacggcggcaaccgtgcagccaccgaagaggagcagagaaggaagggtagtcaccgtccccgaggggagggtgcacggtggtggcctcctgtcgttgcttggcgggagcttcatgaacgtcgacaagctctgaagcagtcagcgcttggggctcgatttgacgatttctacctctacaacgctttttcttaccttagaaaaaagtgagaaaatgccactttttctattagagctgtcagattattgtctgtgcataaaaatattttctcgtctacagatcgaacttgtatggtgaaatttagggtaattttgtttcccttgtgccatcaagggtgaacacatgaatttgtcatgtcttatgtgttgaatcgttcgtagcatttccgaaagttttttttggatgcgaaagctttactgctgtacttgttgtgaataagattaatgtgtaacaatcaaacttattgctacactgtgctgaattaccataagattgttcccggtgacaatgtaacatgttttttc

SEQ ID NO: 50563 - DNA, 2403 bp, Zea Mays
aaaatggtctgtactgcctctgcgtgcctccccgtaataaattctccctcccttcctcctctctactctctcttcgcgcgcctgcgattctctccgctgggatgcaagtgttgtagtctgaagaattcgctggcggtggtgcagcttggcttcctctgcttctttttgacgatcaactgtcagggaacgtaacgtaactacatggtcacaattttgatgctggagcaaggcactcatggaccggacagacacatctggatttgttaccggtggatcagacgatgagtaccggttctgcgggtgtcttcctgcaccgtggaaaccaggctctcatggatgattctgcagtgccaattggcttctcaatgacgagctacacgacagaggtttccagaggtggattcatgcgcctgctcaagatgatgggtgcagactagtcctcgggctgggtccgacgccggacccagacgttaactctcctgatcagcagcctgccggtgccggagcagacaagtcgagaccaccacctgtaactttgtttggccagagcttctccttcgctgatccggggacgctgagccttgggattcatcagggccgtagtacgggagcaaataaacacttgggcgccggaaccatcatctctttttccactgtggacgagggctccacgtctgccaggagtagctccggcggctacatgccatcgctgctctttgctcgtcggccaaactgttcgacagctgaagaggaacagggtttgctagatgacacagacacagacaacagtaacgatggtactgaaccttcggcatccatgacggaggcttcatttggtggcgtgagctctgatgctgtgaccctggtaagcaactctggacagcaggctcaacgccggcaccccaagaagtgcaggttcaaagggtgctccaagggcgcgcgaggcgcgacgggcctgtgcatcgctcacggcggcgggcagaggtgccagaagcccgggtgccacaagggcgccgagagccgcacggcctactgcaaggcccacggcggggggcgccggtgcctgcagctcggctgcaccaagagcgcggaagggaagacggaccactgcatcgcccatggcggcggccagcggtgcggctaccctgactgccctaaagccgcgcgtggcaagtccgggcggtgcatcaagcacggcggcgggaagaggtgctcggtcgagggctgcatcaggagcgccgagggaagggtcgggctgtgcatctctcacggcggcgggcggcggtgccagttcccggactgccgcaggggagcgcagggcagcaccctgtactgcaagtcgcacggcggcgggaagcgctgcgtcttcgaggggtgcggcaagggcgccgaaggcagcacgccgctgtgcaaggcgcacggcggcgggaagcggtgcgtgtatgagggcggcggcgtgtgccccaagagcgtccacggcggcacagacttctgcgtggctcacggcggcgggaagcggtgcgcggtgcctgggtgcagcaagagcgcgcgcgggagcaccgattgctgcaaggctcacggtggcgggaagaggtgcaacttcggcgacggccaatgcgagaagttcgcgcgcggccggagcgggctctgcgcggcgcacgacactctggtggcctcacagcagcgccgcggtggcggcatgatcgggccgggcctcttccacggcatcgttcgctctgccagcgttgcaaacatgaacagcgactactcgtcgtcgggcgtgagcacggtgtccgactgcgacggctcgcctgaggcggcgacgaggaggcaggagctgatccctccccaggtgctggtcccccggtccatgaaatctttgacggcggcaaccgtgcagccaccgaagaggagcagagaaggaagggtagtcaccgtccccgaggggagggtgcacggtggtggcctcctgtcgttgcttggcgggagcttcatgaacgtcgacaagctctgaagcagtcagcgcttggggctcgatttgacgatttctacctctacaacgctttttcttaccttagaaaaaagtgagaaaatgccactttttctattagagctgtcagattattgtctgtgcataaaaatattttctcgtctacagatcgaacttgtatggtgaaatttagggtaattttgtttcccttgtgccatcaagggtgaacacatgaatttgtcatgtcttatgtgttgaatcgttcgtagcatttccgaaagttttttttggatgcgaaagctttactgctgtacttgttgtgaataagattaatgtgtaacaatcaaacttattgctacactgtgctgaattaccataagattgttcccggtgacaatgtaacatgttttttc

SEQ ID NO: 50564 - DNA, 859 bp, Zea Mays
ggacagtcccgcaccgatccgacggcccggcccacccgaagccgacccaatactccacgagcgcgaatctcagcacctccctatataatagagctcgcgcgggcaccactgccttctcccagctccgcctccctttcctaccttcttccctccgtctcccagctcgcgcaggcaggcgacacagcgacgctaaaaaccctagagcgaggaggcgtgccaggccagcggtttgcgatgacggcaccggcggacaaggggaagaaggccaagaccgatgccgacggcggcgaggagaacgagcaaatcgacggcgcccttgtcttctccatcgagaagctccaggagattcaggacgagctcgagaaggttaatgaggaagcaagtgacaaggttatggaggtggagcagaaatacagtgagattcgcagacctgtctatctcaagaggggtgacattatcaagaccatcccggacttttggctcacagcgtttttgagccatcctctactaagtgagcttctgactgaagaggatcagaagatattcaagtacttggactccattgatgtcgatgattctgatgttaaggcaggatattccatttaccttaacttctctgagaacccgtactttgaagacacaaagcttacaaagacctattcctttgttgatgatggaacaaccacaataaaagcttctcaaattaagtggaaggatggaatgggacctgcaaatggaaatggtattaacaagaagggaaacaagcggccattagtagtggaaagtcatttcaggctcttgaaatcctgtgcctgccaccgcttgtcatctagtcaatcattcagccaatctggataca

SEQ ID NO: 50565 - DNA, 1486 bp, Zea Mays
ggacagtcccgcaccgatccgacggcccggcccacccgaagccgacccaatactccacgagcgcgaatctcagcacctccctatataatagagctcgcgcgggcaccactgccttctcccagctccgcctccctttcctaccttcttccctccgtctcccagctcgcgcaggcaggcgacacagcgacgctaaaaaccctagagcgaggaggcgtgccaggccagcggtttgcgatgacggcaccggcggacaaggggaagaaggccaagaccgatgccgacggcggcgaggagaacgagcaaatcgacggcgcccttgtcttctccatcgagaagctccaggagattcaggacgagctcgagaaggttaatgaggaagcaagtgacaaggttatggaggtggagcagaaatacagtgagattcgcagacctgtctatctcaagaggggtgacattatcaagaccatcccggacttttggctcacagcgtttttgagccatcctctactaagtgagcttctgactgaagaggatcagaagatattcaagtacttggactccattgatgtcgatgattctgatgttaaggcaggatattccatttaccttacttctctgagaacccgtactttgaagacacaaagcttacaaagacctattcctttgttgatgatggaacaaccacaataaaagcttctcaaattaagtggaaggatggaatgggacctgcaaatggaaatggtattaacaagaagggaaacaagcggccattagtagtggaaagttttttctcctggtttagtgatacagagctcaagagtcttgctgatggtgtgcaagatgaggtggcggagatcatcaaggaagacttgtggcctaatcctttgaagtacttcaacaatgaggttgaagatgaatttgaaggagatgaagaagatgatgacgacgacgacgacgatgataatttggatggtgatgacaatgacgatgatggggaccaggagaactgagccctcgcgtttaggcggggaattatgtgacccgtttgggggattttttttggttgtttgacttagctggaactcaacttagggaactgtttagtgccttatgaagtcaaccaacttgaaaggagactgctatatcataatctcggtatatctatcaacgcagtttgacctgtgattcagtttgtttgtgcttcggtcggtcgccttcagatgcatgatgcatggacatgttgtcactgctcaacaactatggccccttgtccgagtgtttccgtttgcatatggacttgtgtcttggcctcttggccgagtgatctagtcgcgagcatccctttccaattccaatgcctgcggagtatttggatagctagggcaggccagtttgatccagcctggggacggtcatcccgtttccgtggaccctgtactgtactgttacgcgcatcgccagatctctatacatccgggatacaaaa

SEQ ID NO: 50566 - DNA, 1469 bp, Zea Mays
ggacagtcccgcaccgatccgacggcccggcccacccgaagccgacccaatactccacgagcgcgaatctcagcacctccctatataatagagctcgcgcgggcaccactgccttctcccagctccgcctccctttcctaccttcttccctccgtctcccagctcgcgcaggcaggcgacacagcgacgctaaaaaccctagagcgaggaggcgtgccaggccagcggtttgcgatgacggcaccggcggacaaggggaagaaggccaagaccgatgccgacggcggcgaggagaacgagcaaatcgacggcgcccttgtcttctccatcgagaagctccaggagattcaggacgagctcgagaaggttaatgaggaagcaagtgacaaggttatggaggtggagcagaaatacagtgagattcgcagacctgtctatctcaagaggggtgacattatcaagaccatcccggacttttggctcacagcgtttttgagccatcctctactaagtgagcttctgactgaagaggatcagaagatattcaagtacttggactccattgatgtcgatgattctgatgttaaggcaggatattccatttaccttaacttctctgagaacccgtactttgaagacacaaagcttacaaagacctattcctttgttgatgatggaacaaccacaataaaagcttctcaaattaagtggaaggatggaatgggacctgcaaatggaaatggtattaacaagaagggaaacaagcggccattagtagtggaaagtgatacagagctcaagagtcttgctgatggtgtgcaagatgaggtggcggagatcatcaaggaagacttgtggcctaatcctttgaagtacttcaacaatgaggttgaagatgaatttgaaggagatgaagaagatgatgacgacgacgacgacgatgataatttggatggtgatgacaatgacgatgatggggaccaggagaactgagccctcgcgtttaggcggggaattatgtgacccgtttgggggattttttttggttgtttgacttagctggaactcaacttagggaactgtttagtgccttatgaagtcaaccaacttgaaaggagactgctatatcataatctcggtatatctatcaacgcagtttgacctgtgattcagtttgtttgtgcttcggtcggtcgccttcagatgcatgatgcatggacatgttgtcactgctcaacaactatggccccttgtccgagtgtttccgtttgcatatggacttgtgtcttggcctcttggccgagtgatctagtcgcgagcatccctttccaattccaatgcctgcggagtatttggatagctagggcaggccagtttgatccagcctggggacggtcatcccgtttccgtggaccctgtactgtactgttacgcgcatcgccagatctctatacatccgggatacaaaa

SEQ ID NO: 50567 - DNA, 2199 bp, Zea Mays
atccccgtgtcctccaggtccaactccacccaaccccaccccgtcccgtgatcgtttgcccgtccctatcgttctctctcccccccttttttcctgcgaccaatccgcgcgcttttgtttttgttcctgctcctcggccctcgcaccgcgcgccgccgacgccgcatccatgaacggtgacggcagcaaggaggacgccaacaggcgcctcgagtgggccaccttgaacatggagcgcgccgtcgtcgtgagcgagacgacgaagggcgacggcaatggcaatgcaggccggaaggcgccgataagcatcgtccggctcttcttggcctgcatggtctccggcggcatccagtacggctgggcgctgcagctctccctcctctcgccctactctcagactcttgggatctcgcacagctacgtgtctctgacatggatctgcgggcctatcgccggatttgtggtgcaacccatcgtgggctactacagcgaccggtgcacctcgaagatgggccggaggaggcccttcatcctcgcgggatgcatcatcatctgcctctctgtgttggtgatcgggttctcggcggacatcgggcggcgcctcggcgacaccaaggagcactgcagtacgttcaccggctcccgctggtccgccgccgccgtctacattgtcggattctggttcctcgacttcgccaacaacacggtccagggaccggctcgcgcgatgatggccgacctggccgctggacagcacggccccaacgttggccaggcgatcttctccctgtggatggccctcggcagcgtgcttggatacttgtccggcgccaacgcgaaatggcacgactggctcccttggctgaaaaccgcggcgtgctgcgatgcctgcgccaacctcaagggcgccttcttgactgcggtggtcctcattataatcagcatgtctgtcaccttgtggctcgccggcgaggagcggctcgacaaggaaagcgtcgacacctccggcggcgcgtgctctgcgttcatggatctcttcaagagcctcaagaacctcccccctgccatgttcagcgtgctcgccgtcacggccgtcacatggtacaacaccgactggatgggccgggagatcttccacggcgagccgcagggctcgggcagcaaggcggacctgtacgaagccggcgtccgcgagggcgccatcggcctcctcttctgctccgtcgcgctcggcgtcacctccttcttcatccccaggctgtgccggaagctcacgtctcgggtcgtctggtccgtcagcagcctgatggtgttcgtcctcatgacggccatggtcgtcctcggcatggtctccatgaagggctacaggccctcgctcgccgcctccctctctggccccgaccactcgttcaagggcggcgccctcgccatcttcgcgctcatcggcatccctcaggccgtgctctacagcgtgccttgggccgtggcgtctgaggttgccaccgaggacggcggtggtcaaggtctcaccattggcgtcctcaacattgcaatcgtccttccacagctggtgatcgcgctgggcgcaggccccatcgacggcgccttcaacaaaggaaacaccccggccttcggcatcggcgccgccttcgcccttatctgcgcggtcctggcgctcatcctcctcccaaagacgagaggcgtctccaacgccaccgtcatggccggcgggcactgatccatctatctccaggcaggcttgtcgcagcggctgaccggctgagagtagatcagaaattcagaatctgcttcttggtttcagccccacccgattaaggaggtgtttggatcatccggagtccaggttttagatgccaattaagactataattataaagctaattgataagccatggttaattcacgagatgattttattaagtctaattagttcataattagcacattttagtatcgcaaaatatgagcaaatcatgtattaatagattcgtctcgcgaattatacaattagttttataattagcatgtgtttagtcgtcctaattggtatccaaactaattggtatccaaaacaccccataaacgaatctacattttagggataaagtaaacactgatttaagcaaggaaggttgggtttggtttctactattaaacatgtggtttctactatttatg

SEQ ID NO: 50568 - DNA, 1845 bp, Zea Mays
tagctttaaggtcttaattaccaagatttatcttcaagggataagatgagaaagttattaatcaccaagagatccgttttcacacgtgcaacccatcgtgggctactacagcgaccggtgcacctcgaagatgggccggaggaggcccttcatcctcgcgggatgcatcatcatctgcctctctgtgttggtgatcgggttctcggcggacatcgggcggcgcctcggcgacaccaaggagcactgcagtacgttcaccggctcccgctggtccgccgccgccgtctacattgtcggattctggttcctcgacttcgccaacaacacggtccagggaccggctcgcgcgatgatggccgacctggccgctggacagcacggccccaacgttggccaggcgatcttctccctgtggatggccctcggcagcgtgcttggatacttgtccggcgccaacgcgaaatggcacgactggctcccttggctgaaaaccgcggcgtgctgcgatgcctgcgccaacctcaagggcgccttcttgactgcggtggtcctcattataatcagcatgtctgtcaccttgtggctcgccggcgaggagcggctcgacaaggaaagcgtcgacacctccggcggcgcgtgctctgcgttcatggatctcttcaagagcctcaagaacctcccccctgccatgttcagcgtgctcgccgtcacggccgtcacatggctctcgtggttccccttcttccagtacaacaccgactggatgggccgggagatcttccacggcgagccgcagggctcgggcagcaaggcggacctgtacgaagccggcgtccgcgagggcgccatcggcctcctcttctgctccgtcgcgctcggcgtcacctccttcttcatccccaggctgtgccggaagctcacgtctcgggtcgtctggtccgtcagcagcctgatggtgttcgtcctcatgacggccatggtcgtcctcggcatggtctccatgaagggctacaggccctcgctcgccgcctccctctctggccccgaccactcgttcaagggcggcgccctcgccatcttcgcgctcatcggcatccctcaggccgtgctctacagcgtgccttgggccgtggcgtctgaggttgccaccgaggacggcggtggtcaaggtctcaccattggcgtcctcaacattgcaatcgtccttccacagctggtgatcgcgctgggcgcaggccccatcgacggcgccttcaacaaaggaaacaccccggccttcggcatcggcgccgccttcgcccttatctgcgcggtcctggcgctcatcctcctcccaaagacgagaggcgtctccaacgccaccgtcatggccggcgggcactgatccatctatctccaggcaggcttgtcgcagcggctgaccggctgagagtagatcagaaattcagaatctgcttcttggtttcagccccacccgattaaggaggtgtttggatcatccggagtccaggttttagatgccaattaagactataattataaagctaattgataagccatggttaattcacgagatgattttattaagtctaattagttcataattagcacattttagtatcgcaaaatatgagcaaatcatgtattaatagattcgtctcgcgaattatacaattagttttataattagcatgtgtttagtcgtcctaattggtatccaaactaattggtatccaaaacaccccataaacgaatctacattttagggataaagtaaacactgatttaagcaaggaaggttgggtttggtttctactattaaacatgtggtttctactatttatg

SEQ ID NO: 50569 - DNA, 1050 bp, Zea Mays
cgcacggttccgtcacttggcgcacgataaaaagccgcgagacgaacgcgaacgaagtgcgggaaatagtttctctctctcttcttcttgtaagatatttcggagtaggaagtgcgtgccttcctcgcagctcattcgccgagtatgctcacagagaatgtgtgcaacgatggtgcaatgagaaaggggatacaatctgtgaaatctgccatgagttgtacaagcctggttacactgccccaacccaggtgcatcatgatgaaactaccatagagataagtggtggagattggaccatctctggcaaccgtttggatttacatgatcctagaatattggcaatggctgctgctcaacaccgtctacttgaagacgactatgatgaatatactgcaacaaacaacaacgctgctgcattttgccgctctatatttctgattttgatggcccttttgctcctgaggcatacactgaccattactaacagcgatgatgaagatgatgcatctgctattttctcgctatttcttttgagagcggctggatttttgctgccatgctatattatggcttgggctattagtatcatgcagcgtcaaagacaaagacaggaagaagcaatgctattaccaacggaagtggcgatcattctgcatcggaacggaagaacaatgcaatttgcggtggcaccaccagaaacccctatctcacctcaccccgagctaaaccaatagaatacatcatcgacagggtcacagtcctcgcctcgggagtgcataacaggtggaaactcgaggacattgtgcaaagcatgtgttgcatcggccacctcgaacggccatgttgcagcaaaaatgttgtgccttcgaattgagttaactttctagcttcagattcaatgcttgttttatggcctctcagcatcttctgtacataaagagatttctctaataaatgaatataagttaaatcaacacaaatttcgattttgaacagtggcacctcagaaaaacatcgctgtatttctaacccttcttactttgagcattt

SEQ ID NO: 50570 - DNA, 1051 bp, Zea Mays
gtgcgggaaatagtttctctctctcttcttcttgtaagatatttcggagtaggaagtgcgtgccttcctcgcagctcattcgccgaggaggaggacctcaggaagaacctcgagagcccctgcgcttgcaacggcagcctcaagtatgctcacagagaatgtgtgcaacgatggtgcaatgagaaaggggatacaatctgtgaaatctgccatgagttgtacaagcctggttacactgccccaacccaggtgcatcatgatgaaactaccatagagataagtggtggagattggaccatctctggcaaccgtttggatttacatgatcctagaatattggcaatggctgctgctcaacaccgtctacttgaagacgactatgatgaatatactgcaacaaacaacaacgctgctgcattttgccgctctatatttctgattttgatggcccttttgctcctgaggcatacactgaccattactaacagcgatgatgaagatgatgcatctgctattttctcgctatttcttttgagagcggctggatttttgctgccatgctatattatggcttgggctattagtatcatgcagcgtcaaagacaaagacaggaagaagcaatgctattaccaacggaagtggcgatcattctgcatcggaacggaagaacaatgcaatttgcggtggcaccaccagaaacccctatctcacctcaccccgagctaaaccaatagaatacatcatcgacagggtcacagtcctcgcctcgggagtgcataacaggtggaaactcgaggacattgtgcaaagcatgtgttgcatcggccacctcgaacggccatgttgcagcaaaaatgttgtgccttcgaattgagttaactttctagcttcagattcaatgcttgttttatggcctctcagcatcttctgtacataaagagatttctctaataaatgaatataagttaaatcaacacaaatttcgattttgaacagtggcacctcagaaaaacatcgctgtatttctaacccttcttactttgagcattt

SEQ ID NO: 50571 - DNA, 1052 bp, Zea Mays
gtgcgggaaatagtttctctctctcttcttcttgtaagatatttcggagtaggaagtgcgtgccttcctcgcagctcattcgccgagggaggaggacctcaggaagaacctcgagagcccctgcgcttgcaacggcagcctcaagtatgctcacagagaatgtgtgcaacgatggtgcaatgagaaaggggatacaatctgtgaaatctgccatgagttgtacaagcctggttacactgccccaacccaggtgcatcatgatgaaactaccatagagataagtggtggagattggaccatctctggcaaccgtttggatttacatgatcctagaatattggcaatggctgctgctcaacaccgtctacttgaagacgactatgatgaatatactgcaacaaacaacaacgctgctgcattttgccgctctatatttctgattttgatggcccttttgctcctgaggcatacactgaccattactaacagcgatgatgaagatgatgcatctgctattttctcgctatttcttttgagagcggctggatttttgctgccatgctatattatggcttgggctattagtatcatgcagcgtcaaagacaaagacaggaagaagcaatgctattaccaacggaagtggcgatcattctgcatcggaacggaagaacaatgcaatttgcggtggcaccaccagaaacccctatctcacctcaccccgagctaaaccaatagaatacatcatcgacagggtcacagtcctcgcctcgggagtgcataacaggtggaaactcgaggacattgtgcaaagcatgtgttgcatcggccacctcgaacggccatgttgcagcaaaaatgttgtgccttcgaattgagttaactttctagcttcagattcaatgcttgttttatggcctctcagcatcttctgtacataaagagatttctctaataaatgaatataagttaaatcaacacaaatttcgattttgaacagtggcacctcagaaaaacatcgctgtatttctaacccttcttactttgagcattt

SEQ ID NO: 50572 - DNA, 1444 bp, Zea Mays
gtgcgggaaatagtttctctctctcttcttcttgtaagatatttcggagtaggaagtgcgtgccttcctcgcagctcattcgccgaggtaacatcccctgcccttcctcacatttcctccctgttcgtccgtaatagtcgtttccgaaccttgcgtttcgtgggatttgtcgaggcgagggcttcgatttgacccaggaatcgcccaaatccgcttgtcttcgacttcagttcatccccacgaatttctagggttttagtgtcgattttgtcccccttcattacatttgattggcggtgaattgggccccgttttgatgattccttgggttcgttggacggcaggaaacgagatcctctagaggtttgtgctgtttagcgtgagtttttttggggccgatttgctttgctcgcatgggggatcatgtcgcggtggatgttggggagctcgtagcgtcccgagtcggtgaggcagcggggctagtgtccggcgccaaggaggaaacagaggcgctgattgggatggtggagtgccgcatttgccaggaggaggacctcaggaagaacctcgagagcccctgcgcttgcaacggcagcctcaagtatgctcacagagaatgtgtgcaacgatggtgcaatgagaaaggggatacaatctgtgaaatctgccatgagtggtggagattggaccatctctggcaaccgtttggatttacatgatcctagaatattggcaatggctgctgctcaacaccgtctacttgaagacgactatgatgaatatactgcaacaaacaacaacgctgctgcattttgccgctctatatttctgattttgatggcccttttgctcctgaggcatacactgaccattactaacagcgatgatgaagatgatgcatctgctattttctcgctatttcttttgagagcggctggatttttgctgccatgctatattatggcttgggctattagtatcatgcagcgtcaaagacaaagacaggaagaagcaatgctattaccaacggaagtggcgatcattctgcatcggaacggaagaacaatgcaatttgcggtggcaccaccagaaacccctatctcacctcaccccgagctaaaccaatagaatacatcatcgacagggtcacagtcctcgcctcgggagtgcataacaggtggaaactcgaggacattgtgcaaagcatgtgttgcatcggccacctcgaacggccatgttgcagcaaaaatgttgtgccttcgaattgagttaactttctagcttcagattcaatgcttgttttatggcctctcagcatcttctgtacataaagagatttctctaataaatgaatataagttaaatcaacacaaatttcgattttgaacagtggcacctcagaaaaacatcgctgtatttctaacccttcttactttgagcattt

SEQ ID NO: 50573 - DNA, 1417 bp, Zea Mays
gtgcgggaaatagtttctctctctcttcttcttgtaagatatttcggagtaggaagtgcgtgccttcctcgcagctcattcgccgaggtaacatcccctgcccttcctcacatttcctccctgttcgtccgtaatagtcgtttccgaaccttgcgtttcgtgggatttgtcgaggcgagggcttcgatttgacccaggaatcgcccaaatccgcttgtcttcgacttcagttcatccccacgaatttctagggaaacgagatcctctagaggtttgtgctgtttagcgtgagtttttttggggccgatttgctttgctcgcatgggggatcatgtcgcggtggatgttggggagctcgtagcgtcccgagtcggtgaggcagcggggctagtgtccggcgccaaggaggaaacagaggcgctgattgggatggtggagtgccgcatttgccaggaggaggacctcaggaagaacctcgagagcccctgcgcttgcaacggcagcctcaagtatgctcacagagaatgtgtgcaacgatggtgcaatgagaaaggggatacaatctgtgaaatctgccatgagttgtacaagcctggttacactgccccaacccaggtgcatcatgatgaaactaccatagagataagtggtggagattggaccatctctggcaaccgtttggatttacatgatcctagaatattggcaatggctgctgctcaacaccgtctacttgaagacgactatgatgaatatactgcaacaaacaacaacgctgctgcattttgccgctctatatttctgattttgatggcccttttgctcctgaggcatacactgaccattactaacagcgatgatgaagatgatgcatctgctattttctcgctatttcttttgagagcggctggatttttgctgccatgctatattatggcttgggctattagtatcatgcagcgtcaaagacaaagacaggaagaagcaatgctattaccaacggaagtggcgatcattctgcatcggaacggaagaacaatgcaatttgcggtggcaccaccagaaacccctatctcacctcaccccgagctaaaccaatagaatacatcatcgacagggtcacagtcctcgcctcgggagtgcataacaggtggaaactcgaggacattgtgcaaagcatgtgttgcatcggccacctcgaacggccatgttgcagcaaaaatgttgtgccttcgaattgagttaactttctagcttcagattcaatgcttgttttatggcctctcagcatcttctgtacataaagagatttctctaataaatgaatataagttaaatcaacacaaatttcgattttgaacagtggcacctcagaaaaacatcgctgtatttctaacccttcttactttgagcattt

SEQ ID NO: 50574 - DNA, 3617 bp, Zea Mays
cacagatacaaaatactaactatacagatcaagaatagtgcgaacgttgagattgcagagttagcgaagtagtgcttagagatgagtggtgtgaataggccaacgatgaaggatgttaccgataggcctgataatttgaggaagattatgcagcatccctcaggacatgagaaccctaaagaataagagagccgtatatagccaatggaaatttctgttgaattaatgtgagcctgagtcatattaatattcaataatagtcaatactagaagcttattttaatgctacggtgtactagtactttagtaccataccggaagttgaagtaacaattcacccaacttaaataggtggatcattggtgcatctatcgagaagctgagaaaatgatgaaggactaccacacgcgcgcgctcacagctgggccgtggtagatcaaaccttggtccgaatattcctccctaacggttgcacattttgcctagagtgatgaccgtccattactgctactaatggtagctctaatggcggtcgtactgtccgttggtctccctctgcacgtgtatatatacgaggaggggagagtgcttcttgttacgactgttcgtgggactgcactgcttacatctgcctacgtcgactgcgtacgagtacatcgaacatacacacgtgatgtctcgtgtgaatgaagccactgatgccttgagcttcggtccctccgcagggtacaatctattctttgtatttgtgcatattttattgttaattactgcttatatgagtagtgatacacatatgcacatacatgacgtcacatacatcactgtgattttctacattaaattaaaactaaaaatgcctatttcttcaacactttgctattatgcatttgcatatacagcattttgatacataagttttattgttacgtatataaatataacattttttaataaaaagatggtatgcataatagttcgtttatagtgcttcggttatcttagttctaaggaacctattgtgtttagaacaattgttcttgacttggagattttgaatacaacatattccttgtattatcatttattttattggttggcaaagtgaattatttctcgtattatgagtttcttagttagatgatgagaccttgtcacagttgtgttgcgagaatggactatgccgccgcagatgaaccctgggatgattcgctggtgctgccgcgtgccgctcgcctgaatttgctgcggaaaccagatcccgtatcaccgactcaccgtatgtgtcggtccgcgcccagcctctgcaattctcaatcatccctagctgggctaccactgcactacgcaattaccgctaccaccgtcaggtcaggtgaacgaaaactctcaggttcgtagccatctcgggttgagctgatgctttgtggacttgttgcttaaatttagcccaccacacgaaaacatggcccatgaaacgctccacaaatggctcaatatgcgtatagacagaactgaggttcctgcacgagcccatgcggtcatgcggcacagtatcactacgcgtctacgcctccgccacagtcgctagcaatacgagtaccaaacagcccagagagcaaggactagctgatgatataaagattactctgaacgcaacgacatgtagcaagctgtgacgaaaagcagtagcactggtgggtccggtgctttcttctgaacctttgaagacataagcgtatctgagcttgtccctttttttttcttactgaatttcaaagttgattcagcgaatttcagtgaattcttccgatacgcttatctgttgcaagctctgtctaatcataaaagacatactctattcatcagcattattgaatgagattaaagcatactcaagattttttattgattgtttccgttctctatataatattttttttaatttgactaactgatgttattgtttactccattcaatatgtcttgttaaacacggccaatgaagtgatcgattagaagagagttcacaacgactgattgaacaaacagagattatagaatgacataatttcacggtacagagactaaataagagaaattttgtgagctcaagattctaaaataagtcacatgaactcaaacttataaaaaagatagataaaaatatggagtgacaactaaagtcaggcatcaataaaaactgaacgcgctccatataaattatggtacatcgtagcaattactaacgtttaaaaccaataaataacctttccttttactgttagtgtgacaaatcattgttgctccgtccaattcagcaacctcaaacaccatggagtccattgcaccaatgtggtctcaaaaacgacataatggttgcaagaaccaagaacatcgtgtcgtgcttgggttgtagccttgtccggtagtgctggccggacccgacacgagtatattttttattttacaaaaaacgtatatatatatatatatatatatatatatatatatatatatatatatacacacaatttatatttaataataaaaacatctgagcatgatgttctaatgcttagatagcttcactcagtgtcttccgcccttcttccatcaatgtgtgggttcgaaccccacctcctcactacttttttaacattttacactgatttaaccaaatgacctgatacagtcagcaggccggcacgccatgcctaggccagagttgtggcccgtgggcgtcaggaccgtgccgaaccgctgtttagccatctatatatggagttgtgttttgtaacgtggaggttggttgcgcagagcagacagacgtgcagcgtattaatttgaaatagatgtgagggattatctgtaaaaatatgacgcagaacgaccgttgaaactgatgctttaatatagtatagatatataggttaaaatgggtacgtaagaaattaagaatgttattgattaaattaaaatattttttaaaataccacaacagagccggctgatacgtgtggtgccatacccgcccacgcccgctcgggacgaagcgcttcacaaagccacaacggcctccccctctccgtttcttaagtgcccgtgcgttgctatgatttctatatagcaaagaatttaattacaactgtttatatggtcttaacctacatcatttaacaaccaatcatcacagccctgctttgaaacgtagagcacaactgaaccaaataagtatgacgaaaaattgtgttacatatatagatatctcattgttttgtttgcattcaacaataattctgaaaaacgaaatatatttctaaaatttgatagtatatcaatacgatattcatcaatatctaattctttagcaatagttgttgtcataaaacagatattattattgcagggttaccattaattcactaaatcacaattgctgctcagatctttggggccacctgctgcaacgtgacagaagtaaaatgttgccactacagtactacactgcagcacagttgagaatttgcctcaaacaaaacaaaaaaatctttttttctcaaaccaaacaaaaatggccgcatttactgtacaagacataaaaaccttgagcattg

SEQ ID NO: 50575 - DNA, 1521 bp, Zea Mays
gatgaactgatcatttttaggtgatagtatggttttggaaggatcacaaatcaacaatataactaagaggcgatctattagaaaatcccagtaaagttgaaagaaaaaagaatatgaaaaaaaggcatgacaaacaaaagtttgacacatggaagttgccccaacaagtgacaacgcatctcaaaagcaaatgtcaaattggaagtcataacaagttcatcattaacttaaagaaaattcaaacagaggtgactggataaaaagggtccatggttctatgacttcaatcatgaactcaacaattagtatttatagacaggtaatttatattccagtaagtaagaattactgagtagtgagcacacagtgttgagtaagtttattgatttcctgtcaattcagatctttattgtttgcctcagaaagaaacatggaaagcaatgctcattctattcaaaatgcagagacaataattcagattacgtaaaagataagtaaatcattttcgcagaaaagagtacaaaacattctggacaatagatctagatgtcaacatcaaccatcatttttggaagtacaggttatggcaaaaaagaactcaccagcggctgcatacgctttttccaattgggtttctatagggatttggcgtttgcattgaaaaggcagtaaaccacaagatatatcgtgacaaaaagtctagaagagaatccaaagttgatgcgataatagcaagtgaaccactccttactaaagcatacacttttgcagcaaagagaaccatatttgcaatattagacaaccatatggctaatggttcactcctgataactttttcgtgttcttcctgcaggtcaataaagtggccagatatctattgatgtcgtcactattaaaaagaagaaaaaatatagtgaagaaaatttgattattaacatccacataagttaccttccctaatgttcaaacagaaagtccatatataacataccttggacattacaggtaggaaagcatgatctgtaaatgcgcccatctcactaaaaccctctaacatctctacctgttgtttgtagtactcagcggcaacattcacacgaccttgagctatcaatagaaccatgaatggtacattaagaaggaagatatgtgaaaaaagactcatccaaataagaaagtaaaaggactttaaatagtatgactattaacattatcttgaacatataactcatttgtttttataaagtcacacttccaaattcactaattaggtgcacgcgcgttgctacggtatcttatatcacataggtagacattgatatagagataattaaagagacatgacatataattcatagatagaaggttgtcgtctaaccagatatatagagataattaaagagacatgcagatagcacacatagaaaccatcacatagaaattagtacatgcaaaaactccagttttcagaaatttaatagtacagaaaattaaccgaacaagatagttcatctagttttt

SEQ ID NO: 50576 - DNA, 1458 bp, Zea Mays
ccttaatcttctaatcattatcatcttataatccttatctgcatgcctatgctgttgcccggcgcctgtagtggcgaccggtcataacagaccaacctgcaacagcaccatgcaagtcagataacaagaccaaatagcaagaaaatcccaataatcatagcggatacaagcgattattacatcgttcttcttggagttgtatccttgttggaaaacatgctatgaagttgctgaagtggcaaaaattgttgtgtcctttatttcagttctgaatttttcctagcagctacattataaaatcgattagtatatacaagccttataaatcgattagtacatacaaacattataaatcgattagtacatatagtttttttattgtgtttgttaatcatagagagatcgacccagtctgtagaatcaaattaggtacgctcgtggtcctgcattaggcatgacagtaggaattagataagtgggagtgatcaaagcttctaaataagctagcattcatgttgtttggtccaatagagtgagtagtaccttggatatcaagggcttgttgggtgcaattcctctgtcttctccgtgcatgactgcaaacaaaatggtttaagatgtcgtagacttgagccaaagcctgtgccaaacgcccaaatatgaatctgccctccaaaaaataaaggaaaaaacaatcgacttctaatgttatatgccgaaccattgaacctcttctgttctgggtcagggaaggcttatccatttgtttataggtgagcccatcatgctgccgcaggacacagatgcttctgatctagtggactgacatggcggcataaattttgaccactccattaaacataattccacggctgaaagcacgacaccgcatcgtgaccaaaaaataagcatccctttacaattgctgaagtagaaccactaacattgatcattggttagtctatttaaatcattttgtctacatattcaagccagatgttggaatgaaactttgatatatgttttgaataattggtacttttatttatacactaaatagtttcaagatatactaaaggtatgctttgttatgttttgtatctgctatttatattctacaagtacaactatatgctattataatggcaaatattagaccaaaggttgttaaaaaaacttgcctttagtgtgttacgctttgttgctgcttgtcattgatatagcaccttgttacagatgatggttcatttcattcgctttaacctgcagctaaccataacttcctgtctgccttcaaaacgcgatggacgactactcggctagccaggtgagtcttgatccaagagtaaaagcaaacctggtttagggaacccaatcatttgctatcaacaatgagtatggtatcctttgtcgaagcagctgaccgcgccaaaggagaagagcatggcggtccttaag

SEQ ID NO: 50577 - DNA, 2872 bp, Zea Mays
ggcatgtttgctagtcattagtaataaaacatcaatgcatcttatttacatgttctcaaatcaaaatttacatgttggtgactaggaatccttaacacaccagttagccttttcacagaagttaattaggagatccaacagagaacagtgtgtcttacgaacttgaattctactgctgtatgttatctggaactcatattgcatcacgaaaacaatatgtcagcagatgctttatccagtaaatgttaggaattctttttgccacttcagttgtgtcacatgacactggattgtcagaattctagtgctgttgcagaacatcccatgaactccgaagtaccaggccgcaggccgtatagtttacatgccagaagctgccctcaaatataccagtcgtcttctacaaccttgcaaaaaaaaaaagaacgtagaataaaactgtgtatgccaatccagccggttgattgtgctctaaaatatacgtagcagtgaaattaagttggaacaggtccaagctctactaacatcaaaggttgtcgtagaatagatactgaacactctgaacacgtaacggtagaagaaccagcattgactaattgactaaaaggcactcggcacccttcaaatcataaaatcaggagatcatttacttatactgacatgttcttgtaagaattagcactcgccttgttatgacttcatgaagtctgcttgcaacatcctaacacaacagtacccgctgtaatatcgtaccgtactgcttgtttatccagaaagtaaacgaaggcgcattaaaatagcctccacgttgcaaaattggacatgtcagattgcaatttctagttctagtaataaatattgttccctcttagttttgtactctttccattccaatttataagatgttttggcttttctagacattaatttttgccatgcacttagatatataccatgtctagatgcgtagtaaaatcaatgtatctagaaaacccaaagcacctcataatacctaaaacatcttataatttggtatgaatgaagtacctaagagctgctgtgtgtaattgtgtatcatgctgcaagattccaactaaacgtcatgtcttaccaacatataccagttaaaatctgtgccaatgtgttcattgataacataacctgtttcttcatagttttggcaaagggaggcagcaagcttgagacaacaactgcacaacttgcaagaaaattatcggcagttgacgggagatgatctttctgggctgaatgtcaaagaactgcagtccctggagaatcaattggaaacaagcctgcgtggtgtccgcgcaaagaaggaccatctcttgatagatgagattcacgatttgaatcgaaaggcaagtttatttcaccaagaaaatacagacttgtacaataagatcaacctgattcgccaagaaaatgatgagttacataaaaagatatatgagactgaaggaccaagtggagttaatcgggagtcaccgactccattcaactttgcagtagtagaaaccagagatgttcctgtgcaacttgaactcagcacactgccacagcaaaataacattgagccatctactgctcctaagctaggattgcaattaattccatgaagaagagtaaaactgccgtcttatgatgctgaaggaaactatttattgtgaagagatgatactcagagaaagacatatttgtggcagggagatttgagatatgaacttataaatgtaatgcaaataattttcagaccggaatggggtcgtggaattcagaggatgattgctttctagttgcatttgatgtttgatgagacttttctcatgtgaaacgtttattaaaacttcaaaatggtgcagatgttgctactacacttgttaggcttgtataaatatctgaccatgtgtactagcattacgaaaacagaaaagaagacagacagccctgtcgaacatcttgacgtgtttctaaaaggtttgataggggacaatgatgcgatctaggagtacaaacagagtctagtttccactcagttgagttttatattgctctcaagcgttatcaagggtttagtaggatacagatataatatgaagatgcagttagatgtattggtcatttgttgggccatatgggaaagccaaagcacagcctgattcgacaggaaaaataatattatacccatgtaaaatactctcaagcctgtgtttatttgaagtattaggcaggtttatacaaatcagggctaaaggaagctaccgtcgaaagggctgggcgtcattccacaggcagccatcaggatcgtgacattgcaggtgcaggtgcatgagacattgaatctgatcaagtgctaggaagcaagctactgtgttcaggtccagcacggaagtggaatacaaagttctaaccaatgccatcgccaagatcatgtgggtacagaaattgtttactgagttgggcatacaacatccacagatggctcatccagtaagcgataacctgggggctaagtatttgttgtcaaatcctatcttccatgatcagcctaaacatattgagaaagaatttcatttcgttcatgaaagggtggcacaaaagttgttggatatgtcttgattagttcagaggatcagatagaggatgcattcaccaaagagtgtctactcggcagttggaaacttcaggcacaatctcaacttaccggcattgtggagttgctagggttgcgtgtgtgtttgttgtaaactgaaccagcctatacttttgcataaagatgcaaggtctggcagttctagtctagattgagttcgttagagttgtgtacacttcgtggttaagccatagagatgat

SEQ ID NO: 50578 - DNA, 1720 bp, Zea Mays
gccatctctacccacggtgcatctgcggcggcggtgcggccctgcctccccatgttcgcatggtcacgcccacggccgcaccaaccaccagccccgatttcctcctcaatcacacccccaaaccaaaacccaaacagcacttctcctgcaatcgccgacgtcgacggaggcttcgccggccggagcagcgccgacggttgttttgcccctccctcgtccggcccagcagcccaggcgagcatgccttcgattgcgccaccgtcttcctccgtcgctgccctcacccgccaaccggtgcaattcttcaaagggtgcagtgtatccaaggagacaaagggaccggtccgcagtttcttcactgcaaattcaaagagcaccacggtgaaatcagcggacttgaaagtagcatcatccttcaaaaatgatggtggttatccagctggcggtgtctcttggaaggacgacactctattgccaaaaagcacaaccattcgtggccaggaccatccggttgctgaccctgtactcccaatggattccatgattacgccagaaatcctctctgctaatgtggaacgtgttatagacatgtttgcagacgatgacactgatactgaacttgatttggatagcccgacagaggacttcacatcaattgcagaagccattgaggacatacagcaaggaaaacttgtgattgttgttgatgatgaatcaagggaaaatgaaggagatctgataatggctgcctccttggttaccccagaggctatggcttttatagtaaggcatgagacaggaattgtttgtgtcagcatgaaagaagatgatctggaaagactgagccttcctttgatggttaccacaaaagaaaatgagaagctatgcactgctttcactgttacagtggatgcaaaagagggcacaactactggggtatctgccaaggacagggcaaaaacagtcatgactcttgcatctcctgactctaagcctgaggacctcaaccgccctggtcatattttccctttgaaatacagagaagggggtgttcttaaacgggctggacacaccgaggcatctgttgaccttgccatgttggctggattacctcctgttgctgtcctttgtgaaattgtggatgatgcagatggttctatggctcgcctaccaaagttgcatgtctttgctgaaaaggagaacttaaagattatatctattgctgacttgattaggtataggaggaaaagagacaggctaattgaacgcgcttctgttgcacgcttgcctttgaaatggggcaatgtccatgcctattgctacaaatctgttattgatggcattgagcatattggcatgatgaaaggtgatattggtgacagccaagacattttggtgagggtgcactctgagtgcctcacaggcgacatttttggatccgcaagatgtgattgtggcgaccaacttgcgatggcaatggagatgattgagaaggctggaaggggcgtattagtctatctccgtggacatgaaggaaggggtattggtctgggccacaagcttcgtgcttataacttacaggatgatgggcgtgatactgtggaagctaatgaggaacttggtcttcctgtggactcacaggaatacgggattggcgcacagttgctcttgcggtagttcccccaactgtcaccatgcagtacgaggagggtaagactgt

SEQ ID NO: 50579 - DNA, 2585 bp, Zea Mays
gccctgcctccccatgttcgcatggtcacgcccacggccgcaccaaccaccagccccgatttcctcctcaatcacacccccaaaccaaaacccaaacagcacttctcctgcaatcgccgacgtcgacggaggcttcgccggccggagcagcgccgacggttgttttgcccctccctcgtccggcccagcagcccaggcgagcatgccttcgattgcgccaccgtcttcctccgtcgctgccctcacccgccaaccggtgcaattcttcaaagggtgcagtgtatccaaggagacaaagggaccggtccgcagtttcttcactgcaaattcaaagagcaccacggtgaaatcagcggacttgaaagtagcatcatccttcaaaaatgatggtggttatccagctggcggtgtctcttggaaggacgacactctattgccaaaaagcacaaccattcgtggccaggaccatccggttgctgaccctgtactcccaatggattccatgattacgccagaaatcctctctgctaatgtggaacgtgttatagacatgtttgcagacgatgacactgatactgaacttgatttggatagcccgacagaggacttcacatcaattgcagaagccattgaggacatacagcaaggaaaacttgtgattgttgttgatgatgaatcaagggaaaatgaaggagatctgataatggctgcctccttggttaccccagaggctatggcttttatagtaaggcatgagacaggaattgtttgtgtcagcatgaaagaagatgatctggaaagactgagccttcctttgatggttaccacaaaagaaaatgagaagctatgcactgctttcactgttacagtggatgcaaaagagggcacaactactggggtatctgccaaggacagggcaaaaacagtcatgactcttgcatctcctgactctaagcctgaggacctcaaccgccctggtcatattttccctttgaaatacagagaagggggtgttcttaaacgggctggacacaccgaggcatctgttgaccttgccatgttggctggattacctcctgttgctgtcctttgtgaaattgtggatgatgcagatggttctatggctcgcctaccaaagttgcatgtctttgctgaaaaggagaacttaaagattatatctattgctgacttgattagatgagttgaattaccaaaacttcagcttctggtacctgacatgttgctactaagacagtagtcagcatctagctagcatttcaattaccattgaacagttttctcttcgattatttcataattatgctgaaacagtgtttgctggtaaaaagaaagaaaaaagaagctgaaagtgttttcaggcagatgcctacattttttttctctctatcctagttgtaacatatgattgaaagtgatgtacttaatattgttgcaagaatcatattaatacctatggctggttatgtacacgcctcttcggtgttcttatgtgctgttgctggtgatccttgagatattgactgctatgctaacaaattttatctgttgcaggtataggaggaaaagagacaggctaattgaacgcgcttctgttgcacgcttgcctttgaaatggggcaatgtccatgcctattgctacaaatctgttattgatggcattgagcatattggcatgatgaaaggtgatattggtgacagccaagacattttggtgagggtgcactctgagtgcctcacaggcgacatttttggatccgcaagatgtgattgtggcgaccaacttgcgatggcaatggagatgattgagaaggctggaaggggcgtattagtctatctccgtggacatgaaggaaggggtattggtctgggccacaagcttcgtgcttataacttacaggatgatgggcgtgatactgtggaagctaatgaggaacttggtcttcctgtggactcacaggaatacgggattggcgcacagatattgcgggatctaggagtccgttcaatgaagctgatgactaataaccctgcgaaatatagtggtattaagggctacggattgagcattgcgggcagggtgcccttgattacgccaattaccagtgagaaccgtaagtacctagagactaaaagaacaaagatgggacatgtatatggattggccaatgcgcaggccaaccaagcaaataaatggcagccagagcacagaagagaatcattaggcccccaagcatgtttccattattattccagcaatccagcttcgtggcacaaaagagtgatatgattcttcgtttggggagttcctgaaatcttctccccctatatttccgtagattctttcgcaaaaaagccgatatttcggtagatcgatttcttcaattgtaacggtaggttttaaggtggctaatctctactacttattaagttagcaatagtagcctgcctttttgtgttctgccgtgtagtctctgacaggtagggcccgcttgctcctgcgtgtatgctcccggtttattccgtaacacattttttttacaaaaaatagaactactgcacatgtc

SEQ ID NO: 50580 - DNA, 2147 bp, Zea Mays
gccctgcctccccatgttcgcatggtcacgcccacggccgcaccaaccaccagccccgatttcctcctcaatcacacccccaaaccaaaacccaaacagcacttctcctgcaatcgccgacgtcgacggaggcttcgccggccggagcagcgccgacggttgttttgcccctccctcgtccggcccagcagcccaggcgagcatgccttcgattgcgccaccgtcttcctccgtcgctgccctcacccgccaaccggtgcaattcttcaaagggtgcagtgtatccaaggagacaaagggaccggtccgcagtttcttcactgcaaattcaaagagcaccacggtgaaatcagcggacttgaaagtagcatcatccttcaaaaatgatggtggttatccagctggcggtgtctcttggaaggacgacactctattgccaaaaagcacaaccattcgtggccaggaccatccggttgctgaccctgtactcccaatggattccatgattacgccagaaatcctctctgctaatgtggaacgtgttatagacatgtttgcagacgatgacactgatactgaacttgatttggatagcccgacagaggacttcacatcaattgcagaagccattgaggacatacagcaaggaaaacttgtgattgttgttgatgatgaatcaagggaaaatgaaggagatctgataatggctgcctccttggttaccccagaggctatggcttttatagtaaggcatgagacaggaattgtttgtgtcagcatgaaagaagatgatctggaaagactgagccttcctttgatggttaccacaaaagaaaatgagaagctatgcactgctttcactgttacagtggatgcaaaagagggcacaactactggggtatctgccaaggacagggcaaaaacagtcatgactcttgcatctcctgactctaagcctgaggacctcaaccgccctggtataggaggaaaagagacaggctaattgaacgcgcttctgttgcacgcttgcctttgaaatggggcaatgtccatgcctattgctacaaatctgttattgatggcattgagcatattggcatgatgaaaggtgatattggtgacagccaagacattttggtgagggtgcactctgagtgcctcacaggcgacatttttggatccgcaagatgtgattgtggcgaccaacttgcgatggcaatggagatgattgagaaggctggaaggggcgtattagtctatctccgtggacatgaaggaaggggtattggtctgggccacaagcttcgtgcttataacttacaggatgatgggcgtgatactgtggaagctaatgaggaacttggtcttcctgtggactcacaggaatacgggattggcgcacaggaaagttgtatcatatatctttctagagcttcaacatgaatttacttggaggcactgaagaatttcatgcctgttgcagcctgaaactgtgatgtacatagaatgaagtaaccctatcatgcagtgagtaggccactgacatttcagtactctgcagatattgcgggatctaggagtccgttcaatgaagctgatgactaataaccctgcgaaatatagtggtattaagggctacggattgagcattgcgggcagggtgcccttgattacgccaattaccagtgagaaccgtaagtacctagagactaaaagaacaaagatgggacatgtatatggattggccaatgcgcaggccaaccaagcaaataaatggcagccagagcacagaagagaatcattaggcccccaagcatgtttccattattattccagcaatccagcttcgtggcacaaaagagtgatatgattcttcgtttggggagttcctgaaatcttctccccctatatttccgtagattctttcgcaaaaaagccgatatttcggtagatcgatttcttcaattgtaacggtaggttttaaggtggctaatctctactacttattaagttagcaatagtagcctgcctttttgtgttctgccgtgtagtctctgacaggtagggcccgcttgctcctgcgtgtatgctcccggtttattccgtaacacattttttttacaaaaaatagaactactgcacatgtc

SEQ ID NO: 50581 - DNA, 2134 bp, Zea Mays
cccatgttcgcatggtcacgcccacggccgcaccaaccaccagccccgatttcctcctcaatcacacccccaaaccaaaacccaaacagcacttctcctgcaatcgccgacgtcgacggaggcttcgccggccggagcagcgccgacgggtgcaattcttcaaagggtgcagtgtatccaaggagacaaagggaccggtccgcagtttcttcactgcaaattcaaagagcaccacggtgaaatcagcggacttgaaagtagcatcatccttcaaaaatgatggtggttatccagctggcggtgtctcttggaaggacgacactctattgccaaaaagcacaaccattcgtggccaggaccatccggttgctgaccctgtactcccaatggattccatgattacgccagaaatcctctctgctaatgtggaacgtgttatagacatgtttgcagacgatgacactgatactgaacttgatttggatagcccgacagaggacttcacatcaattgcagaagccattgaggacatacagcaaggaaaacttgtgattgttgttgatgatgaatcaagggaaaatgaaggagatctgataatggctgcctccttggttaccccagaggctatggcttttatagtaaggcatgagacaggaattgtttgtgtcagcatgaaagaagatgatctggaaagactgagccttcctttgatggttaccacaaaagaaaatgagaagctatgcactgctttcactgttacagtggatgcaaaagagggcacaactactggggtatctgccaaggacagggcaaaaacagtcatgactcttgcatctcctgactctaagcctgaggacctcaaccgccctggtcatattttccctttgaaatacagagaagggggtgttcttaaacgggctggacacaccgaggcatctgttgaccttgccatgttggctggattacctcctgttgctgtcctttgtgaaattgtggatgatgcagatggttctatggctcgcctaccaaagttgcatgtctttgctgaaaaggagaacttaaagattatatctattgctgacttgattagatgagttgaattaccaaaacttcagcttctggtataggaggaaaagagacaggctaattgaacgcgcttctgttgcacgcttgcctttgaaatggggcaatgtccatgcctattgctacaaatctgttattgatggcattgagcatattggcatgatgaaaggtgatattggtgacagccaagacattttggtgagggtgcactctgagtgcctcacaggcgacatttttggatccgcaagatgtgattgtggcgaccaacttgcgatggcaatggagatgattgagaaggctggaaggggcgtattagtctatctccgtggacatgaaggaaggggtattggtctgggccacaagcttcgtgcttataacttacaggatgatgggcgtgatactgtggaagctaatgaggaacttggtcttcctgtggactcacaggaatacgggattggcgcacagatattgcgggatctaggagtccgttcaatgaagctgatgactaataaccctgcgaaatatagtggtattaagggctacggattgagcattgcgggcagggtgcccttgattacgccaattaccagtgagaaccgtaagtacctagagactaaaagaacaaagatgggacatgtatatggattggccaatgcgcaggccaaccaagcaaataaatggcagccagagcacagaagagaatcattaggcccccaagcatgtttccattattattccagcaatccagcttcgtggcacaaaagagtgatatgattcttcgtttggggagttcctgaaatcttctccccctatatttccgtagattctttcgcaaaaaagccgatatttcggtagatcgatttcttcaattgtaacggtaggttttaaggtggctaatctctactacttattaagttagcaatagtagcctgcctttttgtgttctgccgtgtagtctctgacaggtagggcccgcttgctcctgcgtgtatgctcccggtttattccgtaacacattttttttacaaaaaatagaactactgcacatgtc

SEQ ID NO: 50582 - DNA, 2103 bp, Zea Mays
cccatgttcgcatggtcacgcccacggccgcaccaaccaccagccccgatttcctcctcaatcacacccccaaaccaaaacccaaacagcacttctcctgcaatcgccgacgtcgacggaggcttcgccggccggagcagcgccgacgggtgcaattcttcaaagggtgcagtgtatccaaggagacaaagggaccggtccgcagtttcttcactgcaaattcaaagagcaccacggtgaaatcagcggacttgaaagtagcatcatccttcaaaaatgatggtggttatccagctggcggtgtctcttggaaggacgacactctattgccaaaaagcacaaccattcgtggccaggaccatccggttgctgaccctgtactcccaatggattccatgattacgccagaaatcctctctgctaatgtggaacgtgttatagacatgtttgcagacgatgacactgatactgaacttgatttggatagcccgacagaggacttcacatcaattgcagaagccattgaggacatacagcaaggaaaacttgtgattgttgttgatgatgaatcaagggaaaatgaaggagatctgataatggctgcctccttggttaccccagaggctatggcttttatagtaaggcatgagacaggaattgtttgtgtcagcatgaaagaagatgatctggaaagactgagccttcctttgatggttaccacaaaagaaaatgagaagctatgcactgctttcactgttacagtggatgcaaaagagggcacaactactggggtatctgccaaggacagggcaaaaacagtcatgactcttgcatctcctgactctaagcctgaggacctcaaccgccctggtcatattttccctttgaaatacagagaagggggtgttcttaaacgggctggacacaccgaggcatctgttgaccttgccatgttggctggattacctcctgttgctgtcctttgtgaaattgtggatgatgcagatggttctatggctcgcctaccaaagttgcatgtctttgctgaaaaggagaacttaaagattatatctattgctgacttgattaggtataggaggaaaagagacaggctaattgaacgcgcttctgttgcacgcttgcctttgaaatggggcaatgtccatgcctattgctacaaatctgttattgatggcattgagcatattggcatgatgaaaggtgatattggtgacagccaagacattttggtgagggtgcactctgagtgcctcacaggcgacatttttggatccgcaagatgtgattgtggcgaccaacttgcgatggcaatggagatgattgagaaggctggaaggggcgtattagtctatctccgtggacatgaaggaaggggtattggtctgggccacaagcttcgtgcttataacttacaggatgatgggcgtgatactgtggaagctaatgaggaacttggtcttcctgtggactcacaggaatacgggattggcgcacagatattgcgggatctaggagtccgttcaatgaagctgatgactaataaccctgcgaaatatagtggtattaagggctacggattgagcattgcgggcagggtgcccttgattacgccaattaccagtgagaaccgtaagtacctagagactaaaagaacaaagatgggacatgtatatggattggccaatgcgcaggccaaccaagcaaataaatggcagccagagcacagaagagaatcattaggcccccaagcatgtttccattattattccagcaatccagcttcgtggcacaaaagagtgatatgattcttcgtttggggagttcctgaaatcttctccccctatatttccgtagattctttcgcaaaaaagccgatatttcggtagatcgatttcttcaattgtaacggtaggttttaaggtggctaatctctactacttattaagttagcaatagtagcctgcctttttgtgttctgccgtgtagtctctgacaggtagggcccgcttgctcctgcgtgtatgctcccggtttattccgtaacacattttttttacaaaaaatagaactactgcacatgtc

SEQ ID NO: 50583 - DNA, 975 bp, Zea Mays
atcttctccactgggctaaataacacgtgtttcaatggcatcccttactgagctttcattcaactagactggcttcatcaatgccatgatatcaaacatctcattcacttacaggagcatttattccaagaaagctatgactgacatggatagcaccaacgtgtatgcttacatctcaataatttctctaattgtttgcattccacctgcattgatctttgaagggccccagctaaggcagcatggatttagtgatgccattgcaaaagtaggtttgacaaagtttgttgccaaataatttgtgagatattgagatcgataacttggtttaagtattgcaccttttgacaaatataatttgccatgaacatggatattgaaggctatactctgaaatgcagtctcactacataattgactaataaaaatctgttttcttattacatgactaggggtgcttccagcagcgctgcccagcggcttaccgtggacactggactgccagtgttgcctgggttagatgacatattggacgtcccggaagggcttgacgggcagggcaacgatatcagctcgtggtttacggatggccttgacgactcgttgcaagacattgatctttctggcgccctggaaatcccagacgatgacctcacccagctgggatttatgtaaggagaaggaagcaatcgttgtttgtcctgtgcatatacatgtctttccttcacctaatgtatggtagcgctgatccattgatctccctgccacaacctggtaggtcagaggttgtaatctgtaattaggctgttggattcgtgtcgatattcagtgtctgctggcatggactggatagttgcagatgaggcgaggtagcagcaacaagaacatgctgagatttgttaatgttatcctgtagtttgtgcttctgcttcctagattatcctgtcggaatccgacagtacgtgtctttgaaaa

SEQ ID NO: 50584 - DNA, 468 bp, Zea Mays
atggagagcgtgacgaggaagaggccggtgctcatggacttcatccgctcgggcgcctcgcggatgaagaactccagctggcccacgtaggcgaaggcctcgccggcgccgacgaggaagtactgcgggacgagccagaaggcgctgacggcgacgtggcccggcccgttggccgcgtcgcgccgcttcctctcgacgagcgcggagacggccatggcggcgacggagagcgcgagcccggccccgacgcgctgcagcgaggtgagcccctgcgggcggcccgtgaggcgggcggccagcggcacgaggaggcgctcgttgagcgaggtgaagagcaggatggagaggaataggaagacggagaaggagcccgccgggacggcgaagccgccggcgccggagcccgggcgcaggtggcggtccatgcgcgtggcctgctccaccgagaaggtggtcatctgggagtag

SEQ ID NO: 50585 - DNA, 2646 bp, Zea Mays
ccgccggctcggcctccacgatcgccgccttgtcaagccacctgcatgatgatgatgcattcgtcaactgtagcgcgcgcgagaggcacacacgtacacgtactctactacagctacagactacagtaccgcactactgctcagtctcgttgatcgcgtgacgcatcacgcgcccgtgctgtcagtgtcaccactgggtgactcagcagcgagagcgacagctgaaaggccggcacatcggccagttttccggccggatcggaacagtgtaacgagctttcgcggcacgtctacctgtctagatccttttttttctttcaagttccgttgtgttagcgactgggttcaataattccctcttttgcgtgttgtgttagcgaccggcgtcaaggggtacccctctcggcttctctgcatttcagccgtgacactgacacgaggctcggacaagtggcatgtgatcgtacttacaatagacctgcccaactcgcgcgtgatctctgcagcagcggttactagctcgatcggtcgtactgctaggacgtcatcgtgtcccctgcaggacataaaacttcgtgtgccccagtactatatgcatcccaaccctaaccctttaatttattatggtgtctgtttatttgcctcgagctaagctaatactatactactagatgagatgagcaccgtagattaattggtcgctggctgctgctagctgctaagacagagacgtgatcaaaggaacgcaacgcgacggcaggcaaaaatcaaaaggagagcacgcgtcgcgttacctgagcctgtcagtgtgtgcgaccttggccgcggcgaacccgtggagctcggcggcgtcggcgggcagcggcagccggcgcttcctccacgccgcggcgagcacccggccgaccgccgtcagcgggctgccctgcgggcggcggtacctgtaccggggcgtgccggccacgagcacggcgacggcgagcgccatggcgactgcggagacgccgtagccccagccccgccccacgttgtcctgcacgtacaccagcacggtgaccgcgaacagcgaccccaggctgacgcagaagtagaagcggttgaagaagaacaccatggcgcgctcctcccgcgggtcgcgcccgtcgaactggtccgacccgaacccggacacgttcgccttgagcccgccggcccccgccgccaccgtgtacagcgccgcgtacagcagcgccagctgcccgccgcgcgccggcacgcactcgtgcgcgcgcggcccgcgggcgtccaggcacgccggcggacgcatgctcggcaccgtcgtgtccaccgtcagcaagctcacgccctgtgccatgtcaccgttccgctagattagattagaattagtcgcgcaatgcgacgacacgacaccaacatgatgtataccgtggcggcgattgtggcggagatggcgatggtgaggtagcggccgagcttggcgtcggcgaggaagccgccgacgagggcgagcaggttgagcgtgcccatgaagttggtcaccacggtggcggacttggagttggagaggtgcagctcgccgacgaggtacgtcaccaggttcatcgagatgcccatcacgcacacgcgctccgccagctccgtgcccaggatcagcccggcgcccagccagcctccggtcctcgacttgtccgccgggttgccccggaagtccacggcctgcccgtcgtcgccgccgccgtacccaccatgacccgcaccggaaacctacacacgtacgtgttcagaagttcaggtacgtatatacgccatcagagctatctccaccatgcattagacagagagcgaggatgtgcgttgtgcggctcttaccatttgctgccctgcagctgtagctgcagctagctgtgtgcctagcacgtacagtacaggggttgcacgcgagaagaggggactagacaggcggggccgggagcggcgaggacgacgatggaagaggagaggaacgtttgtgctgtgagtttgtccaagagggatgaggcccgggtgaggatttatagctagataggagggcgtggctgtggctgctcctgcactgctactcggaattgttacttttattttccactgcaaattacatcacatttacttgctgcatttgggtcgcagcgtacgtgaggtggccaaaatgaagatgacgaccggcggagacgggagagtccgttcgggcccccgggaagcgggaacggacaagtcgcggtcgcgcgacgatgacctggcgcctgccgggtttccgtggcctgccaaaatcttcatgcggtagtctgtttggtttagcttttttctgaccagctgtgaggagaatctggctgtgaggagaatcgtccggtacgtgttgaagtggcggatcctatgcgcatatgctcgtattttggggtaagcggggggtggtctggttttagccactgtatccgtatgtttatcagccgcatgccggccgtcatgtaaaaaatctagaccccatgctacatgattagtgtctcgacaaaagccacctgtaacgtccaaatgtagcccccatgcatgttacgtgactgtagtatctcgacaaaagtctacttggatctagtatgtttagagagtgtttgg

SEQ ID NO: 50586 - DNA, 1396 bp, Zea Mays
ccagcttgagtctgtttctcttcttctctcggctggccgcgccgctgtccctgtccatccaacgcccctccgctttctgcggtctatgtagggctggtccagaaggactgccgctagcggttgtattcgtcggaacatcgctgagtcctccgacgcgctcctggcgctgctctgagaactggatatgctgggcctagcacccctccgctctgcgcctcttcctatccgcgcctccgccaccgcctgcggccgaaatacctcgcagctcgccaatggctgccaactctctcttctcgcgccagaggcggccgaaggtgacacggcgctgccggagaacatgcacaagtggaggatggtcatcgcctacgatggaacaaagttcaaaggttggcagtatcaaccatcaattccaacaatacaatattttctagaggatgcgctgatatgcatcactaagctggatcggaagaaactatgcttagtcggtgcaggcaggactgatacaggtgttcatgcatggggtggcacattttactacacccttcagttacagttgcctcagtagtattcattctgcaatgaatggactccttcctcctgagattcgagtcagggaaattagtgcagcacgtcctgaattccatgctcgctcatccacaaagagcaaagtctatcgctacaagatctataatgaagcaatcatggatccctttcataatcactatgcttatcatagtgcttataaacttaatccccatgccatgcaggaggctgcaaattattttgttggaatccatgacttcacgtcttttgctaatgctgcacataatgacggtgagcgcaggcccacaaagaagataacacgttttgatgttactgaaatgggtgctgtcttacagctcgaggttgaaggcaccggttttctgtacagacaagtgaggaacatggttgctttgctgcttcaagtcggaaaggaagcacttcctcctgatatcgttccagcgatcattgcggccagggaccgcaaagaactggcgaaggtggccttgtcagcaccaccacatggattgtatctcatgtcggttaactatgacgaggaaatcctgaagcctcctgaaggttcccctccaatttcgtttggcagaactcatcatcttagattttcttggttcagaactgtcaaccgtgggctctcatggcctgctagtttctgctaacggaccaaagtactcttttgtactgtctgaggtaattgtttattcggctggacaggctccgttttactgaactagttgccctctcatgcgttgttgtcgtcacagaagctgaaaatgatgaacgcaataagtgctccatgcaagaacatacgacttgtctggttcgatgtaatgtaacg

SEQ ID NO: 50587 - DNA, 1377 bp, Zea Mays
cttgagtctgtttctcttcttctctcggctggccgcgccgctgtccctgtccatccaacgcccctccgctttctgcggtctatgtagggctggtccagaaggactgccgctagcggttgtattcgtcggaacatcgctgagtcctccgacgcgctcctggcgctgctctgagaactggatatgctgggcctagcacccctccgctctgcgcctcttcctatccgcgcctccgccaccgcctgcggccgaaatacctcgcagctcgccaatggctgccaactctctcttctcgcgccagaggcggccgaaggtgacacggcgctgccggagaacatgcacaagtggaggatggtcatcgcctacgatggaacaaagttcaaaggttggcagtatcaaccatcaattccaacaatacaatattttctagaggatgcgctgatatgcatcactaagctggatcggaagaaactatgcttagtcggtgcaggcaggactgatacaggtggcacattttactacacccttcagttacagttgcctcagtagtattcattctgcaatgaatggactccttcctcctgagattcgagtcagggaaattagtgcagcacgtcctgaattccatgctcgctcatccacaaagagcaaagtctatcgctacaagatctataatgaagcaatcatggatccctttcataatcactatgcttatcatagtgcttataaacttaatccccatgccatgcaggaggctgcaaattattttgttggaatccatgacttcacgtcttttgctaatgctgcacataatgacggtgagcgcaggcccacaaagaagataacacgttttgatgttactgaaatgggtgctgtcttacagctcgaggttgaaggcaccggttttctgtacagacaagtgaggaacatggttgctttgctgcttcaagtcggaaaggaagcacttcctcctgatatcgttccagcgatcattgcggccagggaccgcaaagaactggcgaaggtggccttgtcagcaccaccacatggattgtatctcatgtcggttaactatgacgaggaaatcctgaagcctcctgaaggttcccctccaatttcgtttggcagaactcatcatcttagattttcttggttcagaactgtcaaccgtgggctctcatggcctgctagtttctgctaacggaccaaagtactcttttgtactgtctgaggtaattgtttattcggctggacaggctccgttttactgaactagttgccctctcatgcgttgttgtcgtcacagaagctgaaaatgatgaacgcaataagtgctccatgcaagaacatacgacttgtctggttcgatgtaatgtaacg

SEQ ID NO: 50588 - DNA, 1179 bp, Zea Mays
gagtctgtttctcttcttctctcggctggccgcgccgctgtccctgtccatccaacgcccctccgctttctgcggtctatgtagggctggtccagaaggactgccgctagcggttgtattcgtcggaacatcgctgagtcctccgacgcgctcctggcgctgctctgagaactggatatgctgggcctagcacccctccgctctgcgcctcttcctatccgcgcctccgccaccgcctgcggccgaaatacctcgcagctcgccaatggctgccaactctctcttctcgcgccagaggcggccgaaggtgacacggcgctgccggagaacatgcacaagtggaggatggtcatcgcctacgatggaacaaagttcaaaggttggcagtatcaaccatcaattccaacaatacaatattttctagaggatgcgctgatatgcatcactaagctggatcggaagaaactatgcttagtcggtgcaggcaggactgatacaggtgttcatgcatggggtcaggtttaataaacatactgcataactgtatactgaagcttaaattgatatctatcatctggtttgcgtatcctgcactgttaaatgtcaatattatgttttatatgaaatactgggggattacatacaatatttgttgttttcaggtggcacattttactacacccttcagttacagttgcctcagtagtattcattctgcaatgaatggactccttcctcctgagattcgagtcagggaaattagtgcagcacgtcctgaattccatgctcgctcatccacaaagagcaaagtctatcgctacaagatctataatgaagcaatcatggatccctttcataatcactatgcttatcatagtgcttataaacttaatccccatgccatgcaggaggctgcaaattattttgttggaatccatgacttcacgtcttttgctaatgctgcacataatgacggtgagcgcaggcccacaaagaagataacacgttttgatgttactgaaatgggtgctgtcttacagctcgaggttgaaggcaccggttttctgtacagacaagtgaggaacatggtagtaccaaaaaatccaaaacaactaatagtttggaatggaaaaggaagctacatggacttaaatataatagcctgaacttagcaaattc

SEQ ID NO: 50589 - DNA, 1386 bp, Zea Mays
gagtctgtttctcttcttctctcggctggccgcgccgctgtccctgtccatccaacgcccctccgctttctgcggtctatgtagggctggtccagaaggactgccgctagcggttgtattcgtcggaacatcgctgagtcctccgacgcgctcctggcgctgctctgagaactggatatgctgggcctagcacccctccgctctgcgcctcttcctatccgcgcctccgccaccgcctgcggccgaaatacctcgcagctcgccaatggctgccaactctctcttctcgcgccagaggcggccgaaggtgacacggcgctgccggagaacatgcacaagtggaggatggtcatcgcctacgatggaacaaagttcaaaggttggcagtatcaaccatcaattccaacaatacaatattttctagaggatgcgctgatatgcatcactaagctggatcggaagaaactatgcttagtcggtgcaggcaggactgatacaggtggcacattttactacacccttcagttacagttgcctcagtagtattcattctgcaatgaatggactccttcctcctgagattcgagtcagggaaattagtgcagcacgtcctgaattccatgctcgctcatccacaaagagcaaagtctatcgctacaagatctataatgaagcaatcatggatccctttcataatcactatgcttatcatagtgcttataaacttaatccccatgccatgcaggaggctgcaaattattttgttggaatccatgacttcacgtcttttgctaatgctgcacataatgacggtgagcgcaggcccacaaagaagataacacgttttgatgttactgaaatgggtgctgtcttacagctcgaggttgaaggcaccggttttctgtacagacaagtgaggaacatggttgctttgctgcttcaagtcggaaaggaagcacttcctcctgatatcgttccagcgatcattgcggccagggaccgcaaagaactggcgaaggtggccttgtcagcaccaccacatggattgtatctcatgtcggttaactatgacgaggaaatcctgaagcctcctgaagatgaattgtcttccagaaatgtatcatcttttagtttccgttgcctcctaggattttcttggttcagaactgtcaaccgtgggctctcatggcctgctagtttctgctaacggaccaaagtactcttttgtactgtctgaggtaattgtttattcggctggacaggctccgttttactgaactagttgccctctcatgcgttgttgtcgtcacagaagctgaaaatgatgaacgcaataagtgctccatgcaagaacatacgacttgtctggttcgatgtaatgtaacg

SEQ ID NO: 50590 - DNA, 1257 bp, Zea Mays
gagtctgtttctcttcttctctcggctggccgcgccgctgtccctgtccatccaacgcccctccgctttctgcggtctatgtagggctggtccagaaggactgccgctagcggttgtattcgtcggaacatcgctgagtcctccgacgcgctcctggcgctgctctgagaactggatatgctgggcctagcacccctccgctctgcgcctcttcctatccgcgcctccgccaccgcctgcggccgaaatacctcgcagcagctcgccaatggctgccaactctctcttctcgcgccagaggcggccgaaggtgacacggcgctgccggagaacatgcacaagtggaggatggtcatcgcctacgatggaacaaagttcaaaggtggcacattttactacacccttcagttacagttgcctcagtagtattcattctgcaatgaatggactccttcctcctgagattcgagtcagggaaattagtgcagcacgtcctgaattccatgctcgctcatccacaaagagcaaagtctatcgctacaagatctataatgaagcaatcatggatccctttcataatcactatgcttatcatagtgcttataaacttaatccccatgccatgcaggaggctgcaaattattttgttggaatccatgacttcacgtcttttgctaatgctgcacataatgacggtgagcgcaggcccacaaagaagataacacgttttgatgttactgaaatgggtgctgtcttacagctcgaggttgaaggcaccggttttctgtacagacaagtgaggaacatggttgctttgctgcttcaagtcggaaaggaagcacttcctcctgatatcgttccagcgatcattgcggccagggaccgcaaagaactggcgaaggtggccttgtcagcaccaccacatggattgtatctcatgtcggttaactatgacgaggaaatcctgaagcctcctgaaggttcccctccaatttcgtttggcagaactcatcatcttagattttcttggttcagaactgtcaaccgtgggctctcatggcctgctagtttctgctaacggaccaaagtactcttttgtactgtctgaggtaattgtttattcggctggacaggctccgttttactgaactagttgccctctcatgcgttgttgtcgtcacagaagctgaaaatgatgaacgcaataagtgctccatgcaagaacatacgacttgtctggttcgatgtaatgtaacg

SEQ ID NO: 50591 - DNA, 1392 bp, Zea Mays
gagtctgtttctcttcttctctcggctggccgcgccgctgtccctgtccatccaacgcccctccgctttctgcggtctatgtagggctggtccagaaggactgccgctagcggttgtattcgtcggaacatcgctgagtcctccgacgcgctcctggcgctgctctgagaactggatatgctgggcctagcacccctccgctctgcgcctcttcctatccgcgcctccgccaccgcctgcggccgaaatacctcgcagcagctcgccaatggctgccaactctctcttctcgcgccagaggcggccgaaggtgacacggcgctgccggagaacatgcacaagtggaggatggtcatcgcctacgatggaacaaagttcaaaggttggcagtatcaaccatcaattccaacaatacaatattttctagaggatgcgctgatatgcatcactaagctggatcggaagaaactatgcttagtcggtgcaggcaggactgatacaggtgttcatgcatggggtggcacattttactacacccttcagttacagttgcctcagtagtattcattctgcaatgaatggactccttcctcctgagattcgagtcagggaaattagtgcagcacgtcctgaattccatgctcgctcatccacaaagagcaaagtctatcgctacaagatctataatgaagcaatcatggatccctttcataatcactatgcttatcatagtgcttataaacttaatccccatgccatgcaggaggctgcaaattattttgttggaatccatgacttcacgtcttttgctaatgctgcacataatgacggtgagcgcaggcccacaaagaagataacacgttttgatgttactgaaatgggtgctgtcttacagctcgaggttgaaggcaccggttttctgtacagacaagtgaggaacatggttgctttgctgcttcaagtcggaaaggaagcacttcctcctgatatcgttccagcgatcattgcggccagggaccgcaaagaactggcgaaggtggccttgtcagcaccaccacatggattgtatctcatgtcggttaactatgacgaggaaatcctgaagcctcctgaaggttcccctccaatttcgtttggcagaactcatcatcttagattttcttggttcagaactgtcaaccgtgggctctcatggcctgctagtttctgctaacggaccaaagtactcttttgtactgtctgaggtaattgtttattcggctggacaggctccgttttactgaactagttgccctctcatgcgttgttgtcgtcacagaagctgaaaatgatgaacgcaataagtgctccatgcaagaacatacgacttgtctggttcgatgtaatgtaacg

SEQ ID NO: 50592 - DNA, 1458 bp, Zea Mays
gagtctgtttctcttcttctctcggctggccgcgccgctgtccctgtccatccaacgcccctccgctttctgcggtctatgtagggctggtccagaaggactgccgctagcggttgtattcgtcggaacatcgctgagtcctccgacgcgctcctggcgctgctctgagaactggatatgctgggcctagcacccctccgctctgcgcctcttcctatccgcgcctccgccaccgcctgcggccgaaatacctcgctcgccaatggctgccaactctctcttctcgcgccagaggcggccgaaggtgacacggcgctgccggagaacatgcacaagtggaggatggtcatcgcctacgatggaacaaagttcaaaggttggcagtatcaaccatcaattccaacaatacaatattttctagaggatgcgctgatatgcatcactaagctggatcggaagaaactatgcttagtcggtgcaggcaggactgatacaggtggcacattttactacacccttcagttacagttgcctcagtagtattcattctgcaatgaatggactccttcctcctgagattcgagtcagggaaattagtgcagcacgtcctgaattccatgctcgctcatccacaaagagcaaagtctatcgctacaagatctataatgaagcaatcatggatccctttcataatcactatgcttatcatagtgcttataaacttaatccccatgccatgcaggaggctgcaaattattttgttggaatccatgacttcacgtcttttgctaatgctgcacataatgacggtgagcgcaggcccacaaagaagataacacgttttgatgttactgaaatgggtgctgtcttacagctcgaggttgaaggcaccggttttctgtacagacaagtgaggaacatggttgctttgctgcttcaagtcggaaaggaagcacttcctcctgatatcgttccagcgatcattgcggccagggaccgcaaagaactggcgaaggtggccttgtcagcaccaccacatggattgtatctcatgtcggttaactatgacgaggaaatcctgaagcctcctgaaggttcccctccaatttcgtttggcagaactcatcatcttagtaagtgcaaacttacgttgtattaatttgttacagatgaattgtcttccagaaatgtatcatcttttagtttccgttgcctcctaggattttcttggttcagaactgtcaaccgtgggctctcatggcctgctagtttctgctaacggaccaaagtactcttttgtactgtctgaggtaattgtttattcggctggacaggctccgttttactgaactagttgccctctcatgcgttgttgtcgtcacagaagctgaaaatgatgaacgcaataagtgctccatgcaagaacatacgacttgtctggttcgatgtaatgtaacg

SEQ ID NO: 50593 - DNA, 1137 bp, Zea Mays
cctcatccaggagtggcccatttctctaaatggtcgtgcaaagcaatcaaggggtttgataaagatgagaaaggggctgaattctttgattatcctggacgcctggcaaatctggaagcatcacaatgttggcagtatcaaccatcaattccaacaatacaatattttctagaggatgcgctgatatgcatcactaagctggatcggaagaaactatgcttagtcggtgcaggcaggactgatacaggtgttcatgcatggggtggcacattttactacacccttcagttacagttgcctcagtagtattcattctgcaatgaatggactccttcctcctgagattcgagtcagggaaattagtgcagcacgtcctgaattccatgctcgctcatccacaaagagcaaagtctatcgctacaagatctataatgaagcaatcatggatccctttcataatcactatgcttatcatagtgcttataaacttaatccccatgccatgcaggaggctgcaaattattttgttggaatccatgacttcacgtcttttgctaatgctgcacataatgacggtgagcgcaggcccacaaagaagataacacgttttgatgttactgaaatgggtgctgtcttacagctcgaggttgaaggcaccggttttctgtacagacaagtgaggaacatggttgctttgctgcttcaagtcggaaaggaagcacttcctcctgatatcgttccagcgatcattgcggccagggaccgcaaagaactggcgaaggtggccttgtcagcaccaccacatggattgtatctcatgtcggttaactatgacgaggaaatcctgaagcctcctgaaggttcccctccaatttcgtttggcagaactcatcatcttagattttcttggttcagaactgtcaaccgtgggctctcatggcctgctagtttctgctaacggaccaaagtactcttttgtactgtctgaggtaattgtttattcggctggacaggctccgttttactgaactagttgccctctcatgcgttgttgtcgtcacagaagctgaaaatgatgaacgcaataagtgctccatgcaagaacatacgacttgtctggttcgatgtaatgtaacg

SEQ ID NO: 50594 - DNA, 1018 bp, Zea Mays
ggcaaatctggaagcatcacaatgttggcagtatcaaccatcaattccaacaatacaatattttctagaggatgcgctgatatgcatcactaagctggatcggaagaaactatgcttagtcggtgcaggcaggactgatacaggtggcacattttactacacccttcagttacagttgcctcagtagtattcattctgcaatgaatggactccttcctcctgagattcgagtcagggaaattagtgcagcacgtcctgaattccatgctcgctcatccacaaagagcaaagtctatcgctacaagatctataatgaagcaatcatggatccctttcataatcactatgcttatcatagtgcttataaacttaatccccatgccatgcaggaggctgcaaattattttgttggaatccatgacttcacgtcttttgctaatgctgcacataatgacggtgagcgcaggcccacaaagaagataacacgttttgatgttactgaaatgggtgctgtcttacagctcgaggttgaaggcaccggttttctgtacagacaagtgaggaacatggttgctttgctgcttcaagtcggaaaggaagcacttcctcctgatatcgttccagcgatcattgcggccagggaccgcaaagaactggcgaaggtggccttgtcagcaccaccacatggattgtatctcatgtcggttaactatgacgaggaaatcctgaagcctcctgaaggttcccctccaatttcgtttggcagaactcatcatcttagattttcttggttcagaactgtcaaccgtgggctctcatggcctgctagtttctgctaacggaccaaagtactcttttgtactgtctgaggtaattgtttattcggctggacaggctccgttttactgaactagttgccctctcatgcgttgttgtcgtcacagaagctgaaaatgatgaacgcaataagtgctccatgcaagaacatacgacttgtctggttcgatgtaatgtaacg

SEQ ID NO: 50595 - DNA, 845 bp, Zea Mays
gctcttcaagaactgttccttcagttgttaatcacataagcctctgttggcagtatcaaccatcaattccaacaatacaatattttctagaggatgcgctgatatgcatcactaagctggatcggaagaaactatgcttagtcggtgcaggcaggactgatacaggtgttcatgcatggggtcaggtttaataaacatactgcataactgtatactgaagcttaaattgatatctatcatctggtttgcgtatcctgcactgttaaatgtcaatattatgttttatatgaaatactgggggattacatacaatatttgttgttttcaggtggcacattttactacacccttcagttacagttgcctcagtagtattcattctgcaatgaatggactccttcctcctgagattcgagtcagggaaattagtgcagcacgtcctgaattccatgctcgctcatccacaaagagcaaagtctatcgctacaagatctataatgaagcaatcatggatccctttcataatcactatgcttatcatagtgcttataaacttaatccccatgccatgcaggaggctgcaaattattttgttggaatccatgacttcacgtcttttgctaatgctgcacataatgacggtgagcgcaggcccacaaagaagataacacgttttgatgttactgaaatgggtgctgtcttacagctcgaggttgaaggcaccggttttctgtacagacaagtgaggaacatggtagtaccaaaaaatccaaaacaactaatagtttggaatggaaaaggaagctacatggacttaaatataatagcctgaacttagcaaattc

SEQ ID NO: 50596 - DNA, 3436 bp, Zea Mays
aaaaacctgaaagtgtaacttgatctggaattcctggatccgtgcgcacactctaggcgttgtgcgtgtttggtcccgtcaatcagtcagtctttacgacgcattcgcattcgcgctcacctccagaaccgagatccaccaccgcgcaccttcacgactcggccggcgctccgtcactcatgatggccggccgcccgcgcccgcagacggagctgcactcgccgtccgcctccacgcggcggcgtgagcggtggctggttgtactcggcgtcgcactccacgccgtgtacatgctcagcatcttcgacatatacttcaagtcccccatcgtgcacggcatggatcccgtgccgcctcgcctctcggcgccccccgccaagcgcctcgtcctcctcgtcgcggacgggctcagggcggacaagttcttcgagcccgacgaacgggggaggtacagagcgccgttcctgcgcggtgtgatcgaggagaagggccggtggggagtcagccacgcgcgcccgcccaccgagtccaggcccggccatgtctccctcatcgctggcttctacgaggaccctagtgctgtcaccaaaggatggaaggccaatccagttgagtttgattctgtattcaatcagagtcggcacactatctcatttggaagtccagatattgttcctatattctgcagtaacctacctcacagtacctgggacacttatccccatgaatatgaagactttgcaacagatgcatcatttctggatcattggtcatttgaccagtttcaagatcttgtcaacaggtcttttgacgatattaaattgaggcagttactcctacaagataagttggttatatttttgcatttactgggttgtgataccaatggccatgcacaccgaccctattcaagcatatacctgaacaatgtcaaggttgttgaccaaatagctgaaagtgtgtacaatcttatggagaactacttcaatgacaatcaaacagcatacgtgtttactgcagatcatggaatgagtgacaaaggaagccatggagacggacacccttcaaacacagatactcctcttgtggcatggggtgctggaattagaagcccaaagttcctggcttatacagagaaacctgatgacggctttcggtttgtagataaccacaaacatgatacacccactccaaaagactgggcccttgaaggatttgaaagagtagatgtcaaccaggctgacatagctcccctaatggctacacttgtgggtttgccatgcccgatgaattctgtggggagcttacctactccttatttgaaactaaggaaggctgatgaagttgaagccgttctggccaatacaaagcaaattcttaaccagtttctccgaaagtcacagctgaaggaatccagttcactctacttcaaaccttttaagccactggcgaacttttctttagtgctcagtcagattgaggatcttatatctggaagggactatgaaactgccatggagcaatctgaggagctccgaaggctggctcttgctgggcttcattatttccaaacatatgattggttcatgttaatgactacaattacccttggatatattggatggatggtgaacctcattatacatgtgctacagtcttatacatcatatcctgtaattcttctcaagagggctcaattgtatcctaacaatacctccatgaaagtttacatttgtggatgcttctttatgggtttgtcatccattttgctacttctagagaaatcaccacttctttaccatgcttatgtattgtgcacaatattcctttggacaagaattgtacaaaaaattgattttttgaagtccgtatggagagaactagctaatatgcccttcaagtatatttttaatctcctgaccagttcagttgttgcactgcttgtattggagtttctggttatgagcttctttgataggaaaatttatacgtggtgcttcttggtccttgggatactcggttcaacatatgtagcattgtttattcaagctagtgctgcacttgcgatatacatatggcttgcttgctggttcctgtctgtatttactttgatgccagctgaaattccagaaaacaacaacttggtaatttttagtggagggctcataatacttattggattagcttcaagatggattaaatcaaatagttccagcttttggctatatctcactcgagcaaataaacgggatcctcaatcttttaaactctattttgttcaggttattttagtcgcaatatcttcgataatggtgtggctatctacctcacaccggtcccagaacagagaattgctctcactacaccagtttatcaattggtctgtagctggtgttgctatggtgctacctcttttctcaccacctagtgttctatcccgtcttacatctatattcttgggttttgctcctccatttctgctgctttccattggctatgaagcagttttctatagcgcttttgcaatggtactcattggatggatatttgtggaatctgccaacctgtattgctcagaagaaagtggttctgcacgtcgcagaagccttgcggataactcagtttttggctatgaagaaagacacctgcgactatctgatttaagaatccctttgttatttgtgatattatttaatgtcgccttctttggtactggtaattttgcaagtattgcaagctttgagatctcgtctgtgtacagattcattacagtttttagtccatttcttatggcaggacttcttatctttaagttgtttattccgtttatgcttgtcatatgtacgtttagtgcgatcaccaaggtcgtccgtatcccacggctgggctgttattttcttgtaatactgctttcagatgtaatgactattcatttctttttcctggtacggaataccggtagttggatggaaatcggcaacagcattagccatttcggaatagtgagcgcccaagtggtcttcgttttgctgctctttgccctcacgaatatatacactagagatattttggtctcgtctcggcaactaaccgcacggaaagttatgtaaatcgttcagtttatttagaaatccaaatacatccatccttttatttattcatttttgggtcgactttcattttgggatcaagtttgtagcttagcttttggctaaagttttgtagcttagcttttttgttttctgtgaatggaccttggtgtcaaatttttgtgctaatttcattcgcttacttacagcctgaacagattttacgtacaccattataactatattagctttcctctcgggctatgataaactgaagttgtcttgatctagttcttctcagagttgaagttgatgaagcaatcactggaggcggagcttaaaattac

SEQ ID NO: 50597 - DNA, 3878 bp, Zea Mays
gaaagtgtaacttgatctggaattcctggatccgtgcgcacactctaggcgttgtgcgtgtttggtcccgtcaatcagtcagtctttacgacgcattcgcattcgcgctcacctccagaaccgagatccaccaccgcgcaccttcacgactcggccggcgctccgtcactcatgatggccggccgcccgcgcccgcagacggagctgcactcgccgtccgcctccacgcggcggcgtgagcggtggctggttgtactcggcgtcgcactccacgccgtgtacatgctcagcatcttcgacatatacttcaagtcccccatcgtgcacggcatggatcccgtgccgcctcgcctctcggcgccccccgccaagcgcctcgtcctcctcgtcgcggacgggctcagggcggacaagttcttcgagcccgacgaacgggggaggtacagagcgccgttcctgcgcggtgtgatcgaggagaagggccggtggggagtcagccacgcgcgcccgcccaccgagtccaggcccggccatgtctccctcatcgctggcttctacgaggaccctagtgctgtcaccaaaggatggaaggccaatccagttgagtttgattctgtattcaatcagagtcggcacactatctcatttggaagtccagatattgttcctatattctgcagtaacctacctcacagtacctgggacacttatccccatgaatatgaagactttgcaacagatgcatcatttctggatcattggtcatttgaccagtttcaagatcttgtcaacaggtcttttgacgatattaaattgaggcagttactcctacaagataagttggttatatttttgcatttactgggttgtgataccaatggccatgcacaccgaccctattcaagcatatacctgaacaatgtcaaggttgttgaccaaatagctgaaagtgtgtacaatcttatggagaactacttcaatgacaatcaaacagcatacgtgtttactgcagatcatggaatgagtgacaaaggaagccatggagacggacacccttcaaacacagatactcctcttgtggcatggggtgctggaattagaagcccaaagttcctggcttatacagagaaacctgatgacggctttcggtttgtagataaccacaaacatgatacacccactccaaaagactgggcccttgaaggatttgaaagagtagatgtcaaccaggctgacatagctcccctaatggctacacttgtgggtttgccatgcccgatgaattctgtggggagcttacctactccttatttgaaactaaggaaggctgatgaagttgaagccgttctggccaatacaaagcaaattcttaaccagtttctccgaaagtcacagctgaaggaatccagttcactctacttcaaaccttttaagccactggcgaacttttctttagtgctcagtcagattgaggatcttatatctggaagggactatgaaactgccatggagcaatctgaggagctccgaaggctggctcttgctgggcttcattatttccaaacatatgattggttcatgttaatgactacaattacccttggatatattggatggatggtgaacctcattatacatgtgctacagtcttatacatcatatcctgtaattcttctcaagagggctcaattgtatcctaacaatacctccatgaaagtttacatttgtggatgcttctttatgggtttgtcatccattttgctacttctagagaaatcaccacttctttaccatgcttatgtattgtgcacaatattcctttggacaagaattgtacaaaaaattgattttttgaagtccgtatggagagaactagctaatatgcccttcaagtatatttttaatctcctgaccagttcagttgttgcactgcttgtattggagtttctggttatgagcttctttgataggaaaatttatacgtggtgcttcttggtccttgggatactcggttcaacatatgtagcattgtttattcaagctagtgctgcacttgcgatatacatatggcttgcttgctggttcctgtctgtatttactttgatgccagctgaaattccagaaaacaacaacttggtaatttttagtggagggctcataatacttattggattagcttcaagatggattaaatcaaatagttccagcttttggctatatctcactcgagcaaataaacgggatcctcaatcttttaaactctattttgttcaggttattttagtcgcaatatcttcgataatggtgtggctatctacctcacaccggtcccagaacagagaattgctctcactacaccagtttatcaattggtctgtagctggtgttgctatggtgctacctcttttctcaccacctagtgttctatcccgtcttacatctatattcttgggttttgctcctccatttctgctgctttccattggctatgaagcagttttctatagcgcttttgcaatggtactcattggatggatatttgtggaatctgccaacctgtattgctcagaagaaagtggttctgcacgtcgcagaagccttgcggataactcagtttttggctatgaagaaagacacctgcgactatctgatttaagaatccctttgttatttgtgatattatttaatgtcgccttctttggtactggtaattttgcaagtattgcaagctttgagatctcgtctgtgtacagattcattacagtttttagtccatttcttatggcaggacttcttatctttaagttgtttattccgtttatgcttgtcatgtaagttttttttaaccttgttaactttatgctacatgatgtcatggagttaaagttaaatgaagatgtgctgaattcgatttcagtgtacagttatttttatttttcaaaatatgaatatacgatactttaatgaaagttcttgtcacaaattaggtcaccatttgctatagaaagataaaaacaggcaacgatccatttataatttaatgttcgttttgatatctatatagactttatatactatctgcatagttatctgttgagcaactttaagattattttgggagttcctgcacagggtaacaagctataacaaataaaatgtgaagaagacagttttctccaaatgttaggtctttgacatttttctataacacttcagcttaaatatgtacttttttcttttaatttgcgctgaacttgatgctaccttggtgacaagtgcagatgtacgtttagtgcgatcaccaaggtcgtccgtatcccacggctgggctgttattttcttgtaatactgctttcagatgtaatgactattcatttctttttcctggtacggaataccggtagttggatggaaatcggcaacagcattagccatttcggaatagtgagcgcccaagtggtcttcgttttgctgctctttgccctcacgaatatatacactagagatattttggtctcgtctcggcaactaaccgcacggaaagttatgtaaatcgttcagtttatttagaaatccaaatacatccatccttttatttattcatttttgggtcgactttcattttgggatcaagtttgtagcttagcttttggctaaagttttgtagcttagcttttttgttttctgtgaatggaccttggtgtcaaatttttgtgctaatttcattcgcttacttacagcctgaacagattttacgtacaccattataactatattagctttcctctcgggctatgataaactgaagttgtcttgatctagttcttctcagagttgaagttgatgaagcaatcactggaggcggagcttaaaattac

SEQ ID NO: 50598 - DNA, 3955 bp, Zea Mays
gaaagtgtaacttgatctggaattcctggatccgtgcgcacactctaggcgttgtgcgtgtttggtcccgtcaatcagtcagtctttacgacgcattcgcattcgcgctcacctccagaaccgagatccaccaccgcgcaccttcacgactcggccggcgctccgtcactcatgatggccggccgcccgcgcccgcagacggagctgcactcgccgtccgcctccacgcggcggcgtgagcggtggctggttgtactcggcgtcgcactccacgccgtgtacatgctcagcatcttcgacatatacttcaagtcccccatcgtgcacggcatggatcccgtgccgcctcgcctctcggcgccccccgccaagcgcctcgtcctcctcgtcgcggacgggctcagggcggacaagttcttcgagcccgacgaacgggggaggtacagagcgccgttcctgcgcggtgtgatcgaggagaagggccggtggggagtcagccacgcgcgcccgcccaccgagtccaggcccggccatgtctccctcatcgctggcttctacgaggaccctagtgctgtcaccaaaggatggaaggccaatccagttgagtttgattctgtattcaatcagagtcggcacactatctcatttggaagtccagatattgttcctatattctgcagtaacctacctcacagtacctgggacacttatccccatgaatatgaagactttgcaacagatgcatcatttctggatcattggtcatttgaccagtttcaagatcttgtcaacaggtcttttgacgatattaaattgaggcagttactcctacaagataagttggttatatttttgcatttactgggttgtgataccaatggccatgcacaccgaccctattcaagcatatacctgaacaatgtcaaggttgttgaccaaatagctgaaagtgtgtacaatcttatggagaactacttcaatgacaatcaaacagcatacgtgtttactgcagatcatggaatgagtgacaaaggaagccatggagacggacacccttcaaacacagatactcctcttgtggcatggggtgctggaattagaagcccaaagttcctggcttatacagagaaacctgatgacggctttcggtttgtagataaccacaaacatgatacacccactccaaaagactgggcccttgaaggatttgaaagagtagatgtcaaccaggctgacatagctcccctaatggctacacttgtgggtttgccatgcccgatgaattctgtggggagcttacctactccttatttgaaactaaggaaggctgatgaagttgaagccgttctggccaatacaaagcaaattcttaaccagtttctccgaaagtcactatgatgaccaagactaccaaattaaacaacaaaccatactgttacccctaagcatgtcttcccttatcgatctcagagctgaaggaatccagttcactctacttcaaaccttttaagccactggcgaacttttctttagtgctcagtcagattgaggatcttatatctggaagggactatgaaactgccatggagcaatctgaggagctccgaaggctggctcttgctgggcttcattatttccaaacatatgattggttcatgttaatgactacaattacccttggatatattggatggatggtgaacctcattatacatgtgctacagtcttatacatcatatcctgtaattcttctcaagagggctcaattgtatcctaacaatacctccatgaaagtttacatttgtggatgcttctttatgggtttgtcatccattttgctacttctagagaaatcaccacttctttaccatgcttatgtattgtgcacaatattcctttggacaagaattgtacaaaaaattgattttttgaagtccgtatggagagaactagctaatatgcccttcaagtatatttttaatctcctgaccagttcagttgttgcactgcttgtattggagtttctggttatgagcttctttgataggaaaatttatacgtggtgcttcttggtccttgggatactcggttcaacatatgtagcattgtttattcaagctagtgctgcacttgcgatatacatatggcttgcttgctggttcctgtctgtatttactttgatgccagctgaaattccagaaaacaacaacttggtaatttttagtggagggctcataatacttattggattagcttcaagatggattaaatcaaatagttccagcttttggctatatctcactcgagcaaataaacgggatcctcaatcttttaaactctattttgttcaggttattttagtcgcaatatcttcgataatggtgtggctatctacctcacaccggtcccagaacagagaattgctctcactacaccagtttatcaattggtctgtagctggtgttgctatggtgctacctcttttctcaccacctagtgttctatcccgtcttacatctatattcttgggttttgctcctccatttctgctgctttccattggctatgaagcagttttctatagcgcttttgcaatggtactcattggatggatatttgtggaatctgccaacctgtattgctcagaagaaagtggttctgcacgtcgcagaagccttgcggataactcagtttttggctatgaagaaagacacctgcgactatctgatttaagaatccctttgttatttgtgatattatttaatgtcgccttctttggtactggtaattttgcaagtattgcaagctttgagatctcgtctgtgtacagattcattacagtttttagtccatttcttatggcaggacttcttatctttaagttgtttattccgtttatgcttgtcatgtaagttttttttaaccttgttaactttatgctacatgatgtcatggagttaaagttaaatgaagatgtgctgaattcgatttcagtgtacagttatttttatttttcaaaatatgaatatacgatactttaatgaaagttcttgtcacaaattaggtcaccatttgctatagaaagataaaaacaggcaacgatccatttataatttaatgttcgttttgatatctatatagactttatatactatctgcatagttatctgttgagcaactttaagattattttgggagttcctgcacagggtaacaagctataacaaataaaatgtgaagaagacagttttctccaaatgttaggtctttgacatttttctataacacttcagcttaaatatgtacttttttcttttaatttgcgctgaacttgatgctaccttggtgacaagtgcagatgtacgtttagtgcgatcaccaaggtcgtccgtatcccacggctgggctgttattttcttgtaatactgctttcagatgtaatgactattcatttctttttcctggtacggaataccggtagttggatggaaatcggcaacagcattagccatttcggaatagtgagcgcccaagtggtcttcgttttgctgctctttgccctcacgaatatatacactagagatattttggtctcgtctcggcaactaaccgcacggaaagttatgtaaatcgttcagtttatttagaaatccaaatacatccatccttttatttattcatttttgggtcgactttcattttgggatcaagtttgtagcttagcttttggctaaagttttgtagcttagcttttttgttttctgtgaatggaccttggtgtcaaatttttgtgctaatttcattcgcttacttacagcctgaacagattttacgtacaccattataactatattagctttcctctcgggctatgataaactgaagttgtcttgatctagttcttctcagagttgaagttgatgaagcaatcactggaggcggagcttaaaattac

SEQ ID NO: 50599 - DNA, 3446 bp, Zea Mays
gtttggtcccgtcaatcagtcagtctttacgacgcattcgcattcgcgctcacctccagaaccgagatccaccaccgcgcaccttcacgactcggccggcgctccgtcactcatgatggccggccgcccgcgcccgcagacggagctgcactcgccgtccgcctccacgcggcggcgtgagcggtggctggttgtactcggcgtcgcactccacgccgtgtacatgctcagcatcttcgacatatacttcaagtcccccatcgtgcacggcatggatcccgtgccgcctcgcctctcggcgccccccgccaagcgcctcgtcctcctcgtcgcggacgggctcagggcggacaagttcttcgagcccgacgaacgggggaggtacagagcgccgttcctgcgcggtgtgatcgaggagaagggccggtggggagtcagccacgcgcgcccgcccaccgagtccaggcccggccatgtctccctcatcgctggcttctacgaggaccctagtgctgtcaccaaaggatggaaggccaatccagttgagtttgattctgtattcaatcagagtcggcacactatctcatttggaagtccagatattgttcctatattctgcagtaacctacctcacagtacctgggacacttatccccatgaatatgaagactttgcaacagatgcatcatttctggatcattggtcatttgaccagtttcaagatcttgtcaacaggtcttttgacgatattaaattgaggcagttactcctacaagataagttggttatatttttgcatttactgggttgtgataccaatggccatgcacaccgaccctattcaagcatatacctgaacaatgtcaaggttgttgaccaaatagctgaaagtgtgtacaatcttatggagaactacttcaatgacaatcaaacagcatacgtgtttactgcagatcatggaatgagtgacaaaggaagccatggagacggacacccttcaaacacagatactcctcttgtggcatggggtgctggaattagaagcccaaagttcctggcttatacagagaaacctgatgacggctttcggtttgtagataaccacaaacatgatacacccactccaaaagactgggcccttgaaggatttgaaagagtagatgtcaaccaggctgacatagctcccctaatggctacacttgtgggtttgccatgcccgatgaattctgtggggagcttacctactccttatttgaaactaaggaaggctgatgaagttgaagccgttctggccaatacaaagcaaattcttaaccagtttctccgaaagtcactatgatgaccaagactaccaaattaaacaacaaaccatactgttacccctaagcatgtcttcccttatcgatctcagagctgaaggaatccagttcactctacttcaaaccttttaagccactggcgaacttttctttagtgctcagtcagattgaggatcttatatctggaagggactatgaaactgccatggagcaatctgaggagctccgaaggctggctcttgctgggcttcattatttccaaacatatgattggttcatgttaatgactacaattacccttggatatattggatggatggtgaacctcattatacatgtgctacagtcttatacatcatatcctgtaattcttctcaagagggctcaattgtatcctaacaatacctccatgaaagtttacatttgtggatgcttctttatgggtttgtcatccattttgctacttctagagaaatcaccacttctttaccatgcttatgtattgtgcacaatattcctttggacaagaattgtacaaaaaattgattttttgaagtccgtatggagagaactagctaatatgcccttcaagtatatttttaatctcctgaccagttcagttgttgcactgcttgtattggagtttctggttatgagcttctttgataggaaaatttatacgtggtgcttcttggtccttgggatactcggttcaacatatgtagcattgtttattcaagctagtgctgcacttgcgatatacatatggcttgcttgctggttcctgtctgtatttactttgatgccagctgaaattccagaaaacaacaacttggtaatttttagtggagggctcataatacttattggattagcttcaagatggattaaatcaaatagttccagcttttggctatatctcactcgagcaaataaacgggatcctcaatcttttaaactctattttgttcaggttattttagtcgcaatatcttcgataatggtgtggctatctacctcacaccggtcccagaacagagaattgctctcactacaccagtttatcaattggtctgtagctggtgttgctatggtgctacctcttttctcaccacctagtgttctatcccgtcttacatctatattcttgggttttgctcctccatttctgctgctttccattggctatgaagcagttttctatagcgcttttgcaatggtactcattggatggatatttgtggaatctgccaacctgtattgctcagaagaaagtggttctgcacgtcgcagaagccttgcggataactcagtttttggctatgaagaaagacacctgcgactatctgatttaagaatccctttgttatttgtgatattatttaatgtcgccttctttggtactggtaattttgcaagtattgcaagctttgagatctcgtctgtgtacagattcattacagtttttagtccatttcttatggcaggacttcttatctttaagttgtttattccgtttatgcttgtcatatgtacgtttagtgcgatcaccaaggtcgtccgtatcccacggctgggctgttattttcttgtaatactgctttcagatgtaatgactattcatttctttttcctggtacggaataccggtagttggatggaaatcggcaacagcattagccatttcggaatagtgagcgcccaagtggtcttcgttttgctgctctttgccctcacgaatatatacactagagatattttggtctcgtctcggcaactaaccgcacggaaagttatgtaaatcgttcagtttatttagaaatccaaatacatccatccttttatttattcatttttgggtcgactttcattttgggatcaagtttgtagcttagcttttggctaaagttttgtagcttagcttttttgttttctgtgaatggaccttggtgtcaaatttttgtgctaatttcattcgcttacttacagcctgaacagattttacgtacaccattataactatattagctttcctctcgggctatgataaactgaagttgtcttgatctagttcttctcagagttgaagttgatgaagcaatcactggaggcggagcttaaaattac

SEQ ID NO: 50600 - DNA, 3386 bp, Zea Mays
gtcaatcagtcagtctttacgacgcattcgcattcgcgctcacctccagaaccgagatccaccaccgcgcaccttcacgactcggccggcgctccgtcactcatgatggccggccgcccgcgcccgcagacggagctgcactcgccgtccgcctccacgcggcggcgtgagcggtggctggttgtactcggcgtcgcactccacgccgtgtacatgctcagcatcttcgacatatacttcaagtcccccatcgtgcacggcatggatcccgtgccgcctcgcctctcggcgccccccgccaagcgcctcgtcctcctcgtcgcggacgggctcagggcggacaagttcttcgagcccgacgaacgggggaggtacagagcgccgttcctgcgcggtgtgatcgaggagaagggccggtggggagtcagccacgcgcgcccgcccaccgagtccaggcccggccatgtctccctcatcgctggcttctacgaggaccctagtgctgtcaccaaaggtgcgctgccccggtgctagctctagtgatggaaggccaatccagttgagtttgattctgtattcaatcagagtcggcacactatctcatttggaagtccagatattgttcctatattctgcagtaacctacctcacagtacctgggacacttatccccatgaatatgaagactttgcaacagatgcatcatttctggatcattggtcatttgaccagtttcaagatcttgtcaacaggtcttttgacgatattaaattgaggcagttactcctacaagataagttggttatatttttgcatttactgggttgtgataccaatggccatgcacaccgaccctattcaagcatatacctgaacaatgtcaaggttgttgaccaaatagctgaaagtgtgtacaatcttatggagaactacttcaatgacaatcaaacagcatacgtgtttactgcagatcatggaatgagtgacaaaggaagccatggagacggacacccttcaaacacagatactcctcttgtggcatggggtgctggaattagaagcccaaagttcctggcttatacagagaaacctgatgacggctttcggtttgtagataaccacaaacatgatacacccactccaaaagactgggcccttgaaggatttgaaagagtagatgtcaaccaggctgacatagctcccctaatggctacacttgtgggtttgccatgcccgatgaattctgtggggagcttacctactccttatttgaaactaaggaaggctgatgaagttgaagccgttctggccaatacaaagcaaattcttaaccagtttctccgaaagtcacagctgaaggaatccagttcactctacttcaaaccttttaagccactggcgaacttttctttagtgctcagtcagattgaggatcttatatctggaagggactatgaaactgccatggagcaatctgaggagctccgaaggctggctcttgctgggcttcattatttccaaacatatgattggttcatgttaatgactacaattacccttggatatattggatggatggtgaacctcattatacatgtgctacagtcttatacatcatatcctgtaattcttctcaagagggctcaattgtatcctaacaatacctccatgaaagtttacatttgtggatgcttctttatgggtttgtcatccattttgctacttctagagaaatcaccacttctttaccatgcttatgtattgtgcacaatattcctttggacaagaattgtacaaaaaattgattttttgaagtccgtatggagagaactagctaatatgcccttcaagtatatttttaatctcctgaccagttcagttgttgcactgcttgtattggagtttctggttatgagcttctttgataggaaaatttatacgtggtgcttcttggtccttgggatactcggttcaacatatgtagcattgtttattcaagctagtgctgcacttgcgatatacatatggcttgcttgctggttcctgtctgtatttactttgatgccagctgaaattccagaaaacaacaacttggtaatttttagtggagggctcataatacttattggattagcttcaagatggattaaatcaaatagttccagcttttggctatatctcactcgagcaaataaacgggatcctcaatcttttaaactctattttgttcaggttattttagtcgcaatatcttcgataatggtgtggctatctacctcacaccggtcccagaacagagaattgctctcactacaccagtttatcaattggtctgtagctggtgttgctatggtgctacctcttttctcaccacctagtgttctatcccgtcttacatctatattcttgggttttgctcctccatttctgctgctttccattggctatgaagcagttttctatagcgcttttgcaatggtactcattggatggatatttgtggaatctgccaacctgtattgctcagaagaaagtggttctgcacgtcgcagaagccttgcggataactcagtttttggctatgaagaaagacacctgcgactatctgatttaagaatccctttgttatttgtgatattatttaatgtcgccttctttggtactggtaattttgcaagtattgcaagctttgagatctcgtctgtgtacagattcattacagtttttagtccatttcttatggcaggacttcttatctttaagttgtttattccgtttatgcttgtcatatgtacgtttagtgcgatcaccaaggtcgtccgtatcccacggctgggctgttattttcttgtaatactgctttcagatgtaatgactattcatttctttttcctggtacggaataccggtagttggatggaaatcggcaacagcattagccatttcggaatagtgagcgcccaagtggtcttcgttttgctgctctttgccctcacgaatatatacactagagatattttggtctcgtctcggcaactaaccgcacggaaagttatgtaaatcgttcagtttatttagaaatccaaatacatccatccttttatttattcatttttgggtcgactttcattttgggatcaagtttgtagcttagcttttggctaaagttttgtagcttagcttttttgttttctgtgaatggaccttggtgtcaaatttttgtgctaatttcattcgcttacttacagcctgaacagattttacgtacaccattataactatattagctttcctctcgggctatgataaactgaagttgtcttgatctagttcttctcagagttgaagttgatgaagcaatcactggaggcggagcttaaaattac

SEQ ID NO: 50601 - DNA, 3378 bp, Zea Mays
gtcaatcagtcagtctttacgacgcattcgcattcgcgctcacctccagaaccgagatccaccaccgcgcaccttcacgactcggccggcgctccgtcactcatgatggccggccgcccgcgcccgcagacggagctgcactcgccgtccgcctccacgcggcggcgtgagcggtggctggttgtactcggcgtcgcactccacgccgtgtacatgctcagcatcttcgacatatacttcaagtcccccatcgtgcacggcatggatcccgtgccgcctcgcctctcggcgccccccgccaagcgcctcgtcctcctcgtcgcggacgggctcagggcggacaagttcttcgagcccgacgaacgggggaggtacagagcgccgttcctgcgcggtgtgatcgaggagaagggccggtggggagtcagccacgcgcgcccgcccaccgagtccaggcccggccatgtctccctcatcgctggcttctacgaggaccctagtgctgtcaccaaaggatggaaggccaatccagttgagtttgattctgtattcaatcagagtcggcacactatctcatttggaagtccagatattgttcctatattctgcagtaacctacctcacagtacctgggacacttatccccatgaatatgaagactttgcaacagatgcatcatttctggatcattggtcatttgaccagtttcaagatcttgtcaacaggtcttttgacgatattaaattgaggcagttactcctacaagataagttggttatatttttgcatttactgggttgtgataccaatggccatgcacaccgaccctattcaagcatatacctgaacaatgtcaaggttgttgaccaaatagctgaaagtgtgtacaatcttatggagaactacttcaatgacaatcaaacagcatacgtgtttactgcagatcatggaatgagtgacaaaggaagccatggagacggacacccttcaaacacagatactcctcttgtggcatggggtgctggaattagaagcccaaagttcctggcttatacagagaaacctgatgacggctttcggtttgtagataaccacaaacatgatacacccactccaaaagactgggcccttgaaggatttgaaagagtagatgtcaaccaggctgacatagctcccctaatggtggcttgaaaatctccatgctacacttgtgggtttgccatgcccgatgaattctgtggggagcttacctactccttatttgaaactaaggaaggctgatgaagttgaagccgttctggccaatacaaagcaaattcttaaccagtttctccgaaagtcacagctgaaggaatccagttcactctacttcaaaccttttaagccactggcgaacttttctttagtgctcagtcagattgaggatcttatatctggaagggactatgaaactgccatggagcaatctgaggagctccgaaggctggctcttgctgggcttcattatttccaaacatatgattggttcatgttaatgactacaattacccttggatatattggatggatggtgaacctcattatacatgtgctacagtcttatacatcatatcctgtaattcttctcaagagggctcaattgtatcctaacaatacctccatgaaagtttacatttgtggatgcttctttatgggtttgtcatccattttgctacttctagagaaatcaccacttctttaccatgcttatgtattgtgcacaatattcctttggacaagaattgtacaaaaaattgattttttgaagtccgtatggagagaactagctaatatgcccttcaagtatatttttaatctcctgaccagttcagttgttgcactgcttgtattggagtttctggttatgagcttctttgataggaaaatttatacgtggtgcttcttggtccttgggatactcggttcaacatatgtagcattgtttattcaagctagtgctgcacttgcgatatacatatggcttgcttgctggttcctgtctgtatttactttgatgccagctgaaattccagaaaacaacaacttggtaatttttagtggagggctcataatacttattggattagcttcaagatggattaaatcaaatagttccagcttttggctatatctcactcgagcaaataaacgggatcctcaatcttttaaactctattttgttcaggttattttagtcgcaatatcttcgataatggtgtggctatctacctcacaccggtcccagaacagagaattgctctcactacaccagtttatcaattggtctgtagctggtgttgctatggtgctacctcttttctcaccacctagtgttctatcccgtcttacatctatattcttgggttttgctcctccatttctgctgctttccattggctatgaagcagttttctatagcgcttttgcaatggtactcattggatggatatttgtggaatctgccaacctgtattgctcagaagaaagtggttctgcacgtcgcagaagccttgcggataactcagtttttggctatgaagaaagacacctgcgactatctgatttaagaatccctttgttatttgtgatattatttaatgtcgccttctttggtactggtaattttgcaagtattgcaagctttgagatctcgtctgtgtacagattcattacagtttttagtccatttcttatggcaggacttcttatctttaagttgtttattccgtttatgcttgtcatatgtacgtttagtgcgatcaccaaggtcgtccgtatcccacggctgggctgttattttcttgtaatactgctttcagatgtaatgactattcatttctttttcctggtacggaataccggtagttggatggaaatcggcaacagcattagccatttcggaatagtgagcgcccaagtggtcttcgttttgctgctctttgccctcacgaatatatacactagagatattttggtctcgtctcggcaactaaccgcacggaaagttatgtaaatcgttcagtttatttagaaatccaaatacatccatccttttatttattcatttttgggtcgactttcattttgggatcaagtttgtagcttagcttttggctaaagttttgtagcttagcttttttgttttctgtgaatggaccttggtgtcaaatttttgtgctaatttcattcgcttacttacagcctgaacagattttacgtacaccattataactatattagctttcctctcgggctatgataaactgaagttgtcttgatctagttcttctcagagttgaagttgatgaagcaatcactggaggcggagcttaaaattac

SEQ ID NO: 50602 - DNA, 3322 bp, Zea Mays
gtctttacgacgcattcgcattcgcgctcacctccagaaccgagatccaccaccgcgcaccttcacgactcggccggcgctccgtcactcatgatggccggccgcccgcgcccgcagacggagctgcactcgccgtccgcctccacgcggcggcgtgagcggtggctggttgtactcggcgtcgcactccacgccgtgtacatgctcagcatcttcgacatatacttcaagtcccccatcgtgcacggcatggatcccgtgccgcctcgcctctcggcgccccccgccaagcgcctcgtcctcctcgtcgcggacgggctcagggcggacaagttcttcgagcccgacgaacgggggaggtacagagcgccgttcctgcgcggtgtgatcgaggagaagggccggtggggagtcagccacgcgcgcccgcccaccgagtccaggcccggccatgtctccctcatcgctggcttctacgaggaccctagtgctgtcaccaaaggatggaaggccaatccagttgagtttgattctgtattcaatcagagtcggcacactatctcatttggaagtccagatattgttcctatattctgcagtaacctacctcacagtacctgggacacttatccccatgaatatgaagactttgcaacagatgcatcatttctggatcattggtcatttgaccagtttcaagatcttgtcaacaggtcttttgacgatattaaattgaggcagttactcctacaagataagttggttatatttttgcatttactgggttgtgataccaatggccatgcacaccgaccctattcaagcatatacctgaacaatgtcaaggttgttgaccaaatagctgaaagtgtgtacaatcttatggagaactacttcaatgacaatcaaacagcatacgtgtttactgcagatcatggaatgagtgacaaaggaagccatggagacggacacccttcaaacacagatactcctcttgtggcatggggtgctggaattagaagcccaaagttcctggcttatacagagaaacctgatgacggctttcggtttgtagataaccacaaacatgatacacccactccaaaagactgggcccttgaaggatttgaaagagtagatgtcaaccaggctgacatagctcccctaatggctacacttgtgggtttgccatgcccgatgaattctgtggggagcttacctactccttatttgaaactaaggaaggctgatgaagttgaagccgttctggccaatacaaagcaaattcttaaccagtttctccgaaagtcacagctgaaggaatccagttcactctacttcaaaccttttaagccactggcgaacttttctttagtgctcagtcagattgaggatcttatatctggaagggactatgaaactgccatggagcaatctgaggagctccgaaggctggctcttgctgggcttcattatttccaaacatatgattggttcatgttaatgactacaattacccttggatatattggatggatggtgaacctcattatacatgtgctacagtcttatacatcatatcctgtaattcttctcaagagggctcaattgtatcctaacaatacctccatgaaagtttacatttgtggatgcttctttatgggtttgtcatccattttgctacttctagagaaatcaccacttctttaccatgcttatgtattgtgcacaatattcctttggacaagaattgtacaaaaaattgattttttgaagtccgtatggagagaactagctaatatgcccttcaagtatatttttaatctcctgaccagttcagttgttgcactgcttgtattggagtttctggtatgtacccacatattgacacagctatcattttaagacttcatggaatttgatgtgaaatttgatacttgtgggcaggttatgagcttctttgataggaaaatttatacgtggtgcttcttggtccttgggatactcggttcaacatatgtagcattgtttattcaagctagtgctgcacttgcgatatacatatggcttgcttgctggttcctgtctgtatttactttgatgccagctgaaattccagaaaacaacaacttggtaatttttagtggagggctcataatacttattggattagcttcaagatggattaaatcaaatagttccagcttttggctatatctcactcgagcaaataaacgggatcctcaatcttttaaactctattttgttcaggttattttagtcgcaatatcttcgataatggtgtggctatctacctcacaccggtcccagaacagagaattgctctcactacaccagtttatcaattggtctgtagctgctatgaagcagttttctatagcgcttttgcaatggtactcattggatggatatttgtggaatctgccaacctgtattgctcagaagaaagtggttctgcacgtcgcagaagccttgcggataactcagtttttggctatgaagaaagacacctgcgactatctgatttaagaatccctttgttatttgtgatattatttaatgtcgccttctttggtactggtaattttgcaagtattgcaagctttgagatctcgtctgtgtacagattcattacagtttttagtccatttcttatggcaggacttcttatctttaagttgtttattccgtttatgcttgtcatatgtacgtttagtgcgatcaccaaggtcgtccgtatcccacggctgggctgttattttcttgtaatactgctttcagatgtaatgactattcatttctttttcctggtacggaataccggtagttggatggaaatcggcaacagcattagccatttcggaatagtgagcgcccaagtggtcttcgttttgctgctctttgccctcacgaatatatacactagagatattttggtctcgtctcggcaactaaccgcacggaaagttatgtaaatcgttcagtttatttagaaatccaaatacatccatccttttatttattcatttttgggtcgactttcattttgggatcaagtttgtagcttagcttttggctaaagttttgtagcttagcttttttgttttctgtgaatggaccttggtgtcaaatttttgtgctaatttcattcgcttacttacagcctgaacagattttacgtacaccattataactatattagctttcctctcgggctatgataaactgaagttgtcttgatctagttcttctcagagttgaagttgatgaagcaatcactggaggcggagcttaaaattac

SEQ ID NO: 50603 - DNA, 3421 bp, Zea Mays
gtctttacgacgcattcgcattcgcgctcacctccagaaccgagatccaccaccgcgcaccttcacgactcggccggcgctccgtcactcatgatggccggccgcccgcgcccgcagacggagctgcactcgccgtccgcctccacgcggcggcgtgagcggtggctggttgtactcggcgtcgcactccacgccgtgtacatgctcagcatcttcgacatatacttcaagtcccccatcgtgcacggcatggatcccgtgccgcctcgcctctcggcgccccccgccaagcgcctcgtcctcctcgtcgcggacgggctcagggcggacaagttcttcgagcccgacgaacgggggaggtacagagcgccgttcctgcgcggtgtgatcgaggagaagggccggtggggagtcagccacgcgcgcccgcccaccgagtccaggcccggccatgtctccctcatcgctggcttctacgaggaccctagtgctgtcaccaaaggatggaaggccaatccagttgagtttgattctgtattcaatcagagtcggcacactatctcatttggaagtccagatattgttcctatattctgcagtaacctacctcacagtacctgggacacttatccccatgaatatgaagactttgcaacagatgcatcatttctggatcattggtcatttgaccagtttcaagatcttgtcaacaggtcttttgacgatattaaattgaggcagttactcctacaagataagttggttatatttttgcatttactgggttgtgataccaatggccatgcacaccgaccctattcaagcatatacctgaacaatgtcaaggttgttgaccaaatagctgaaagtgtgtacaatcttatggagaactacttcaatgacaatcaaacagcatacgtgtttactgcagatcatggaatgagtgacaaagccatggagacggacacccttcaaacacagatactcctcttgtggcatggggtgctggaattagaagcccaaagttcctggcttatacagagaaacctgatgacggctttcggtttgtagataaccacaaacatgatacacccactccaaaagactgggcccttgaaggatttgaaagagtagatgtcaaccaggctgacatagctcccctaatggctacacttgtgggtttgccatgcccgatgaattctgtggggagcttacctactccttatttgaaactaaggaaggctgatgaagttgaagccgttctggccaatacaaagcaaattcttaaccagtttctccgaaagtcacagctgaaggaatccagttcactctacttcaaaccttttaagccactggcgaacttttctttagtgctcagtcagattgaggatcttatatctggaagggactatgaaactgccatggagcaatctgaggagctccgaaggctggctcttgctgggcttcattatttccaaacatatgattggttcatgttaatgactacaattacccttggatatattggatggatggtgaacctcattatacatgtgctacagtcttatacatcatatcctgtaattcttctcaagagggctcaattgtatcctaacaatacctccatgaaagtttacatttgtggatgcttctttatgggtttgtcatccattttgctacttctagagaaatcaccacttctttaccatgcttatgtattgtgcacaatattcctttggacaagaattgtacaaaaaattgattttttgaagtccgtatggagagaactagctaatatgcccttcaagtatatttttaatctcctgaccagttcagttgttgcactgcttgtattggagtttctggtatgtacccacatattgacacagctatcattttaagacttcatggaatttgatgtgaaatttgatacttgtgggcaggttatgagcttctttgataggaaaatttatacgtggtgcttcttggtccttgggatactcggttcaacatatgtagcattgtttattcaagctagtgctgcacttgcgatatacatatggcttgcttgctggttcctgtctgtatttactttgatgccagctgaaattccagaaaacaacaacttggtaatttttagtggagggctcataatacttattggattagcttcaagatggattaaatcaaatagttccagcttttggctatatctcactcgagcaaataaacgggatcctcaatcttttaaactctattttgttcaggttattttagtcgcaatatcttcgataatggtgtggctatctacctcacaccggtcccagaacagagaattgctctcactacaccagtttatcaattggtctgtagctggtgttgctatggtgctacctcttttctcaccacctagtgttctatcccgtcttacatctatattcttgggttttgctcctccatttctgctgctttccattggctatgaagcagttttctatagcgcttttgcaatggtactcattggatggatatttgtggaatctgccaacctgtattgctcagaagaaagtggttctgcacgtcgcagaagccttgcggataactcagtttttggctatgaagaaagacacctgcgactatctgatttaagaatccctttgttatttgtgatattatttaatgtcgccttctttggtactggtaattttgcaagtattgcaagctttgagatctcgtctgtgtacagattcattacagtttttagtccatttcttatggcaggacttcttatctttaagttgtttattccgtttatgcttgtcatatgtacgtttagtgcgatcaccaaggtcgtccgtatcccacggctgggctgttattttcttgtaatactgctttcagatgtaatgactattcatttctttttcctggtacggaataccggtagttggatggaaatcggcaacagcattagccatttcggaatagtgagcgcccaagtggtcttcgttttgctgctctttgccctcacgaatatatacactagagatattttggtctcgtctcggcaactaaccgcacggaaagttatgtaaatcgttcagtttatttagaaatccaaatacatccatccttttatttattcatttttgggtcgactttcattttgggatcaagtttgtagcttagcttttggctaaagttttgtagcttagcttttttgttttctgtgaatggaccttggtgtcaaatttttgtgctaatttcattcgcttacttacagcctgaacagattttacgtacaccattataactatattagctttcctctcgggctatgataaactgaagttgtcttgatctagttcttctcagagttgaagttgatgaagcaatcactggaggcggagcttaaaattac

SEQ ID NO: 50604 - DNA, 3709 bp, Zea Mays
gtctttacgacgcattcgcattcgcgctcacctccagaaccgagatccaccaccgcgcaccttcacgactcggccggcgctccgtcactcatgatggccggccgcccgcgcccgcagacggagctgcactcgccgtccgcctccacgcggcggcgtgagcggtggctggttgtactcggcgtcgcactccacgccgtgtacatgctcagcatcttcgacatatacttcaagtcccccatcgtgcacggcatggatcccgtgccgcctcgcctctcggcgccccccgccaagcgcctcgtcctcctcgtcgcggacgggctcagggcggacaagttcttcgagcccgacgaacgggggaggtacagagcgccgttcctgcgcggtgtgatcgaggagaagggccggtggggagtcagccacgcgcgcccgcccaccgagtccaggcccggccatgtctccctcatcgctggcttctacgaggaccctagtgctgtcaccaaaggatggaaggccaatccagttgagtttgattctgtattcaatcagagtcggcacactatctcatttggaagtccagatattgttcctatattctgcagtaacctacctcacagtacctgggacacttatccccatgaatatgaagactttgcaacagatgcatcatttctggatcattggtcatttgaccagtttcaagatcttgtcaacaggtcttttgacgatattaaattgaggcagttactcctacaagataagttggttatatttttgcatttactgggttgtgataccaatggccatgcacaccgaccctattcaagcatatacctgaacaatgtcaaggttgttgaccaaatagctgaaagtgtgtacaatcttatggagaactacttcaatgacaatcaaacagcatacgtgtttactgcagatcatggaatgagtgacaaaggaagccatggagacggacacccttcaaacacagatactcctcttgtggcatggggtgctggaattagaagcccaaagttcctggcttatacagagaaacctgatgacggctttcggtttgtagataaccacaaacatgatacacccactccaaaagactgggcccttgaaggatttgaaagagtagatgtcaaccaggctgacatagctcccctaatggctacacttgtgggtttgccatgcccgatgaattctgtggggagcttacctactccttatttgaaactaaggaaggctgatgaagttgaagccgttctggccaatacaaagcaaattcttaaccagtttctccgaaagtcacgtatcctttcaaaacaatttttgttacatacttgaactgcagaattttcctactccatgcttataagcttgtagtatggtattgtgaatgggtgctagagacatcattattgatctttaattagagtcacccataacagtaggctactccatgctgttagctataatctcagcagtcattcaatttcttttttccttaatgaaaaagtatgatgaccaagactaccaaattaaacaacaaaccatactgttacccctaagcatgtcttcccttatcgatctcagagctgaaggaatccagttcactctacttcaaaccttttaagccactggcgaacttttctttagtgctcagtcagattgaggatcttatatctggaagggactatgaaactgccatggagcaatctgaggagctccgaaggctggctcttgctgggcttcattatttccaaacatatgattggttcatgttaatgactacaattacccttggatatattggatggatggtgaacctcattatacatgtgctacagtcttatacatcatatcctgtaattcttctcaagagggctcaattgtatcctaacaatacctccatgaaagtttacatttgtggatgcttctttatgggtttgtcatccattttgctacttctagagaaatcaccacttctttaccatgcttatgtattgtgcacaatattcctttggacaagaattgtacaaaaaattgattttttgaagtccgtatggagagaactagctaatatgcccttcaagtatatttttaatctcctgaccagttcagttgttgcactgcttgtattggagtttctggtatgtacccacatattgacacagctatcattttaagacttcatggaatttgatgtgaaatttgatacttgtgggcaggttatgagcttctttgataggaaaatttatacgtggtgcttcttggtccttgggatactcggttcaacatatgtagcattgtttattcaagctagtgctgcacttgcgatatacatatggcttgcttgctggttcctgtctgtatttactttgatgccagctgaaattccagaaaacaacaacttggtaatttttagtggagggctcataatacttattggattagcttcaagatggattaaatcaaatagttccagcttttggctatatctcactcgagcaaataaacgggatcctcaatcttttaaactctattttgttcaggttattttagtcgcaatatcttcgataatggtgtggctatctacctcacaccggtcccagaacagagaattgctctcactacaccagtttatcaattggtctgtagctggtgttgctatggtgctacctcttttctcaccacctagtgttctatcccgtcttacatctatattcttgggttttgctcctccatttctgctgctttccattggctatgaagcagttttctatagcgcttttgcaatggtactcattggatggatatttgtggaatctgccaacctgtattgctcagaagaaagtggttctgcacgtcgcagaagccttgcggataactcagtttttggctatgaagaaagacacctgcgactatctgatttaagaatccctttgttatttgtgatattatttaatgtcgccttctttggtactggtaattttgcaagtattgcaagctttgagatctcgtctgtgtacagattcattacagtttttagtccatttcttatggcaggacttcttatctttaagttgtttattccgtttatgcttgtcatatgtacgtttagtgcgatcaccaaggtcgtccgtatcccacggctgggctgttattttcttgtaatactgctttcagatgtaatgactattcatttctttttcctggtacggaataccggtagttggatggaaatcggcaacagcattagccatttcggaatagtgagcgcccaagtggtcttcgttttgctgctctttgccctcacgaatatatacactagagatattttggtctcgtctcggcaactaaccgcacggaaagttatgtaaatcgttcagtttatttagaaatccaaatacatccatccttttatttattcatttttgggtcgactttcattttgggatcaagtttgtagcttagcttttggctaaagttttgtagcttagcttttttgttttctgtgaatggaccttggtgtcaaatttttgtgctaatttcattcgcttacttacagcctgaacagattttacgtacaccattataactatattagctttcctctcgggctatgataaactgaagttgtcttgatctagttcttctcagagttgaagttgatgaagcaatcactggaggcggagcttaaaattac

SEQ ID NO: 50605 - DNA, 3170 bp, Zea Mays
gtctttacgacgcattcgcattcgcgctcacctccagaaccgagatccaccaccgcgcaccttcacgactcggccggcgctccgtcactcatgatggccggccgcccgcgcccgcagacggagctgcactcgccgtccgcctccacgcggcggcgtgagcggtggctggttgtactcggcgtcgcactccacgccgtgtacatgctcagcatcttcgacatatacttcaagtcccccatcgtgcacggcatggatcccgtgccgcctcgcctctcggcgccccccgccaagcgcctcgtcctcctcgtcgcggacgggctcagggcggacaagttcttcgagcccgacgaacgggggaggtacagagcgccgttcctgcgcggtgtgatcgaggagaagggccggtggggagtcagccacgcgcgcccgcccaccgagtccaggcccggccatgtctccctcatcgctggcttctacgaggaccctagtgctgtcaccaaaggatggaaggccaatccagttgagtttgattctgtattcaatcagagtcggcacactatctcatttggaagtccagatattgttcctatattctgcagtaacctacctcacagtacctgggacacttatccccatgaatatgaagactttgcaacagatgcatcatttctggatcattggtcatttgaccagtttcaagatcttgtcaacaggtcttttgacgatattaaattgaggcagttactcctacaagataagttggttatatttttgcatttactgggttgtgataccaatggccatgcacaccgaccctattcaagcatatacctgaacaatgtcaaggttgttgaccaaatagctgaaagtgtgtacaatcttatggagaactacttcaatgacaatcaaacagcatacgtgtttactgcagatcatggaatgagtgacaaaggaagccatggagacggacacccttcaaacacagatactcctcttgtggcatggggtgctggaattagaagcccaaagttcctggcttatacagagaaacctgatgacggctttcggtttgtagataaccacaaacatgatacacccactccaaaagactgggcccttgaaggatttgaaagagtagatgtcaaccaggctgacatagctcccctaatggctacacttgtgggtttgccatgcccgatgaattctgtggggagcttacctactccttatttgaaactaaggaaggctgatgaagttgaagccgttctggccaatacaaagcaaattcttaaccagtttctccgaaagtcacattgaggatcttatatctggaagggactatgaaactgccatggagcaatctgaggagctccgaaggctggctcttgctgggcttcattatttccaaacatatgattggttcatgttaatgactacaattacccttggatatattggatggatggtgaacctcattatacatgtgctacagtcttatacatcatatcctgtaattcttctcaagagggctcaattgtatcctaacaatacctccatgaaagtttacatttgtggatgcttctttatgggtttgtcatccattttgctacttctagagaaatcaccacttctttaccatgcttatgtattgtgcacaatattcctttggacaagaattgtacaaaaaattgattttttgaagtccgtatggagagaactagctaatatgcccttcaagtatatttttaatctcctgaccagttcagttgttgcactgcttgtattggagtttctggttatgagcttctttgataggaaaatttatacgtggtgcttcttggtccttgggatactcggttcaacatatgtagcattgtttattcaagctagtgctgcacttgcgatatacatatggcttgcttgctggttcctgtctgtatttactttgatgccagctgaaattccagaaaacaacaacttggtaatttttagtggagggctcataatacttattggattagcttcaagatggattaaatcaaatagttccagcttttggctatatctcactcgagcaaataaacgggatcctcaatcttttaaactctattttgttcaggttattttagtcgcaatatcttcgataatggtgtggctatctacctcacaccggtcccagaacagagaattgctctcactacaccagtttatcaattggtctgtagctgctatgaagcagttttctatagcgcttttgcaatggtactcattggatggatatttgtggaatctgccaacctgtattgctcagaagaaagtggttctgcacgtcgcagaagccttgcggataactcagtttttggctatgaagaaagacacctgcgactatctgatttaagaatccctttgttatttgtgatattatttaatgtcgccttctttggtactggtaattttgcaagtattgcaagctttgagatctcgtctgtgtacagattcattacagtttttagtccatttcttatggcaggacttcttatctttaagttgtttattccgtttatgcttgtcatatgtacgtttagtgcgatcaccaaggtcgtccgtatcccacggctgggctgttattttcttgtaatactgctttcagatgtaatgactattcatttctttttcctggtacggaataccggtagttggatggaaatcggcaacagcattagccatttcggaatagtgagcgcccaagtggtcttcgttttgctgctctttgccctcacgaatatatacactagagatattttggtctcgtctcggcaactaaccgcacggaaagttatgtaaatcgttcagtttatttagaaatccaaatacatccatccttttatttattcatttttgggtcgactttcattttgggatcaagtttgtagcttagcttttggctaaagttttgtagcttagcttttttgttttctgtgaatggaccttggtgtcaaatttttgtgctaatttcattcgcttacttacagcctgaacagattttacgtacaccattataactatattagctttcctctcgggctatgataaactgaagttgtcttgatctagttcttctcagagttgaagttgatgaagcaatcactggaggcggagcttaaaattac

SEQ ID NO: 50606 - DNA, 3861 bp, Zea Mays
gtctttacgacgcattcgcattcgcgctcacctccagaaccgagatccaccaccgcgcaccttcacgactcggccggcgctccgtcactcatgatggccggccgcccgcgcccgcagacggagctgcactcgccgtccgcctccacgcggcggcgtgagcggtggctggttgtactcggcgtcgcactccacgccgtgtacatgctcagcatcttcgacatatacttcaagtcccccatcgtgcacggcatggatcccgtgccgcctcgcctctcggcgccccccgccaagcgcctcgtcctcctcgtcgcggacgggctcagggcggacaagttcttcgagcccgacgaacgggggaggtacagagcgccgttcctgcgcggtgtgatcgaggagaagggccggtggggagtcagccacgcgcgcccgcccaccgagtccaggcccggccatgtctccctcatcgctggcttctacgaggaccctagtgctgtcaccaaaggatggaaggccaatccagttgagtttgattctgtattcaatcagagtcggcacactatctcatttggaagtccagatattgttcctatattctgcagtaacctacctcacagtacctgggacacttatccccatgaatatgaagactttgcaacagatgcatcatttctggatcattggtcatttgaccagtttcaagatcttgtcaacaggtcttttgacgatattaaattgaggcagttactcctacaagataagttggttatatttttgcatttactgggttgtgataccaatggccatgcacaccgaccctattcaagcatatacctgaacaatgtcaaggttgttgaccaaatagctgaaagtgtgtacaatcttatggagaactacttcaatgacaatcaaacagcatacgtgtttactgcagatcatggaatgagtgacaaaggaagccatggagacggacacccttcaaacacagatactcctcttgtggcatggggtgctggaattagaagcccaaagttcctggcttatacagagaaacctgatgacggctttcggtttgtagataaccacaaacatgatacacccactccaaaagactgggcccttgaaggatttgaaagagtagatgtcaaccaggctgacatagctcccctaatggctacacttgtgggtttgccatgcccgatgaattctgtggggagcttacctactccttatttgaaactaaggaaggctgatgaagttgaagccgttctggccaatacaaagcaaattcttaaccagtttctccgaaagtcacactaccaaattaaacaacaaaccatactgttacccctaagcatgtcttcccttatcgatctcagagctgaaggaatccagttcactctacttcaaaccttttaagccactggcgaacttttctttagtgctcagtcagattgaggatcttatatctggaagggactatgaaactgccatggagcaatctgaggagctccgaaggctggctcttgctgggcttcattatttccaaacatatgattggttcatgttaatgactacaattacccttggatatattggatggatggtgaacctcattatacatgtgctacagtcttatacatcatatcctgtaattcttctcaagagggctcaattgtatcctaacaatacctccatgaaagtttacatttgtggatgcttctttatgggtttgtcatccattttgctacttctagagaaatcaccacttctttaccatgcttatgtattgtgcacaatattcctttggacaagaattgtacaaaaaattgattttttgaagtccgtatggagagaactagctaatatgcccttcaagtatatttttaatctcctgaccagttcagttgttgcactgcttgtattggagtttctggttatgagcttctttgataggaaaatttatacgtggtgcttcttggtccttgggatactcggttcaacatatgtagcattgtttattcaagctagtgctgcacttgcgatatacatatggcttgcttgctggttcctgtctgtatttactttgatgccagctgaaattccagaaaacaacaacttggtaatttttagtggagggctcataatacttattggattagcttcaagatggattaaatcaaatagttccagcttttggctatatctcactcgagcaaataaacgggatcctcaatcttttaaactctattttgttcaggttattttagtcgcaatatcttcgataatggtgtggctatctacctcacaccggtcccagaacagagaattgctctcactacaccagtttatcaattggtctgtagctggtgttgctatggtgctacctcttttctcaccacctagtgttctatcccgtcttacatctatattcttgggttttgctcctccatttctgctgctttccattggctatgaagcagttttctatagcgcttttgcaatggtactcattggatggatatttgtggaatctgccaacctgtattgctcagaagaaagtggttctgcacgtcgcagaagccttgcggataactcagtttttggctatgaagaaagacacctgcgactatctgatttaagaatccctttgttatttgtgatattatttaatgtcgccttctttggtactggtaattttgcaagtattgcaagctttgagatctcgtctgtgtacagattcattacagtttttagtccatttcttatggcaggacttcttatctttaagttgtttattccgtttatgcttgtcatgtaagttttttttaaccttgttaactttatgctacatgatgtcatggagttaaagttaaatgaagatgtgctgaattcgatttcagtgtacagttatttttatttttcaaaatatgaatatacgatactttaatgaaagttcttgtcacaaattaggtcaccatttgctatagaaagataaaaacaggcaacgatccatttataatttaatgttcgttttgatatctatatagactttatatactatctgcatagttatctgttgagcaactttaagattattttgggagttcctgcacagggtaacaagctataacaaataaaatgtgaagaagacagttttctccaaatgttaggtctttgacatttttctataacacttcagcttaaatatgtacttttttcttttaatttgcgctgaacttgatgctaccttggtgacaagtgcagatgtacgtttagtgcgatcaccaaggtcgtccgtatcccacggctgggctgttattttcttgtaatactgctttcagatgtaatgactattcatttctttttcctggtacggaataccggtagttggatggaaatcggcaacagcattagccatttcggaatagtgagcgcccaagtggtcttcgttttgctgctctttgccctcacgaatatatacactagagatattttggtctcgtctcggcaactaaccgcacggaaagttatgtaaatcgttcagtttatttagaaatccaaatacatccatccttttatttattcatttttgggtcgactttcattttgggatcaagtttgtagcttagcttttggctaaagttttgtagcttagcttttttgttttctgtgaatggaccttggtgtcaaatttttgtgctaatttcattcgcttacttacagcctgaacagattttacgtacaccattataactatattagctttcctctcgggctatgataaactgaagttgtcttgatctagttcttctcagagttgaagttgatgaagcaatcactggaggcggagcttaaaattac

SEQ ID NO: 50607 - DNA, 3761 bp, Zea Mays
gtctttacgacgcattcgcattcgcgctcacctccagaaccgagatccaccaccgcgcaccttcacgactcggccggcgctccgtcactcatgatggccggccgcccgcgcccgcagacggagctgcactcgccgtccgcctccacgcggcggcgtgagcggtggctggttgtactcggcgtcgcactccacgccgtgtacatgctcagcatcttcgacatatacttcaagtcccccatcgtgcacggcatggatcccgtgccgcctcgcctctcggcgccccccgccaagcgcctcgtcctcctcgtcgcggacgggctcagggcggacaagttcttcgagcccgacgaacgggggaggtacagagcgccgttcctgcgcggtgtgatcgaggagaagggccggtggggagtcagccacgcgcgcccgcccaccgagtccaggcccggccatgtctccctcatcgctggcttctacgaggaccctagtgctgtcaccaaaggatggaaggccaatccagttgagtttgattctgtattcaatcagagtcggcacactatctcatttggaagtccagatattgttcctatattctgcagtaacctacctcacagtacctgggacacttatccccatgaatatgaagactttgcaacaggtcttttgacgatattaaattgaggcagttactcctacaagataagttggttatatttttgcatttactgggttgtgataccaatggccatgcacaccgaccctattcaagcatatacctgaacaatgtcaaggttgttgaccaaatagctgaaagtgtgtacaatcttatggagaactacttcaatgacaatcaaacagcatacgtgtttactgcagatcatggaatgagtgacaaaggaagccatggagacggacacccttcaaacacagatactcctcttgtggcatggggtgctggaattagaagcccaaagttcctggcttatacagagaaacctgatgacggctttcggtttgtagataaccacaaacatgatacacccactccaaaagactgggcccttgaaggatttgaaagagtagatgtcaaccaggctgacatagctcccctaatggtggcttgaaaatctccatgctacacttgtgggtttgccatgcccgatgaattctgtggggagcttacctactccttatttgaaactaaggaaggctgatgaagttgaagccgttctggccaatacaaagcaaattcttaaccagtttctccgaaagtcacagctgaaggaatccagttcactctacttcaaaccttttaagccactggcgaacttttctttagtgctcagtcagattgaggatcttatatctggaagggactatgaaactgccatggagcaatctgaggagctccgaaggctggctcttgctgggcttcattatttccaaacatatgattggttcatgttaatgactacaattacccttggatatattggatggatggtgaacctcattatacatgtgctacagtcttatacatcatatcctgtaattcttctcaagagggctcaattgtatcctaacaatacctccatgaaagtttacatttgtggatgcttctttatgggtttgtcatccattttgctacttctagagaaatcaccacttctttaccatgcttatgtattgtgcacaatattcctttggacaagaattgtacaaaaaattgattttttgaagtccgtatggagagaactagctaatatgcccttcaagtatatttttaatctcctgaccagttcagttgttgcactgcttgtattggagtttctggttatgagcttctttgataggaaaatttatacgtggtgcttcttggtccttgggatactcggttcaacatatgtagcattgtttattcaagctagtgctgcacttgcgatatacatatggcttgcttgctggttcctgtctgtatttactttgatgccagctgaaattccagaaaacaacaacttggtaatttttagtggagggctcataatacttattggattagcttcaagatggattaaatcaaatagttccagcttttggctatatctcactcgagcaaataaacgggatcctcaatcttttaaactctattttgttcaggttattttagtcgcaatatcttcgataatggtgtggctatctacctcacaccggtcccagaacagagaattgctctcactacaccagtttatcaattggtctgtagctggtgttgctatggtgctacctcttttctcaccacctagtgttctatcccgtcttacatctatattcttgggttttgctcctccatttctgctgctttccattggctatgaagcagttttctatagcgcttttgcaatggtactcattggatggatatttgtggaatctgccaacctgtattgctcagaagaaagtggttctgcacgtcgcagaagccttgcggataactcagtttttggctatgaagaaagacacctgcgactatctgatttaagaatccctttgttatttgtgatattatttaatgtcgccttctttggtactggtaattttgcaagtattgcaagctttgagatctcgtctgtgtacagattcattacagtttttagtccatttcttatggcaggacttcttatctttaagttgtttattccgtttatgcttgtcatgtaagttttttttaaccttgttaactttatgctacatgatgtcatggagttaaagttaaatgaagatgtgctgaattcgatttcagtgtacagttatttttatttttcaaaatatgaatatacgatactttaatgaaagttcttgtcacaaattaggtcaccatttgctatagaaagataaaaacaggcaacgatccatttataatttaatgttcgttttgatatctatatagactttatatactatctgcatagttatctgttgagcaactttaagattattttgggagttcctgcacagggtaacaagctataacaaataaaatgtgaagaagacagttttctccaaatgttaggtctttgacatttttctataacacttcagcttaaatatgtacttttttcttttaatttgcgctgaacttgatgctaccttggtgacaagtgcagatgtacgtttagtgcgatcaccaaggtcgtccgtatcccacggctgggctgttattttcttgtaatactgctttcagatgtaatgactattcatttctttttcctggtacggaataccggtagttggatggaaatcggcaacagcattagccatttcggaatagtgagcgcccaagtggtcttcgttttgctgctctttgccctcacgaatatatacactagagatattttggtctcgtctcggcaactaaccgcacggaaagttatgtaaatcgttcagtttatttagaaatccaaatacatccatccttttatttattcatttttgggtcgactttcattttgggatcaagtttgtagcttagcttttggctaaagttttgtagcttagcttttttgttttctgtgaatggaccttggtgtcaaatttttgtgctaatttcattcgcttacttacagcctgaacagattttacgtacaccattataactatattagctttcctctcgggctatgataaactgaagttgtcttgatctagttcttctcagagttgaagttgatgaagcaatcactggaggcggagcttaaaattac

SEQ ID NO: 50608 - DNA, 3443 bp, Zea Mays
gtctttacgacgcattcgcattcgcgctcacctccagaaccgagatccaccaccgcgcaccttcacgactcggccggcgctccgtcactcatgatggccggccgcccgcgcccgcagacggagctgcactcgccgtccgcctccacgcggcggcgtgagcggtggctggttgtactcggcgtcgcactccacgccgtgtacatgctcagcatcttcgacatatacttcaagtcccccatcgtgcacggcatggatcccgtgccgcctcgcctctcggcgccccccgccaagcgcctcgtcctcctcgtcgcggacgggctcagggcggacaagttcttcgagcccgacgaacgggggaggtacagagcgccgttcctgcgcggtgtgatcgaggagaagggccggtggggagtcagccacgcgcgcccgcccaccgagtccaggcccggccatgtctccctcatcgctggcttctacgaggaccctagtgctgtcaccaaaggatggaaggccaatccagttgagtttgattctgtattcaatcagagtcggcacactatctcatttggaagtccagatattgttcctatattctgcagtaacctacctcacagtacctgggacacttatccccatgaatatgaagactttgcaacagatgcatcatttctggatcattggtcatttgaccagtttcaagatcttgtcaacaggtcttttgacgatattaaattgaggcagttactcctacaagataagttggttatatttttgcatttactgggttgtgataccaatggccatgcacaccgaccctattcaagcatatacctgaacaatgtcaaggttgttgaccaaatagctgaaagtgtgtacaatcttatggagaactacttcaatgacaatcaaacagcatacgtgtttactgcagatcatggaatgagtgacaaaggaagccatggagacggacacccttcaaacacagatactcctcttgtggcatggggtgctggaattagaagcccaaagttcctggcttatacagagaaacctgatgacggctttcggtttgtagataaccacaaacatgatacacccactccaaaagactgggcccttgaaggatttgaaagagtagatgtcaaccaggctgacatagctcccctaatggtggcttgaaaatctccatgctacacttgtgggtttgccatgcccgatgaattctgtggggagcttacctactccttatttgaaactaaggaaggctgatgaagttgaagccgttctggccaatacaaagcaaattcttaaccagtttctccgaaagtcactatgatgaccaagactaccaaattaaacaacaaaccatactgttacccctaagcatgtcttcccttatcgatctcagagctgaaggaatccagttcactctacttcaaaccttttaagccactggcgaacttttctttagtgctcagtcagattgaggatcttatatctggaagggactatgaaactgccatggagcaatctgaggagctccgaaggctggctcttgctgggcttcattatttccaaacatatgattggttcatgttaatgactacaattacccttggatatattggatggatggtgaacctcattatacatgtgctacagtcttatacatcatatcctgtaattcttctcaagagggctcaattgtatcctaacaatacctccatgaaagtttacatttgtggatgcttctttatgggtttgtcatccattttgctacttctagagaaatcaccacttctttaccatgcttatgtattgtgcacaatattcctttggacaagaattgtacaaaaaattgattttttgaagtccgtatggagagaactagctaatatgcccttcaagtatatttttaatctcctgaccagttcagttgttgcactgcttgtattggagtttctggttatgagcttctttgataggaaaatttatacgtggtgcttcttggtccttgggatactcggttcaacatatgtagcattgtttattcaagctagtgctgcacttgcgatatacatatggcttgcttgctggttcctgtctgtatttactttgatgccagctgaaattccagaaaacaacaacttggtaatttttagtggagggctcataatacttattggattagcttcaagatggattaaatcaaatagttccagcttttggctatatctcactcgagcaaataaacgggatcctcaatcttttaaactctattttgttcaggttattttagtcgcaatatcttcgataatggtgtggctatctacctcacaccggtcccagaacagagaattgctctcactacaccagtttatcaattggtctgtagctggtgttgctatggtgctacctcttttctcaccacctagtgttctatcccgtcttacatctatattcttgggttttgctcctccatttctgctgctttccattggctatgaagcagttttctatagcgcttttgcaatggtactcattggatggatatttgtggaatctgccaacctgtattgctcagaagaaagtggttctgcacgtcgcagaagccttgcggataactcagtttttggctatgaagaaagacacctgcgactatctgatttaagaatccctttgttatttgtgatattatttaatgtcgccttctttggtactggtaattttgcaagtattgcaagctttgagatctcgtctgtgtacagattcattacagtttttagtccatttcttatggcaggacttcttatctttaagttgtttattccgtttatgcttgtcatatgtacgtttagtgcgatcaccaaggtcgtccgtatcccacggctgggctgttattttcttgtaatactgctttcagatgtaatgactattcatttctttttcctggtacggaataccggtagttggatggaaatcggcaacagcattagccatttcggaatagtgagcgcccaagtggtcttcgttttgctgctctttgccctcacgaatatatacactagagatattttggtctcgtctcggcaactaaccgcacggaaagttatgtaaatcgttcagtttatttagaaatccaaatacatccatccttttatttattcatttttgggtcgactttcattttgggatcaagtttgtagcttagcttttggctaaagttttgtagcttagcttttttgttttctgtgaatggaccttggtgtcaaatttttgtgctaatttcattcgcttacttacagcctgaacagattttacgtacaccattataactatattagctttcctctcgggctatgataaactgaagttgtcttgatctagttcttctcagagttgaagttgatgaagcaatcactggaggcggagcttaaaattac

SEQ ID NO: 50609 - DNA, 3292 bp, Zea Mays
gtctttacgacgcattcgcattcgcgctcacctccagaaccgagatccaccaccgcgcaccttcacgactcggccggcgctccgtcactcatgatggccggccgcccgcgcccgcagacggagctgcactcgccgtccgcctccacgcggcggcgtgagcggtggctggttgtactcggcgtcgcactccacgccgtgtacatgctcagcatcttcgacatatacttcaagtcccccatcgtgcacggcatggatcccgtgccgcctcgcctctcggcgccccccgccaagcgcctcgtcctcctcgtcgcggacgggctcagggcggacaagttcttcgagcccgacgaacgggggaggtacagagcgccgttcctgcgcggtgtgatcgaggagaagggccggtggggagtcagccacgcgcgcccgcccaccgagtccaggcccggccatgtctccctcatcgctggcttctacgaggaccctagtgctgtcaccaaaggatggaaggccaatccagttgagtttgattctgtattcaatcagagtcggcacactatctcatttggaagtccagatattgttcctatattctgcagtaacctacctcacagtacctgggacacttatccccatgaatatgaagactttgcaacaggtcttttgacgatattaaattgaggcagttactcctacaagataagttggttatatttttgcatttactgggttgtgataccaatggccatgcacaccgaccctattcaagcatatacctgaacaatgtcaaggttgttgaccaaatagctgaaagtgtgtacaatcttatggagaactacttcaatgacaatcaaacagcatacgtgtttactgcagatcatggaatgagtgacaaaggaagccatggagacggacacccttcaaacacagatactcctcttgtggcatggggtgctggaattagaagcccaaagttcctggcttatacagagaaacctgatgacggctttcggtttgtagataaccacaaacatgatacacccactccaaaagactgggcccttgaaggatttgaaagagtagatgtcaaccaggctgacatagctcccctaatggctacacttgtgggtttgccatgcccgatgaattctgtggggagcttacctactccttatttgaaactaaggaaggctgatgaagttgaagccgttctggccaatacaaagcaaattcttaaccagtttctccgaaagtcacagctgaaggaatccagttcactctacttcaaaccttttaagccactggcgaacttttctttagtgctcagtcagattgaggatcttatatctggaagggactatgaaactgccatggagcaatctgaggagctccgaaggctggctcttgctgggcttcattatttccaaacatatgattggttcatgttaatgactacaattacccttggatatattggatggatggtgaacctcattatacatgtgctacagtcttatacatcatatcctgtaattcttctcaagagggctcaattgtatcctaacaatacctccatgaaagtttacatttgtggatgcttctttatgggtttgtcatccattttgctacttctagagaaatcaccacttctttaccatgcttatgtattgtgcacaatattcctttggacaagaattgtacaaaaaattgattttttgaagtccgtatggagagaactagctaatatgcccttcaagtatatttttaatctcctgaccagttcagttgttgcactgcttgtattggagtttctggttatgagcttctttgataggaaaatttatacgtggtgcttcttggtccttgggatactcggttcaacatatgtagcattgtttattcaagctagtgctgcacttgcgatatacatatggcttgcttgctggttcctgtctgtatttactttgatgccagctgaaattccagaaaacaacaacttggtaatttttagtggagggctcataatacttattggattagcttcaagatggattaaatcaaatagttccagcttttggctatatctcactcgagcaaataaacgggatcctcaatcttttaaactctattttgttcaggttattttagtcgcaatatcttcgataatggtgtggctatctacctcacaccggtcccagaacagagaattgctctcactacaccagtttatcaattggtctgtagctggtgttgctatggtgctacctcttttctcaccacctagtgttctatcccgtcttacatctatattcttgggttttgctcctccatttctgctgctttccattggctatgaagcagttttctatagcgcttttgcaatggtactcattggatggatatttgtggaatctgccaacctgtattgctcagaagaaagtggttctgcacgtcgcagaagccttgcggataactcagtttttggctatgaagaaagacacctgcgactatctgatttaagaatccctttgttatttgtgatattatttaatgtcgccttctttggtactggtaattttgcaagtattgcaagctttgagatctcgtctgtgtacagattcattacagtttttagtccatttcttatggcaggacttcttatctttaagttgtttattccgtttatgcttgtcatatgtacgtttagtgcgatcaccaaggtcgtccgtatcccacggctgggctgttattttcttgtaatactgctttcagatgtaatgactattcatttctttttcctggtacggaataccggtagttggatggaaatcggcaacagcattagccatttcggaatagtgagcgcccaagtggtcttcgttttgctgctctttgccctcacgaatatatacactagagatattttggtctcgtctcggcaactaaccgcacggaaagttatgtaaatcgttcagtttatttagaaatccaaatacatccatccttttatttattcatttttgggtcgactttcattttgggatcaagtttgtagcttagcttttggctaaagttttgtagcttagcttttttgttttctgtgaatggaccttggtgtcaaatttttgtgctaatttcattcgcttacttacagcctgaacagattttacgtacaccattataactatattagctttcctctcgggctatgataaactgaagttgtcttgatctagttcttctcagagttgaagttgatgaagcaatcactggaggcggagcttaaaattac

SEQ ID NO: 50610 - DNA, 3326 bp, Zea Mays
ttcgcattcgcgctcacctccagaaccgagatccaccaccgcgcaccttcacgactcggccggcgctccgtcactcatgatggccggccgcccgcgcccgcagacggagctgcactcgccgtccgcctccacgcggcggcgtgagcggtggctggttgtactcggcgtcgcactccacgccgtgtacatgctcagcatcttcgacatatacttcaagtcccccatcgtgcacggcatggatcccgtgccgcctcgcctctcggcgccccccgccaagcgcctcgtcctcctcgtcgcggacgggctcagggcggacaagttcttcgagcccgacgaacgggggaggtacagagcgccgttcctgcgcggtgtgatcgaggagaagggccggtggggagtcagccacgcgcgcccgcccaccgagtccaggcccggccatgtctccctcatcgctggcttctacgaggaccctagtgctgtcaccaaaggatggaaggccaatccagttgagtttgattctgtattcaatcagagtcggcacactatctcatttggaagtccagatattgttcctatattctgcagtaacctacctcacagtacctgggacacttatccccatgaatatgaagactttgcaacagatgcatcatttctggatcattggtcatttgaccagtttcaagatcttgtcaacaggtcttttgacgatattaaattgaggcagttactcctacaagataagttggttatatttttgcatttactgggttgtgataccaatggccatgcacaccgaccctattcaagcatatacctgaacaatgtcaaggttgttgaccaaatagctgaaagtgtgtacaatcttatggagaactacttcaatgacaatcaaacagcatacgtgtttactgcagatcatggaatgagtgacaaaggaagccatggagacggacacccttcaaacacagatactcctcttgtggcatggggtgctggaattagaagcccaaagttcctggcttatacagagaaacctgatgacggctttcggtttgtagataaccacaaacatgatacacccactccaaaagactgggcccttgaaggatttgaaagagtagatgtcaaccaggctgacatagctcccctaatggctacacttgtgggtttgccatgcccgatgaattctgtggggagcttacctactccttatttgaaactaaggaaggctgatgaagttgaagccgttctggccaatacaaagcaaattcttaaccagtttctccgaaagtcacagctgaaggaatccagttcactctacttcaaaccttttaagccactggcgaacttttctttagtgctcagtcagattgaggatcttatatctggaagggactatgaaactgccatggagcaatctgaggagctccgaaggctggctcttgctgggcttcattatttccaaacatatgattggttcatgttaatgactacaattacccttggatatattggatggatggtgaacctcattatacatgtgctacagtcttatacatcatatcctgtaattcttctcaagagggctcaattgtatcctaacaatacctccatgaaagtttacatttgtggatgcttctttatgggtttgtcatccattttgctacttctagagaaatcaccacttctttaccatgcttatgtattgtgcacaatattcctttggacaagaattgtacaaaaaattgattttttgaagtccgtatggagagaactagctaatatgcccttcaagtatatttttaatctcctgaccagttcagttgttgcactgcttgtattggagtttctggttatgagcttctttgataggaaaatttatacgtggtgcttcttggtccttgggatactcggttcaacatatgtagcattgtttattcaagctagtgctgcacttgcgatatacatatggcttgcttgctggttcctgtctgtatttactttgatgccagctgaaattccagaaaacaacaacttggtaatttttagtggagggctcataatacttattggattagcttcaagatggattaaatcaaatagttccagcttttggctatatctcactcgagcaaataaacgggatcctcaatcttttaaactctattttgttcaggttattttagtcgcaatatcttcgataatggtgtggctatctacctcacaccggtcccagaacagagaattgctctcactacaccagtttatcaattggtctgtagctggtgttgctatggtgctacctcttttctcaccacctagtgttctatcccgtcttacatctatattcttgggttttgctcctccatttctgctgctttccattggctatgaagcagttttctatagcgcttttgcaatggtactcattggatggatatttgtggaatctgccaacctgtattgctcagaagaaagtggttctgcacgtcgcagaagccttgcggataactcagtttttggctatgaagaaagacacctgcgactatctgatttaagaatccctttgtgatattatttaatgtcgccttctttggtactggtaattttgcaagtattgcaagctttgagatctcgtctgtgtacagattcattacagtttttagtccatttcttatggcaggacttcttatctttaagttgtttattccgtttatgcttgtcatatgtacgtttagtgcgatcaccaaggtcgtccgtatcccacggctgggctgttattttcttgtaatactgctttcagatgtaatgactattcatttctttttcctggtacggaataccggtagttggatggaaatcggcaacagcattagccatttcggaatagtgagcgcccaagtggtcttcgttttgctgctctttgccctcacgaatatatacactagagatattttggtctcgtctcggcaactaaccgcacggaaagttatgtaaatcgttcagtttatttagaaatccaaatacatccatccttttatttattcatttttgggtcgactttcattttgggatcaagtttgtagcttagcttttggctaaagttttgtagcttagcttttttgttttctgtgaatggaccttggtgtcaaatttttgtgctaatttcattcgcttacttacagcctgaacagattttacgtacaccattataactatattagctttcctctcgggctatgataaactgaagttgtcttgatctagttcttctcagagttgaagttgatgaagcaatcactggaggcggagcttaaaattac

SEQ ID NO: 50611 - DNA, 3280 bp, Zea Mays
ttcgcattcgcgctcacctccagaaccgagatccaccaccgcgcaccttcacgactcggccggcgctccgtcactcatgatggccggccgcccgcgcccgcagacggagctgcactcgccgtccgcctccacgcggcggcgtgagcggtggctggttgtactcggcgtcgcactccacgccgtgtacatgctcagcatcttcgacatatacttcaagtcccccatcgtgcacggcatggatcccgtgccgcctcgcctctcggcgccccccgccaagcgcctcgtcctcctcgtcgagcggacgggctcagggcggacaagttcttcgagcccgacgaacgggggaggtacagagcgccgttcctgcgcggtgtgatcgaggagaagggccggtggggagtcagccacgcgcgcccgcccaccgagtccaggcccggccatgtctccctcatcgctggcttctacgaggaccctagtgctgtcaccaaaggatggaaggccaatccagttgagtttgattctgtattcaatcagagtcggcacactatctcatttggaagtccagatattgttcctatattctgcagtaacctacctcacagtacctgggacacttatccccatgaatatgaagactttgcaacaggtcttttgacgatattaaattgaggcagttactcctacaagataagttggttatatttttgcatttactgggttgtgataccaatggccatgcacaccgaccctattcaagcatatacctgaacaatgtcaaggttgttgaccaaatagctgaaagtgtgtacaatcttatggagaactacttcaatgacaatcaaacagcatacgtgtttactgcagatcatggaatgagtgacaaaggaagccatggagacggacacccttcaaacacagatactcctcttgtggcatggggtgctggaattagaagcccaaagttcctggcttatacagagaaacctgatgacggctttcggtttgtagataaccacaaacatgatacacccactccaaaagactgggcccttgaaggatttgaaagagtagatgtcaaccaggctgacatagctcccctaatggctacacttgtgggtttgccatgcccgatgaattctgtggggagcttacctactccttatttgaaactaaggaaggctgatgaagttgaagccgttctggccaatacaaagcaaattcttaaccagtttctccgaaagtcacagctgaaggaatccagttcactctacttcaaaccttttaagccactggcgaacttttctttagtgctcagtcagattgaggatcttatatctggaagggactatgaaactgccatggagcaatctgaggagctccgaaggctggctcttgctgggcttcattatttccaaacatatgattggttcatgttaatgactacaattacccttggatatattggatggatggtgaacctcattatacatgtgctacagtcttatacatcatatcctgtaattcttctcaagagggctcaattgtatcctaacaatacctccatgaaagtttacatttgtggatgcttctttatgggtttgtcatccattttgctacttctagagaaatcaccacttctttaccatgcttatgtattgtgcacaatattcctttggacaagaattgtacaaaaaattgattttttgaagtccgtatggagagaactagctaatatgcccttcaagtatatttttaatctcctgaccagttcagttgttgcactgcttgtattggagtttctggttatgagcttctttgataggaaaatttatacgtggtgcttcttggtccttgggatactcggttcaacatatgtagcattgtttattcaagctagtgctgcacttgcgatatacatatggcttgcttgctggttcctgtctgtatttactttgatgccagctgaaattccagaaaacaacaacttggtaatttttagtggagggctcataatacttattggattagcttcaagatggattaaatcaaatagttccagcttttggctatatctcactcgagcaaataaacgggatcctcaatcttttaaactctattttgttcaggttattttagtcgcaatatcttcgataatggtgtggctatctacctcacaccggtcccagaacagagaattgctctcactacaccagtttatcaattggtctgtagctggtgttgctatggtgctacctcttttctcaccacctagtgttctatcccgtcttacatctatattcttgggttttgctcctccatttctgctgctttccattggctatgaagcagttttctatagcgcttttgcaatggtactcattggatggatatttgtggaatctgccaacctgtattgctcagaagaaagtggttctgcacgtcgcagaagccttgcggataactcagtttttggctatgaagaaagacacctgcgactatctgatttaagaatccctttgttatttgtgatattatttaatgtcgccttctttggtactggtaattttgcaagtattgcaagctttgagatctcgtctgtgtacagattcattacagtttttagtccatttcttatggcaggacttcttatctttaagttgtttattccgtttatgcttgtcatatgtacgtttagtgcgatcaccaaggtcgtccgtatcccacggctgggctgttattttcttgtaatactgctttcagatgtaatgactattcatttctttttcctggtacggaataccggtagttggatggaaatcggcaacagcattagccatttcggaatagtgagcgcccaagtggtcttcgttttgctgctctttgccctcacgaatatatacactagagatattttggtctcgtctcggcaactaaccgcacggaaagttatgtaaatcgttcagtttatttagaaatccaaatacatccatccttttatttattcatttttgggtcgactttcattttgggatcaagtttgtagcttagcttttggctaaagttttgtagcttagcttttttgttttctgtgaatggaccttggtgtcaaatttttgtgctaatttcattcgcttacttacagcctgaacagattttacgtacaccattataactatattagctttcctctcgggctatgataaactgaagttgtcttgatctagttcttctcagagttgaagttgatgaagcaatcactggaggcggagcttaaaattac

SEQ ID NO: 50612 - DNA, 3335 bp, Zea Mays
ttcgcattcgcgctcacctccagaaccgagatccaccaccgcgcaccttcacgactcggccggcgctccgtcactcatgatggccggccgcccgcgcccgcagacggagctgcactcgccgtccgcctccacgcggcggcgtgagcggtggctggttgtactcggcgtcgcactccacgccgtgtacatgctcagcatcttcgacatatacttcaagtcccccatcgtgcacggcatggatcccgtgccgcctcgcctctcggcgccccccgccaagcgcctcgtcctcctcgtcgagcggacgggctcagggcggacaagttcttcgagcccgacgaacgggggaggtacagagcgccgttcctgcgcggtgtgatcgaggagaagggccggtggggagtcagccacgcgcgcccgcccaccgagtccaggcccggccatgtctccctcatcgctggcttctacgaggaccctagtgctgtcaccaaaggatggaaggccaatccagttgagtttgattctgtattcaatcagagtcggcacactatctcatttggaagtccagatattgttcctatattctgcagtaacctacctcacagtacctgggacacttatccccatgaatatgaagactttgcaacagatgcatcatttctggatcattggtcatttgaccagtttcaagatcttgtcaacaggtcttttgacgatattaaattgaggcagttactcctacaagataagttggttatatttttgcatttactgggttgtgataccaatggccatgcacaccgaccctattcaagcatatacctgaacaatgtcaaggttgttgaccaaatagctgaaagtgtgtacaatcttatggagaactacttcaatgacaatcaaacagcatacgtgtttactgcagatcatggaatgagtgacaaaggaagccatggagacggacacccttcaaacacagatactcctcttgtggcatggggtgctggaattagaagcccaaagttcctggcttatacagagaaacctgatgacggctttcggtttgtagataaccacaaacatgatacacccactccaaaagactgggcccttgaaggatttgaaagagtagatgtcaaccaggctgacatagctcccctaatggctacacttgtgggtttgccatgcccgatgaattctgtggggagcttacctactccttatttgaaactaaggaaggctgatgaagttgaagccgttctggccaatacaaagcaaattcttaaccagtttctccgaaagtcacagctgaaggaatccagttcactctacttcaaaccttttaagccactggcgaacttttctttagtgctcagtcagattgaggatcttatatctggaagggactatgaaactgccatggagcaatctgaggagctccgaaggctggctcttgctgggcttcattatttccaaacatatgattggttcatgttaatgactacaattacccttggatatattggatggatggtgaacctcattatacatgtgctacagtcttatacatcatatcctgtaattcttctcaagagggctcaattgtatcctaacaatacctccatgaaagtttacatttgtggatgcttctttatgggtttgtcatccattttgctacttctagagaaatcaccacttctttaccatgcttatgtattgtgcacaatattcctttggacaagaattgtacaaaaaattgattttttgaagtccgtatggagagaactagctaatatgcccttcaagtatatttttaatctcctgaccagttcagttgttgcactgcttgtattggagtttctggttatgagcttctttgataggaaaatttatacgtggtgcttcttggtccttgggatactcggttcaacatatgtagcattgtttattcaagctagtgctgcacttgcgatatacatatggcttgcttgctggttcctgtctgtatttactttgatgccagctgaaattccagaaaacaacaacttggtaatttttagtggagggctcataatacttattggattagcttcaagatggattaaatcaaatagttccagcttttggctatatctcactcgagcaaataaacgggatcctcaatcttttaaactctattttgttcaggttattttagtcgcaatatcttcgataatggtgtggctatctacctcacaccggtcccagaacagagaattgctctcactacaccagtttatcaattggtctgtagctggtgttgctatggtgctacctcttttctcaccacctagtgttctatcccgtcttacatctatattcttgggttttgctcctccatttctgctgctttccattggctatgaagcagttttctatagcgcttttgcaatggtactcattggatggatatttgtggaatctgccaacctgtattgctcagaagaaagtggttctgcacgtcgcagaagccttgcggataactcagtttttggctatgaagaaagacacctgcgactatctgatttaagaatccctttgttatttgtgatattatttaatgtcgccttctttggtactggtaattttgcaagtattgcaagctttgagatctcgtctgtgtacagattcattacagtttttagtccatttcttatggcaggacttcttatctttaagttgtttattccgtttatgcttgtcatatgtacgtttagtgcgatcaccaaggtcgtccgtatcccacggctgggctgttattttcttgtaatactgctttcagatgtaatgactattcatttctttttcctggtacggaataccggtagttggatggaaatcggcaacagcattagccatttcggaatagtgagcgcccaagtggtcttcgttttgctgctctttgccctcacgaatatatacactagagatattttggtctcgtctcggcaactaaccgcacggaaagttatgtaaatcgttcagtttatttagaaatccaaatacatccatccttttatttattcatttttgggtcgactttcattttgggatcaagtttgtagcttagcttttggctaaagttttgtagcttagcttttttgttttctgtgaatggaccttggtgtcaaatttttgtgctaatttcattcgcttacttacagcctgaacagattttacgtacaccattataactatattagctttcctctcgggctatgataaactgaagttgtcttgatctagttcttctcagagttgaagttgatgaagcaatcactggaggcggagcttaaaattac

SEQ ID NO: 50613 - DNA, 3371 bp, Zea Mays
ttcgcattcgcgctcacctccagaaccgagatccaccaccgcgcaccttcacgactcggccggcgctccgtcactcatgatggccggccgcccgcgcccgcagacggagctgcactcgccgtccgcctccacgcggcggcgtgagcggtggctggttgtactcggcgtcgcactccacgccgtgtacatgctcagcatcttcgacatatacttcaagtcccccatcgtgcacggcatggatcccgtgccgcctcgcctctcggcgccccccgccaagcgcctcgtcctcctcgtcgcggacgggctcagggcggacaagttcttcgagcccgacgaacgggggaggtacagagcgccgttcctgcgcggtgtgatcgaggagaagggccggtggggagtcagccacgcgcgcccgcccaccgagtccaggcccggccatgtctccctcatcgctggcttctacgaggaccctagtgctgtcaccaaagtgagtattgtatttggcaggatggaaggccaatccagttgagtttgattctgtattcaatcagagtcggcacactatctcatttggaagtccagatattgttcctatattctgcagtaacctacctcacagtacctgggacacttatccccatgaatatgaagactttgcaacagatgcatcatttctggatcattggtcatttgaccagtttcaagatcttgtcaacaggtcttttgacgatattaaattgaggcagttactcctacaagataagttggttatatttttgcatttactgggttgtgataccaatggccatgcacaccgaccctattcaagcatatacctgaacaatgtcaaggttgttgaccaaatagctgaaagtgtgtacaatcttatggagaactacttcaatgacaatcaaacagcatacgtgtttactgcagatcatggaatgagtgacaaaggaagccatggagacggacacccttcaaacacagatactcctcttgtggcatggggtgctggaattagaagcccaaagttcctggcttatacagagaaacctgatgacggctttcggtttgtagataaccacaaacatgatacacccactccaaaagactgggcccttgaaggatttgaaagagtagatgtcaaccaggctgacatagctcccctaatggtggcttgaaaatctccatgctacacttgtgggtttgccatgcccgatgaattctgtggggagcttacctactccttatttgaaactaaggaaggctgatgaagttgaagccgttctggccaatacaaagcaaattcttaaccagtttctccgaaagtcacagctgaaggaatccagttcactctacttcaaaccttttaagccactggcgaacttttctttagtgctcagtcagattgaggatcttatatctggaagggactatgaaactgccatggagcaatctgaggagctccgaaggctggctcttgctgggcttcattatttccaaacatatgattggttcatgttaatgactacaattacccttggatatattggatggatggtgaacctcattatacatgtgctacagtcttatacatcatatcctgtaattcttctcaagagggctcaattgtatcctaacaatacctccatgaaagtttacatttgtggatgcttctttatgggtttgtcatccattttgctacttctagagaaatcaccacttctttaccatgcttatgtattgtgcacaatattcctttggacaagaattgtacaaaaaattgattttttgaagtccgtatggagagaactagctaatatgcccttcaagtatatttttaatctcctgaccagttcagttgttgcactgcttgtattggagtttctggttatgagcttctttgataggaaaatttatacgtggtgcttcttggtccttgggatactcggttcaacatatgtagcattgtttattcaagctagtgctgcacttgcgatatacatatggcttgcttgctggttcctgtctgtatttactttgatgccagctgaaattccagaaaacaacaacttggtaatttttagtggagggctcataatacttattggattagcttcaagatggattaaatcaaatagttccagcttttggctatatctcactcgagcaaataaacgggatcctcaatcttttaaactctattttgttcaggttattttagtcgcaatatcttcgataatggtgtggctatctacctcacaccggtcccagaacagagaattgctctcactacaccagtttatcaattggtctgtagctggtgttgctatggtgctacctcttttctcaccacctagtgttctatcccgtcttacatctatattcttgggttttgctcctccatttctgctgctttccattggctatgaagcagttttctatagcgcttttgcaatggtactcattggatggatatttgtggaatctgccaacctgtattgctcagaagaaagtggttctgcacgtcgcagaagccttgcggataactcagtttttggctatgaagaaagacacctgcgactatctgatttaagaatccctttgttatttgtgatattatttaatgtcgccttctttggtactggtaattttgcaagtattgcaagctttgagatctcgtctgtgtacagattcattacagtttttagtccatttcttatggcaggacttcttatctttaagttgtttattccgtttatgcttgtcatatgtacgtttagtgcgatcaccaaggtcgtccgtatcccacggctgggctgttattttcttgtaatactgctttcagatgtaatgactattcatttctttttcctggtacggaataccggtagttggatggaaatcggcaacagcattagccatttcggaatagtgagcgcccaagtggtcttcgttttgctgctctttgccctcacgaatatatacactagagatattttggtctcgtctcggcaactaaccgcacggaaagttatgtaaatcgttcagtttatttagaaatccaaatacatccatccttttatttattcatttttgggtcgactttcattttgggatcaagtttgtagcttagcttttggctaaagttttgtagcttagcttttttgttttctgtgaatggaccttggtgtcaaatttttgtgctaatttcattcgcttacttacagcctgaacagattttacgtacaccattataactatattagctttcctctcgggctatgataaactgaagttgtcttgatctagttcttctcagagttgaagttgatgaagcaatcactggaggcggagcttaaaattac

SEQ ID NO: 50614 - DNA, 971 bp, Zea Mays
tcggctgcatctggtccgcccgttccttatcctctcccaccacacaaccacgggttatccagcacccgcgccctcccctccgccacgtcacgccgcccggccacatggcagcggcccagtggccgctcacccccaggcgggataaggcgtcctctccgttccggaccgcagcttaatataaccatgcagtgcaggcccgccgccaaaaggcaaaagctccccaacgaagtgcgagcgacccacgtccacacgacacgaaccaccaccaccaaccagcagccgcaccacgcacccagcgcaaagcgatggcgtcgctcaccatgatggcgtccttccccgccacgctagcagcaaccgaggccaggcccgccgccgacggacgccgcgccgtcatgctcgcggctgctgcggcggccgtggcagccatcggcggcgccggcgccgccatggcgggccccaagaacgggacccccgaggcgaagaagaagtacgcggccatctgcgtcaccatgcccaccgccaaggtctgccacaactgagcacgcccgcgttgcatgcagctgcagggccggggggtggtatataattaatgtacgtgccacggtgttgttgtccctattgttggttcgagctttagatgcatgcctgacgtgaggccgcttaattgctttctgacggcctcggagctgtaagaatatcaagtgcactgcaaaactgaattcggttgaaaccgttcttattttatcattataatttcgttcgtgcatttcgacgacgtacgtggaacgaatggcagcaaaaacgaccagcgttgcgtatataggaacaaactgttgcgtgttctatttgatcagactacaagatgaaaatcacgcgaagctttgctgaggcctgagggagacgaacagacgaggagcacgaggctatgctaggctatgcatcggttggccaaatgggaaattaaaaatgcc

SEQ ID NO: 50615 - DNA, 1148 bp, Zea Mays
ccttcagaatctgtatggaaagcaaggcaaagtaaaatcgaagaaagtttttcacctcaacacaagttgaaagaacataattataactaagttttacccacaagcaaacaaaactgatttgcgcagcattttcaaaaaaaaatgctcgtgtgcagcataccaaaacttcagacaggacaggacttaccagatcgaacatcatctccaacatttcttgtcttgatttgtctcacaagcatccgatatattaaaacccaccaatatatgtggagaacaagtagtgaaaatagaagggaattgaacacataatagtatataggaccatcaaagttgtgcttctttttgtccaaagtcaacaagacctcatagctgaaacgaatggatttagtcagatcatgaaaaaaagaatccaaaaacattgagttggtttacttctacaagcaaagtggtgaatctgttttcttttttttaaaaaagaagccagcaggttaacagttggtctttgtattaattgagaaggtgaaaaacaaggggaaaaccatagttacaacagaaaacaacactaactcacaaacgaataccacaacctcagagtaaaaaaactcaacaagcaccacaacaaacagactgtgaaccggaccaacactgcaatggggtgaatctgtatggtaccttatcagaatttaacatgtccataattatttattatggtatattatggacactgagttatatgatcagaagtccacaaaggtgtgaaatctctaatttgtgccagtggtgcatacaaattacaaaaaatatccaaaacttatttatgtggtaaatgaaagtacagaaaaatttctttttagagtacaagatgctactaccagactatacgaagggttgtaccctcagttctaccactttacccatttttatccttagtcgtagactagtggaaatcactgtgcaaacaataaaacaaaaagataccagtctgctttctactgtatatgcaaacagactttgactcggtgatttttcttggcataagaatcttatagacttatgagtcagaacagaaaattttaccttgtacttctcagaatccagaacggaaaatatgtgagacggagaagaacccatgaaataacaaaaaacag

SEQ ID NO: 50616 - DNA, 2408 bp, Zea Mays
cttccttgcctcttctgtgtcattattagctctctgatgtccctgcccatgtataagcctcattgcaacccactaaaacagttacagagaacaaaagcagttaggttgccgattaatacaaaactttggaaggaacatcatgtatttttttcctcaaacacataggagagttaatctttgtattaaagggagagaaagagcggacccttacaacacagcccccagaatcttaagagggggttgcaaaaatgagaataaagaaaatgatgacctgatacaaaaggatcaatcacaacctaaggaatatcatatatcaatggttaaaataaatgaagacgagacgaaaaaagtgaaaaaaaggagtaggtggaccattaaaataaatgcataagaaatgaaaatgtgaaaaagggtaggttgatcaaaagagaaaccattggaacatcagagaccagactatatagaagcataaagggcgtgtttggttttctgcctaaggcgtcataacctgcctaacttttatgtctaaggttagttcttcaatttgagcgactaactttaggcaagttgtggcgtcctatgcagaaaatcaaacaactccaaaattgtattttgaaggaatccgaagacatgcatccttgtaatgtaaccctttttggattaatatatttcaaaggcataagcaaatgtgaacccaataatgacaaaaatgataagtactgatgaaaatgatctgagcagggaaatgaaaatgtcttgagctgaaagataatacaaatggtagaaatggcttcgggccataaaccccattacccagatttgtatgaagtgattgtagattattttctataataacacaatggtaaaatgaacagtttcatttttcatcttgttgaacttaacatcttgaatagcctccaagtaagcaatatttataaatttacataatttattccgctgtaaatattttagcttcaccaaaatgaatggtatagctcttcatttcttgtatccaaaatccaaaatacaactgctgggtgctgactggttataattaattcccatatctgaatattcatacatatagctagcatagaaattttcaataacaccttattgggatcactatagaaaacttaacatagaaaaccaaaaggcactttaacagggaatatataaagctcagtgaaatttatggtcccagaaaatcatgaaggtgatgcgaactgttctcacactccacatctggaacttttgatattgtaattaacaggtattgtagtacttcaatggattttactccatttgccgagctcaaaatcctcagctgactaataaataaacaggccctctcatactccagaaattgttgtccaacagaagacattctaaacaggtcttcatactcatgatcatgaatcaaccaattgtacttagtttactgtttacagtactaaaaagagcaactaatcctagaaatagtatgccagttggatttaaataatgtgaccctcattaagtataaaaaataccggtctgaacagctgttaacatactgatgtatcaaccagcaatttcttcaggaaacctgttagcgtctgcaaaccaaccaaccaggctaccccctccttaacaagaaccaatgttaaaagagtaagcatccatattaactcccgttaccatctatgcggaagctgcacaaccaggggcgggcccaggggtggttcatgggtattcattgaatacccaagtttttggtgatctataataatttgtcaataatatattacaaaaaatagtgttagagcactagtttctttgatcttttgaatttttgaatacccaatcttaaatgtctagggccgcttctgtgcacaacattagcattggaataatcctggaatccgggaccaccattacacagcattggactcccgataccgtgcagaaacattgtgcccatacgctaagcatatttcagtggccataagagtttggagccaaacagtttttgaagctataggcgtgaggagagggaaattttgttatgagaagaaaagaaaaggtaaagacatgattttagatcttgaggagaagctaatcatttgagcttgattgctcttaaaggataaaatcgctgaaccaatcgctttccacgtgtcaaattaacccaagacacacgatagatgatgagatgactaaaaatagtgccagacaagcagtttagccgaggcaattgtgtaagctgtaattagagttacgaaacccgccgaaagttgaggcgagtttgtcggcagcaagctacgcgctagcgttcagcgccagagtcgaagaccttcaccgaaacaacggaaggaaaaacgaaagacggcaagggcagtcgcaccttgaagacgaagcggtcgagg

SEQ ID NO: 50617 - DNA, 5779 bp, Zea Mays
caccactcgctttcgtctcttccccctcttcccccaccttaccaaggcaccaacctcgctggcatgctcgccgtctctccctctccccctcctcgccttcctctcctcaccttaacccacctctgcgctttccctctcctcccacctcgacgccgcggcctctctcgcctccgcagccaccgcagtggcacccctctcgtcctgctccgcgcgcgcgcagtgcgtcacgctggtatcgtgatcgacatcgacgagatggtcgagaatgaggaccgtgacctacccgtggacgtatcgttcacgaggaggcttcctcccgcgctcactttcggtgacggcctcgacgcactgctgcgggccgccaacgaggtcaaggccaccccgcctgctggcgccaggagcggcgtgatcaggttcgaggtacttgttccacccagtacaaaggcacttaagtggtgctctcagtttagaggatcatcattgtttccccagttttatttatcaagggaactgaggtctgctccatcatgtcaacttgaaatctgtggcattggttccacaatctgctttcatggttcctacctaataaataatgaatttgatttggtatcaagatatatttcttctgattcacacttgataaaggcttatggattcgtagacatgaattatgacaaggaactaccatcaatagaggagaaacttgactcatattacttcttcatccctcaatttgagttgaacgagtttgatagttgttccatattatcatctaccctggtttgggatgattctatttctcatacgttcgaggacgcggtttctttatttaaatcttgttttgatcagatacaaaatagctatgattcttcagctagcatttcttacaaaggcttggtaccaagtcacatttctggagacgcacatttgtcagagactggaaatgctcagttggtgtatgtggatgcagaagtactagcctcaatagatgccaaaggtagtgtgcaaaaggtatccccttaaccttgaagtttttgatatctgatcggtcatttgttagattttcgccacagttattctattattcaaacatggagttatatttgcaacacaacacgattgaatctttcatcaaagagttgctctaacataaatttggcatgggcatcccttatagttgaagaatgtgttaggctcggtttcacgtacttctgtatagctccagggtcaagatcatccccgcttgcactttctgctacaggccatcctttgacaaaatgcatatcatgttacgatgaacgttcacttggatttcatgctcttggctatgggagaggttctcgaaagccagcagtagtaatcacatcatcaggaaccgctgtatcaaatcttctcccttcggtggttgaggctagtcaagatttcataccaattatattactcacagctgaccgtcctcctgagttgcatgatgctggagctaaccaagccatcaatcaggtcaatcattttggtacctttgtaagatatttttttaacctccctccacctggagaccgaatcaatgcaagaatggtgctcactacacttgattcagcagcctactatgcaatgcaagcaccacaaggccccgtgcatataaactgtgcttttagagaaccactagattacactaatcaacattggaatgttgattgtttgctaggtttggataagtggtttaaaaatagtgaaccatatactaaatacgtaagaatgaaaacagtttctgcattgggtaattactcttgctcagtaatggaggtcctggagatcatagagaaggcagaacaagggcttcttttagtgggtgctattcatacggatgaagatatgtgggctgtagctttactagctaggcacctatcctggccagttgctacagacattctgtctggactgcgattgcggaaagttgtaaattcattaccagggcttgataagagcattttgtttatagaccacattgatcaaattctgttgtctgagtctgctaaaaactggatacgccctgatgtcattgttcagattggtagccgcattactagcaaacgagtgggaatgtttcttgagacttccttcccatcttcctacatattgatcgataggcatccatgtcgtcatgatccttcacatgttgttactcacagaatacaagctaatgtagcagaatttgctgctaggttgtgccggtgtacttttcaaaggaagagaagcagatggacagaatttttgaccattcttaattcagtggtttgtcaggagataatgtttcagatacatgcgaagtgctcacttacagaaccatatgttgctcatgtaattggggagtcactttatggtgatgctgtcatgtttgttgggaacagcatggtcatccgagacttagacatgtttggcaacggttggatggattacactacaaatggaaataatgtgatgacacatcattttccagattttgttggcactgtagtggctgggaacagaggagcaagtggtattgatggtttaatcagcacagcagtcggatttgctgttgggtcaaacaagcatgtattttgtgtggttggtgacatatcttttcttcatgatacaaatggattggcacttctcaatcaaagggcatggcggaaacctatgacaataattgttgtcaacaaccatggtggtgcaatcttcagccttctaccagttgcaaaaactacttcaccacaaattttggagaaattcttctacacctctcatgacatatcaatttccaaactatgtgctgcacacagggtaaaacattttctagttcaaacaaaagcagagcttcatgatgcgttggtgaaatccaatatggaacaggttgattgtgtggtagaaataaacaatagtattgatagcaatgccgagtttcataggttcatgagcatgttctctaactattctacaagtcagtatctgggctatcttctgggagttccacgttttaagaatgaggtagatgccatgcctgttgacagaattgatgcagtggaatacatgttgtacagaatccagctttctgcaccacgtacttcaggactatctgatggtagattcattcatgaaggatttgttctgaagcttcgtgtggaggataacattgtgggatttggtgaggttgcaccaatcgaaattcatgaagaggatctgttggatgtcgaagagcaaattagatatcttctccatagggtgaaagattctgtgctagatattattcccttactgagagggtccttttccaattggatatggacaagcctcggggttcctccttcttcgatattcccaagtgttaaatgcggtttggagatggctattcttaatttacttgcatcacaacggaaatgtagtttgttcaaagttctctctggttgtgacctgttctgccgagacgagaatgtggttgaatataatcagaacagttctgcaagcatacaaatttgtgcactcgtagattgcaatggctctccaatggaagtagcacttggtgtcgccaaactggttgctgaaggttttaccacatttaaactgaaggttgggcgccgtgaaagccccattgaggatgcaactgttcttcataaaataagagaagttgtggggtaccagatcaatatccgtgttgatgcaaatcagaaatggacatatgaacaggcagttgaatttggatccagggtacaaagtcttcatttggaatacattgaggaaccagtgagctctgtatatgatctcatcaagttctgtgaaaagaatgtcttgcctgttgcacttgatgagactattgacaaccttaggggggatgtaatttgtaagcttcatcaatttgttcatccaggaataattgctcttgttataaagcctagtgttgttggaggttttgagaatgcagctcatattgccaaatgggcgcagctacatgataagatggccgtcatcagtagcacgtatgagagttctataggtttggcatcctatatacagttagcacattatgttgaccaacagagctctatagtctccagaataagaaacaaagatacatgtagagccactgcacatggacttggaacatatcagtggttaagggaagatgtatcagaacaaaagttaaagatccatgcatccccacttggtgacggaatccgagccacagtagaagatgcccatggttatcttcaccatttaaacataaacaatgagaagataaaaagtacgtatggtgaagaaaaacataggtcatattctatccaagttgatgtggacgattgttcttatctagtcaaacttcgagaggctggtgatcatacaaatgaaaaggttgtccttttacttcatggatttcttggtacaagtgaagactgggttcccacgatgaaagctcttgcccccagtgcacgggtaattgcaattgatcttcctggtcatggcgagtcacagatactgcaacgtcacaaaaattcagaacaacctgctgtaacagttcaactagttgcagatttgttgttgaagttgatataccacataactaatggtgaggtggtggtggttggctattcaatgggtgcaaggattgcactccacatggcactaaatcaagatcacaagatccgtggagctgttacaatatcaggaagtcctggactgagagatgaagcaagcagaagacgccgtattgctattgataaatcaagagcccagttcctgatgtgttgtggacttgaatgttttcttcagacatggtactctggaaaactgtggaccagtctacgagagcatcctgagtttaattctctggtgaggacacgcagtaaacacaaaaacatcaaagctctagctaaggttcttgcagactcaagcgtggggagacaaaagtcccctgtgggaagacctgaagcacttgaagaggcctttactcgtcgttgctggtgaaaaggacgcaaagttcaaagacatctcgcagaaaatgcgcacggagataatgagccacgcagaatgcggatctgatggtcctaaagggaaggaactttgtgaagtgctcattatcccagatagcggccatgctgtgcatgttgagaaccctcttcctttggtgagagccgtgaggaagttcttactgaagctgtattgaggagaacatctgagtagaaccggtaaatggagcatcatgcaggtatattggtgtcctcacatatgcaggtgaagaaaggtttcaaattcgtgccgcccaagaagaactgaaatttggtctccgtctcgtccaatttgtcgtcgttggatcgttgcagtaactttttcccgtttggccttagtgttaatagcgtggctggtagatccaactggtgatgcctcttacgagggtttttgaaccccaatggactggcttccctttggtgattgtcagggttctgcatttcctagagataaattctcagcatgttcagacctggagtgccgtgccctttgtacaaggattccttttctagagttgtatgaaataaatgctcgctctcgagaagcggatttggtcaaaatctcactccactaccgagctgcggcgattcatcaagaagaccttcgtgccgatccctttgtgtaaataaaagtagcctcatctttctttgtcttgttgggatccgggaaccggccgactgtcgatcaagtgcgctttctgtgcgattcctgactgccaatttaagaacccttcttagca

SEQ ID NO: 50618 - DNA, 5702 bp, Zea Mays
caccactcgctttcgtctcttccccctcttcccccaccttaccaaggcaccaacctcgctggcatgctcgccgtctctccctctccccctcctcgccttcctctcctcaccttaacccacctctgcgctttccctctcctcccacctcgacgccgcggcctctctcgcctccgcagccaccgcagtggcacccctctcgtcctgctccgcgcgcgcgcagtgcgtcacgctggtatcgtgatcgacatcgacgagatggtcgagaatgaggaccgtgacctacccgtggacgtatcgttcacgaggaggcttcctcccgcgctcactttcggtgacggcctcgacgcactgctgcgggccgccaacgaggtcaaggccaccccgcctgctggcgccaggagcggcgtgatcaggttcgaggtacttgttccacccagtacaaaggcacttaagtggtgctctcagtttagaggatcatcattgtttccccagttttatttatcaagggaactgaggtctgctccatcatgtcaacttgaaatctgtggcattggttccacaatctgctttcatggttcctacctaataaataatgaatttgatttggtatcaagatatatttcttctgattcacacttgataaaggcttatggattcgtagacatgaattatgacaaggaactaccatcaatagaggagaaacttgactcatattacttcttcatccctcaatttgagttgaacgagtttgatagttgttccatattatcatctaccctggtttgggatgattctatttctcatacgttcgaggacgcggtttctttatttaaatcttgttttgatcagatacaaaatagctatgattcttcagctagcatttcttacaaaggcttggtaccaagtcacatttctggagacgcacatttgtcagagactggaaatgctcagttggtgtatgtggatgcagaagtactagcctcaatagatgccaaaggtagtgtgcaaaagaagtttttgatatctgatcggtcatttgttagattttcgccacagttattctattattcaaacatggagttatatttgcaacacaacacgattgaatctttcatcaaagagttgctctaacataaatttggcatgggcatcccttatagttgaagaatgtgttaggctcggtttcacggccatcctttgacaaaatgcatatcatgttacgatgaacgttcacttggatttcatgctcttggctatgggagaggttctcgaaagccagcagtagtaatcacatcatcaggaaccgctgtatcaaatcttctcccttcggtggttgaggctagtcaagatttcataccaattatattactcacagctgaccgtcctcctgagttgcatgatgctggagctaaccaagccatcaatcaggtcaatcattttggtacctttgtaagatatttttttaacctccctccacctggagaccgaatcaatgcaagaatggtgctcactacacttgattcagcagcctactatgcaatgcaagcaccacaaggccccgtgcatataaactgtgcttttagagaaccactagattacactaatcaacattggaatgttgattgtttgctaggtttggataagtggtttaaaaatagtgaaccatatactaaatacgtaagaatgaaaacagtttctgcattgggtaattactcttgctcagtaatggaggtcctggagatcatagagaaggcagaacaagggcttcttttagtgggtgctattcatacggatgaagatatgtgggctgtagctttactagctaggcacctatcctggccagttgctacagacattctgtctggactgcgattgcggaaagttgtaaattcattaccagggcttgataagagcattttgtttatagaccacattgatcaaattctgttgtctgagtctgctaaaaactggatacgccctgatgtcattgttcagattggtagccgcattactagcaaacgagtgggaatgtttcttgagacttccttcccatcttcctacatattgatcgataggcatccatgtcgtcatgatccttcacatgttgttactcacagaatacaagctaatgtagcagaatttgctgctaggttgtgccggtgtacttttcaaaggaagagaagcagatggacagaatttttgaccattcttaattcagtggtttgtcaggagataatgtttcagatacatgcgaagtgctcacttacagaaccatatgttgctcatgtaattggggagtcactttatggtgatgctgtcatgtttgttgggaacagcatggtcatccgagacttagacatgtttggcaacggttggatggattacactacaaatggaaataatgtgatgacacatcattttccagattttgttggcactgtagtggctgggaacagaggagcaagtggtattgatggtttaatcagcacagcagtcggatttgctgttgggtcaaacaagcatgtattttgtgtggttggtgacatatcttttcttcatgatacaaatggattggcacttctcaatcaaagggcatggcggaaacctatgacaataattgttgtcaacaaccatggtggtgcaatcttcagccttctaccagttgcaaaaactacttcaccacaaattttggagaaattcttctacacctctcatgacatatcaatttccaaactatgtgctgcacacagggtaaaacattttctagttcaaacaaaagcagagcttcatgatgcgttggtgaaatccaatatggaacaggttgattgtgtggtagaaataaacaatagtattgatagcaatgccgagtttcataggttcatgagcatgttctctaactattctacaagtcagtatctgggctatcttctgggagttccacgttttaagaatgaggtagatgccatgcctgttgacagaattgatgcagtggaatacatgttgtacagaatccagctttctgcaccacgtacttcaggactatctgatggtagattcattcatgaaggatttgttctgaagcttcgtgtggaggataacattgtgggatttggttgcaccaatcgaaattcatgaagaggatctgttggatgtcgaagagcaaattagatatcttctccatagggtgaaagattctgtgctagatattattcccttactgagagggtccttttccaattggatatggacaagcctcggggttcctccttcttcgatattcccaagtgttaaatgcggtttggagatggctattcttaatttacttgcatcacaacggaaatgtagtttgttcaaagttctctctggttgtgacctgttctgccgagacgagaatgtggttgaatataatcagaacagttctgcaagcatacaaatttgtgcactcgtagattgcaatggctctccaatggaagtagcacttggtgtcgccaaactggttgctgaaggttttaccacatttaaactgaaggttgggcgccgtgaaagccccattgaggatgcaactgttcttcataaaataagagaagttgtggggtaccagatcaatatccgtgttgatgcaaatcagaaatggacatatgaacaggcagttgaatttggatccagggtacaaagtcttcatttggaatacattgaggaaccagtgagctctgtatatgatctcatcaagttctgtgaaaagaatgtcttgcctgttgcacttgatgagactattgacaaccttaggggggatgtaatttgtaagcttcatcaatttgttcatccaggaataattgctcttgttataaagcctagtgttgttggaggttttgagaatgcagctcatattgccaaatgggcgcagctacatgataagatggccgtcatcagtagcacgtatgagagttctataggtttggcatcctatatacagttagcacattatgttgaccaacagagctctatagtctccagaataagaaacaaagatacatgtagagccactgcacatggacttggaacatatcagtggttaagggaagatgtatcagaacaaaagttaaagatccatgcatccccacttggtgacggaatccgagccacagtagaagatgcccatggttatcttcaccatttaaacataaacaatgagaagataaaaagtacgtatggtgaagaaaaacataggtcatattctatccaagttgatgtggacgattgttcttatctagtcaaacttcgagaggctggtgatcatacaaatgaaaaggttgtccttttacttcatggatttcttggtacaagtgaagactgggttcccacgatgaaagctcttgcccccagtgcacgggtaattgcaattgatcttcctggtcatggcgagtcacagatactgcaacgtcacaaaaattcagaacaacctgctgtaacagttcaactagttgcagatttgttgttgaagttgatataccacataactaatggtgaggtggtggtggttggctattcaatgggtgcaaggattgcactccacatggcactaaatcaagatcacaagatccgtggagctgttacaatatcaggaagtcctggactgagagatgaagcaagcagaagacgccgtattgctattgataaatcaagagcccagttcctgatgtgttgtggacttgaatgttttcttcagacatggtactctggaaaactgtggaccagtctacgagagcatcctgagtttaattctctggtgaggacacgcagtaaacacaaaaacatcaaagctctagctaaggttcttgcagactcaagcgtggggagacaaaagtcccctgtgggaagacctgaagcacttgaagaggcctttactcgtcgttgctggtgaaaaggacgcaaagttcaaagacatctcgcagaaaatgcgcacggagataatgagccacgcagaatgcggatctgatggtcctaaagggaaggaactttgtgaagtgctcattatcccagatagcggccatgctgtgcatgttgagaaccctcttcctttggtgagagccgtgaggaagttcttactgaagctgtattgaggagaacatctgagtagaaccggtaaatggagcatcatgcaggtatattggtgtcctcacatatgcaggtgaagaaaggtttcaaattcgtgccgcccaagaagaactgaaatttggtctccgtctcgtccaatttgtcgtcgttggatcgttgcagtaactttttcccgtttggccttagtgttaatagcgtggctggtagatccaactggtgatgcctcttacgagggtttttgaaccccaatggactggcttccctttggtgattgtcagggttctgcatttcctagagataaattctcagcatgttcagacctggagtgccgtgccctttgtacaaggattccttttctagagttgtatgaaataaatgctcgctctcgagaagcggatttggtcaaaatctcactccactaccgagctgcggcgattcatcaagaagaccttcgtgccgatccctttgtgtaaataaaagtagcctcatctttctttgtcttgttgggatccgggaaccggccgactgtcgatcaagtgcgctttctgtgcgattcctgactgccaatttaagaacccttcttagca

SEQ ID NO: 50619 - DNA, 5702 bp, Zea Mays
ctcgctttcgtctcttccccctcttcccccaccttaccaaggcaccaacctcgctggcatgctcgccgtctctccctctccccctcctcgccttcctctcctcaccttaacccacctctgcgctttccctctcctcccacctcgacgccgcggcctctctcgcctccgcagccaccgcagtggcacccctctcgtcctgctccgcgcgcgcgcagtgcgtcacgctggtatcgtgatcgacatcgacgagatggtcgagaatgaggaccgtgacctacccgtggacgtatcgttcacgaggaggcttcctcccgcgctcactttcggtgacggcctcgacgcactgctgcgggccgccaacgaggtcaaggccaccccgcctgctggcgccaggagcggcgtgatcaggttcgaggtacttgttccacccagtacaaaggcacttaagtggtgctctcagtttagaggatcatcattgtttccccagttttatttatcaagggaactgaggtctgctccatcatgtcaacttgaaatctgtggcattggttccacaatctgctttcatggttcctacctaataaataatgaatttgatttggtatcaagatatatttcttctgattcacacttgataaaggcttatggattcgtagacatgaattatgacaaggaactaccatcaatagaggagaaacttgactcatattacttcttcatccctcaatttgagttgaacgagtttgatagttgttccatattatcatctaccctggtttgggatgattctatttctcatacgttcgaggacgcggtttctttatttaaatcttgttttgatcagatacaaaatagctatgattcttcagctagcatttcttacaaaggcttggtaccaagtcacatttctggagacgcacatttgtcagagactggaaatgctcagttggtgtatgtggatgcagaagtactagcctcaatagatgccaaaggtagtgtgcaaaagaagtttttgatatctgatcggtcatttgttagattttcgccacagttattctattattcaaacatggagttatatttgcaacacaacacgattgaatctttcatcaaagagttgctctaacataaatttggcatgggcatcccttatagttgaagaatgtgttaggctcggtttcacggccatcctttgacaaaatgcatatcatgttacgatgaacgttcacttggatttcatgctcttggctatgggagaggttctcgaaagccagcagtagtaatcacatcatcaggaaccgctgtatcaaatcttctcccttcggtggttgaggctagtcaagatttcataccaattatattactcacagctgaccgtcctcctgagttgcatgatgctggagctaaccaagccatcaatcaggtcaatcattttggtacctttgtaagatatttttttaacctccctccacctggagaccgaatcaatgcaagaatggtgctcactacacttgattcagcagcctactatgcaatgcaagcaccacaaggccccgtgcatataaactgtgcttttagagaaccactagattacactaatcaacattggaatgttgattgtttgctaggtttggataagtggtttaaaaatagtgaaccatatactaaatacgtaagaatgaaaacagtttctgcattgggtaattactcttgctcagtaatggaggtcctggagatcatagagaaggcagaacaagggcttcttttagtgggtgctattcatacggatgaagatatgtgggctgtagctttactagctaggcacctatcctggccagttgctacagacattctgtctggactgcgattgcggaaagttgtaaattcattaccagggcttgataagagcattttgtttatagaccacattgatcaaattctgttgtctgagtctgctaaaaactggatacgccctgatgtcattgttcagattggtagccgcattactagcaaacgagtgggaatgtttcttgagacttccttcccatcttcctacatattgatcgataggcatccatgtcgtcatgatccttcacatgttgttactcacagaatacaagctaatgtagcagaatttgctgctaggttgtgccggtgtacttttcaaaggaagagaagcagatggacagaatttttgaccattcttaattcagtggtttgtcaggagataatgtttcagatacatgcgaagtgctcacttacagaaccatatgttgctcatgtaattggggagtcactttatggtgatgctgtcatgtttgttgggaacagcatggtcatccgagacttagacatgtttggcaacggttggatggattacactacaaatggaaataatgtgatgacacatcattttccagattttgttggcactgtagtggctgggaacagaggagcaagtggtattgatggtttaatcagcacagcagtcggatttgctgttgggtcaaacaagcatgtattttgtgtggttggtgacatatcttttcttcatgatacaaatggattggcacttctcaatcaaagggcatggcggaaacctatgacaataattgttgtcaacaaccatggtggtgcaatcttcagccttctaccagttgcaaaaactacttcaccacaaattttggagaaattcttctacacctctcatgacatatcaatttccaaactatgtgctgcacacagggtaaaacattttctagttcaaacaaaagcagagcttcatgatgcgttggtgaaatccaatatggaacaggttgattgtgtggtagaaataaacaatagtattgatagcaatgccgagtttcataggttcatgagcatgttctctaactattctacaagtcagtatctgggctatcttctgggagttccacgttttaagaatgaggtagatgccatgcctgttgacagaattgatgcagtggaatacatgttgtacagaatccagctttctgcaccacgtacttcaggactatctgatggtagattcattcatgaaggatttgttctgaagcttcgtgtggaggataacattgtgggatttggtgaggttgcaccaatcgaaattcatgaagaggatctgttggatgtcgaagagcaaattagatatcttctccatagggtgaaagattctgtgctagatattattcccttactgagagggtccttttccaattggatatggacaagcctcggggttcctccttcttcgatattcccaagtgttaaatgcggtttggagatggctattcttaatttacttgcatcacaacggaaatgtagtttgttcaaagttctctctggttgtgacctgttctgccgagacgagaatgtggttgaatataatcagaacagttctgcaagcatacaaatttgtgcactcgtagattgcaatggctctccaatggaagtagcacttggtgtcgccaaactggttgctgaaggttttaccacatttaaactgaaggttgggcgccgtgaaagccccattgaggatgcaactgttcttcataaaataagagaagttgtggggtaccagatcaatatccgtgttgatgcaaatcagaaatggacatatgaacaggcagttgaatttggatccagggtacaaagtcttcatttggaatacattgaggaaccagtgagctctgtatatgatctcatcaagttctgtgaaaagaatgtcttgcctgttgcacttgatgagactattgacaaccttaggggggatgtaatttgtaagcttcatcaatttgttcatccaggaataattgctcttgttataaagcctagtgttgttggaggttttgagaatgcagctcatattgccaaatgggcgcagctacatgataagatggccgtcatcagtagcacgtatgagagttctataggtttggcatcctatatacagttagcacattatgttgaccaacagagctctatagtctccagaataagaaacaaagatacatgtagagccactgcacatggacttggaacatatcagtggttaagggaagatgtatcagaacaaaagttaaagatccatgcatccccacttggtgacggaatccgagccacagtagaagatgcccatggttatcttcaccatttaaacataaacaatgagaagataaaaagtacgtatggtgaagaaaaacataggtcatattctatccaagttgatgtggacgattgttcttatctagtcaaacttcgagaggctggtgatcatacaaatgaaaaggttgtccttttacttcatggatttcttggtacaagtgaagactgggttcccacgatgaaagctcttgcccccagtgcacgggtaattgcaattgatcttcctggtcatggcgagtcacagatactgcaacgtcacaaaaattcagaacaacctgctgtaacagttcaactagttgcagatttgttgttgaagttgatataccacataactaatggtgaggtggtggtggttggctattcaatgggtgcaaggattgcactccacatggcactaaatcaagatcacaagatccgtggagctgttacaatatcaggaagtcctggactgagagatgaagcaagcagaagacgccgtattgctattgataaatcaagagcccagttcctgatgtgttgtggacttgaatgttttcttcagacatggtactctggaaaactgtggaccagtctacgagagcatcctgagtttaattctctggtgaggacacgcagtaaacacaaaaacatcaaagctctagctaaggttcttgcagactcaagcgtggggagacaaaagtcccctgtgggaagacctgaagcacttgaagaggcctttactcgtcgttgctggtgaaaaggacgcaaagttcaaagacatctcgcagaaaatgcgcacggagataatgagccacgcagaatgcggatctgatggtcctaaagggaaggaactttgtgaagtgctcattatcccagatagcggccatgctgtgcatgttgagaaccctcttcctttggtgagagccgtgaggaagttcttactgaagctgtattgaggagaacatctgagtagaaccggtaaatggagcatcatgcaggtatattggtgtcctcacatatgcaggtgaagaaaggtttcaaattcgtgccgcccaagaagaactgaaatttggtctccgtctcgtccaatttgtcgtcgttggatcgttgcagtaactttttcccgtttggccttagtgttaatagcgtggctggtagatccaactggtgatgcctcttacgagggtttttgaaccccaatggactggcttccctttggtgattgtcagggttctgcatttcctagagataaattctcagcatgttcagacctggagtgccgtgccctttgtacaaggattccttttctagagttgtatgaaataaatgctcgctctcgagaagcggatttggtcaaaatctcactccactaccgagctgcggcgattcatcaagaagaccttcgtgccgatccctttgtgtaaataaaagtagcctcatctttctttgtcttgttgggatccgggaaccggccgactgtcgatcaagtgcgctttctgtgcgattcctgactgccaatttaagaacccttcttagca

SEQ ID NO: 50620 - DNA, 5660 bp, Zea Mays
ctcgctttcgtctcttccccctcttcccccaccttaccaaggcaccaacctcgctggcatgctcgccgtctctccctctccccctcctcgccttcctctcctcaccttaacccacctctgcgctttccctctcctcccacctcgacgccgcggcctctctcgcctccgcagccaccgcagtggcacccctctcgtcctgctccgcgcgcgcgcagtgcgtcacgctggtatcgtgatcgacatcgacgagatggtcgagaatgaggaccgtgacctacccgtggacgtatcgttcacgaggaggcttcctcccgcgctcactttcggtgacggcctcgacgcactgctgcgggccgccaacgaggtcaaggccaccccgcctgctggcgccaggagcggcgtgatcaggttcgaggtacttgttccacccagtacaaaggcacttaagtggtgctctcagtttagaggatcatcattgtttccccagttttatttatcaagggaactgaggtctgctccatcatgtcaacttgaaatctgtggcattggttccacaatctgctttcatggttcctacctaataaataatgaatttgatttggtatcaagatatatttcttctgattcacacttgataaaggcttatggattcgtagacatgaattatgacaaggaactaccatcaatagaggagaaacttgactcatattacttcttcatccctcaatttgagttgaacgagtttgatagttgttccatattatcatctaccctggtttgggatgattctatttctcatacgttcgaggacgcggtttctttatttaaatcttgttttgatcagatacaaaatagctatgattcttcagctagcatttcttacaaaggcttggtaccaagtcacatttctggagacgcacatttgtcagagactggaaatgctcagttggtgtatgtggatgcagaagtactagcctcaatagatgccaaaggtagtgtgcaaaaggtatccccttaaccttgaagtttttgatatctgatcggtcatttgttagattttcgccacagttattctattattcaaacatggagttatatttgcaacacaacacgattgaatctttcatcaaagagttgctctaacataaatttggcatgggcatcccttatagttgaagaatgtgttaggctcggtttcacggccatcctttgacaaaatgcatatcatgttacgatgaacgttcacttggatttcatgctcttggctatgggagaggttctcgaaagccagcagtagtaatcacatcatcaggaaccgctgtatcaaatcttctcccttcggtggttgaggctagtcaagatttcataccaattatattactcacagctgaccgtcctcctgagttgcatgatgctggagctaaccaagccatcaatcaggtcaatcattttggtacctttgtaagatatttttttaacctccctccacctggagaccgaatcaatgcaagaatggtgctcactacacttgattcagcagcctactatgcaatgcaagcaccacaaggccccgtgcatataaactgtgcttttagagaaccactagattacactaatcaacattggaatgttgattgtttgctaggtttggataagtggtttaaaaatagtgaaccatatactaaatacgtaagaatgaaaacagtttctgcattgggtaattactcttgctcagtaatggaggtcctggagatcatagagaaggcagaacaagggcttcttttagtgggtgctattcatacggatgaagatatgtgggctgtagctttactagctaggcacctatcctggccagttgctacagacattctgtctggactgcgattgcggaaagttgtaaattcattaccagggcttgataagagcattttgtttatagaccacattgatcaaattctgttgtctgagtctgctaaaaactggatacgccctgatgtcattgttcagattggtagccgcattactagcaaacgagtgggaatgtttcttgagacttccttcccatcttcctacatattgatcgataggcatccatgtcgtcatgatccttcacatgttgttactcacagaatacaagctaatgtagcagaatttgctgctaggttgtgccggtgtacttttcaaaggaagagaagcagatggacagaatttttgaccattcttaattcagtggtttgtcaggagataatgtttcagatacatgcgaagtgctcacttacagaaccatatgttgctcatgtaattggggagtcactttatggtgatgctgtcatgtttgttgggaacagcatggtcatccgagacttagacatgtttggcaacggttggatggattacactacaaatggaaataatgtgatgacacatcattttccagattttgttggcactgtagtggctgggaacagaggagcaagtggtattgatggtttaatcagcacagcagtcggatttgctgttgggtcaaacaagcatgtattttgtgtggttggtgacatatcttttcttcatgatacaaatggattggcacttctcaatcaaagggcatggcggaaacctatgacaataattgttgtcaacaaccatggtggtgcaatcttcagccttctaccagttgcaaaaactacttcaccacaaattttggagaaattcttctacacctctcatgacatatcaatttccaaactatgtgctgcacacagggtaaaacattttctagttcaaacaaaagcagagcttcatgatgcgttggtgaaatccaatatggaacaggttgattgtgtggtagaaataaacaatagtattgatagcaatgccgagtttcataggttcatgagcatgttctctaactattctacaagtcagtatctgggctatcttctgggagttccacgttttaagaatgaggtagatgccatgcctgttgacagaattgatgcagtggaatacatgttgtacaggatttgttctgaagcttcgtgtggaggataacattgtgggatttggtgaggttgcaccaatcgaaattcatgaagaggatctgttggatgtcgaagagcaaattagatatcttctccatagggtgaaagattctgtgctagatattattcccttactgagagggtccttttccaattggatatggacaagcctcggggttcctccttcttcgatattcccaagtgttaaatgcggtttggagatggctattcttaatttacttgcatcacaacggaaatgtagtttgttcaaagttctctctggttgtgacctgttctgccgagacgagaatgtggttgaatataatcagaacagttctgcaagcatacaaatttgtgcactcgtagattgcaatggctctccaatggaagtagcacttggtgtcgccaaactggttgctgaaggttttaccacatttaaactgaaggttgggcgccgtgaaagccccattgaggatgcaactgttcttcataaaataagagaagttgtggggtaccagatcaatatccgtgttgatgcaaatcagaaatggacatatgaacaggcagttgaatttggatccagggtacaaagtcttcatttggaatacattgaggaaccagtgagctctgtatatgatctcatcaagttctgtgaaaagaatgtcttgcctgttgcacttgatgagactattgacaaccttaggggggatgtaatttgtaagcttcatcaatttgttcatccaggaataattgctcttgttataaagcctagtgttgttggaggttttgagaatgcagctcatattgccaaatgggcgcagctacatgataagatggccgtcatcagtagcacgtatgagagttctataggtttggcatcctatatacagttagcacattatgttgaccaacagagctctatagtctccagaataagaaacaaagatacatgtagagccactgcacatggacttggaacatatcagtggttaagggaagatgtatcagaacaaaagttaaagatccatgcatccccacttggtgacggaatccgagccacagtagaagatgcccatggttatcttcaccatttaaacataaacaatgagaagataaaaagtacgtatggtgaagaaaaacataggtcatattctatccaagttgatgtggacgattgttcttatctagtcaaacttcgagaggctggtgatcatacaaatgaaaaggttgtccttttacttcatggatttcttggtacaagtgaagactgggttcccacgatgaaagctcttgcccccagtgcacgggtaattgcaattgatcttcctggtcatggcgagtcacagatactgcaacgtcacaaaaattcagaacaacctgctgtaacagttcaactagttgcagatttgttgttgaagttgatataccacataactaatggtgaggtggtggtggttggctattcaatgggtgcaaggattgcactccacatggcactaaatcaagatcacaagatccgtggagctgttacaatatcaggaagtcctggactgagagatgaagcaagcagaagacgccgtattgctattgataaatcaagagcccagttcctgatgtgttgtggacttgaatgttttcttcagacatggtactctggaaaactgtggaccagtctacgagagcatcctgagtttaattctctggtgaggacacgcagtaaacacaaaaacatcaaagctctagctaaggttcttgcagactcaagcgtggggagacaaaagtcccctgtgggaagacctgaagcacttgaagaggcctttactcgtcgttgctggtgaaaaggacgcaaagttcaaagacatctcgcagaaaatgcgcacggagataatgagccacgcagaatgcggatctgatggtcctaaagggaaggaactttgtgaagtgctcattatcccagatagcggccatgctgtgcatgttgagaaccctcttcctttggtgagagccgtgaggaagttcttactgaagctgtattgaggagaacatctgagtagaaccggtaaatggagcatcatgcaggtatattggtgtcctcacatatgcaggtgaagaaaggtttcaaattcgtgccgcccaagaagaactgaaatttggtctccgtctcgtccaatttgtcgtcgttggatcgttgcagtaactttttcccgtttggccttagtgttaatagcgtggctggtagatccaactggtgatgcctcttacgagggtttttgaaccccaatggactggcttccctttggtgattgtcagggttctgcatttcctagagataaattctcagcatgttcagacctggagtgccgtgccctttgtacaaggattccttttctagagttgtatgaaataaatgctcgctctcgagaagcggatttggtcaaaatctcactccactaccgagctgcggcgattcatcaagaagaccttcgtgccgatccctttgtgtaaataaaagtagcctcatctttctttgtcttgttgggatccgggaaccggccgactgtcgatcaagtgcgctttctgtgcgattcctgactgccaatttaagaacccttcttagca

SEQ ID NO: 50621 - DNA, 5653 bp, Zea Mays
ctcgctttcgtctcttccccctcttcccccaccttaccaaggcaccaacctcgctggcatgctcgccgtctctccctctccccctcctcgccttcctctcctcaccttaacccacctctgcgctttccctctcctcccacctcgacgccgcggcctctctcgcctccgcagccaccgcagtggcacccctctcgtcctgctccgcgcgcgcgcagtgcgtcacgctggtatcgtgatcgacatcgacgagatggtcgagaatgaggaccgtgacctacccgtggacgtatcgttcacgaggaggcttcctcccgcgctcactttcggtgacggcctcgacgcactgctgcgggccgccaacgaggtcaaggccaccccgcctgctggcgccaggagcggcgtgatcaggttcgaggtacttgttccacccagtacaaaggcacttaagtggtgctctcagtttagaggatcatcattgtttccccagttttatttatcaagggaactgaggtctgctccatcatgtcaacttgaaatctgtggcattggttccacaatctgctttcatggttcctacctaataaataatgaatttgatttggtatcaagatatatttcttctgattcacacttgataaaggcttatggattcgtagacatgaattatgacaaggaactaccatcaatagaggagaaacttgactcatattacttcttcatccctcaatttgagttgaacgagtttgatagttgttccatattatcatctaccctggtttgggatgattctatttctcatacgttcgaggacgcggtttctttatttaaatcttgttttgatcagatacaaaatagctatgattcttcagctagcatttcttacaaaggcttggtaccaagtcacatttctggagacgcacatttgtcagagactggaaatgctcagttggtgtatgtggatgcagaagtactagcctcaatagatgccaaaggtagtgtgcaaaagaagtttttgatatctgatcggtcatttgttagattttcgccacagttattctattattcaaacatggagttatatttgcaacacaacacgattgaatctttcatcaaagagttgctctaacataaatttggcatgggcatcccttatagttgaagaatgtgttaggctcggtttcacgtacttctgtatagctccagggtcaagatcatccccgcttgcactttctgctacaggccatcctttgacaaaatgcatatcatgttacgatgaacgttcacttggatttcatgctcttggctatgggagaggttctcgaaagccagcagtagtaatcacatcatcaggaaccgctgtatcaaatcttctcccttcggtggttgaggctagtcaagatttcataccaattatattactcacagctgaccgtcctcctgagttgcatgatgctggagctaaccaagccatcaatcaggtcaatcattttggtacctttgtaagatatttttttaacctccctccacctggagaccgaatcaatgcaagaatggtgctcactacacttgattcagcagcctactatgcaatgcaagcaccacaaggccccgtgcatataaactgtgcttttagagaaccactagattacactaatcaacattggaatgttgattgtttgctaggtttggataagtggtttaaaaatagtgaaccatatactaaatacgtaagaatgaaaacagtttctgcattgggtaattactcttgctcagtaatggaggtcctggagatcatagagaaggcagaacaagggcttcttttagtgggtgctattcatacggatgaagatatgtgggctgtagctttactagctaggcacctatcctggccagttgctacagacattctgtctggactgcgattgcggaaagttgtaaattcattaccagggcttgataagagcattttgtttatagaccacattgatcaaattctgttgtctgagtctgctaaaaactggatacgccctgatgtcattgttcagattggtagccgcattactagcaaacgagtgggaatgtttcttgagacttccttcccatcttcctacatattgatcgataggcatccatgtcgtcatgatccttcacatgttgttactcacagaatacaagctaatgtagcagaatttgctgctaggttgtgccggtgtacttttcaaaggaagagaagcagatggacagaatttttgaccattcttaattcagtggtttgtcaggagataatgtttcagatacatgcgaagtgctcacttacagaaccatatgttgctcatgtaattggggagtcactttatggtgatgctgtcatgtttgttgggaacagcatggtcatccgagacttagacatgtttggcaacggttggatggattacactacaaatggaaataatgtgatgacacatcattttccagattttgttggcactgtagtggctgggaacagaggagcaagtggtattgatggtttaatcagcacagcagtcggatttgctgttgggtcaaacaagcatgtattttgtgtggttggtgacatatcttttcttcatgatacaaatggattggcacttctcaatcaaagggcatggcggaaacctatgacaataattgttgtcaacaaccatggtggtgcaatcttcagccttctaccagttgcaaaaactacttcaccacaaattttggagaaattcttctacacctctcatgacatatcaatttccaaactatgtgctgcacacagggtaaaacattttctagttcaaacaaaagcagagcttcatgatgcgttggtgaaatccaatatggaacaggttgattgtgtggtagaaataaacaatagtattgatagcaatgccgagtttcataggttcatgagcatgttctctaactattctacaagtcagtatctgggctatcttctgggagttccacgttttaagaatgaggtagatgccatgcctgttgacagaattgatgcagtggaatacatgttgtacagctttctgcaccacgtacttcaggactatctgatggtagattcattcatgaaggatttgttctgaagcttcgtgtggaggataacattgtgggatttggtgaggttgcaccaatcgaaattcatgaagaggatctgttggatgtcgaagagcaaattagatatcttctccatagggtgaaagattctgtgctagatattattcccttactgagagggtccttttccaattggatatggacaagcctcggggttcctccttcttcgatattcccaagtgttaaatgcggtttggagatggctattcttaatttacttgcatcacaacggaaatgtagtttgttcaaagttctctctggttgtgacctgttctgccgagacgagaatgtggttgaatataatcagaacagttctgcaagcatacaaatttgtgcactcgtagattgcaatggctctccaatggaagtagcacttggtgtcgccaaactggttgctgaaggttttaccacatttaaactgaaggttgggcgccgtgaaagccccattgaggatgcaactgttcttcataaaataagagaagttgtggggtaccagatcaatatccgtgttgatgcaaatcagaaatggacatatgaacaggcagttgaatttggatccagggtacaaagtcttcatttggaatacattgaggaaccagtgagctctgtatatgatctcatcaagttctgtgaaaagaatgtcttgcctgttgcacttgatgagactattgacaaccttaggggggatgtaatttgtaagcttcatcaatttgttcatccaggaataattgctcttgttataaagcctagtgttgttggaggttttgagaatgcagctcatattgccaaatgggcgcagctacatgataagatggccgtcatcagtagcacgtatgagagttctataggtttggcatcctatatacagttagcacattatgttgaccaacagagctctatagtctccagaataagaaacaaagatacatgtagagccactgcacatggacttggaacatatcagtggttaagggaagatgtatcagaacaaaagttaaagatccatgcatccccacttggtgacggaatccgagccacagtagaagatgcccatggttatcttcaccatttaaacataaacaatgagaagataaaaagtacgtatggtgaagaaaaacataggtcatattctatccaagttgatgtggacgattgttcttatctagtcaaacttcgagaggctggtgatcatacaaatgaaaaggttgtccttttacttcatggatttcttggtacaagtgaagactgggttcccacgatgaaagctcttgcccccagtgcacggatttgttgttgaagttgatataccacataactaatggtgaggtggtggtggttggctattcaatgggtgcaaggattgcactccacatggcactaaatcaagatcacaagatccgtggagctgttacaatatcaggaagtcctggactgagagatgaagcaagcagaagacgccgtattgctattgataaatcaagagcccagttcctgatgtgttgtggacttgaatgttttcttcagacatggtactctggaaaactgtggaccagtctacgagagcatcctgagtttaattctctggtgaggacacgcagtaaacacaaaaacatcaaagctctagctaaggttcttgcagactcaagcgtggggagacaaaagtcccctgtgggaagacctgaagcacttgaagaggcctttactcgtcgttgctggtgaaaaggacgcaaagttcaaagacatctcgcagaaaatgcgcacggagataatgagccacgcagaatgcggatctgatggtcctaaagggaaggaactttgtgaagtgctcattatcccagatagcggccatgctgtgcatgttgagaaccctcttcctttggtgagagccgtgaggaagttcttactgaagctgtattgaggagaacatctgagtagaaccggtaaatggagcatcatgcaggtatattggtgtcctcacatatgcaggtgaagaaaggtttcaaattcgtgccgcccaagaagaactgaaatttggtctccgtctcgtccaatttgtcgtcgttggatcgttgcagtaactttttcccgtttggccttagtgttaatagcgtggctggtagatccaactggtgatgcctcttacgagggtttttgaaccccaatggactggcttccctttggtgattgtcagggttctgcatttcctagagataaattctcagcatgttcagacctggagtgccgtgccctttgtacaaggattccttttctagagttgtatgaaataaatgctcgctctcgagaagcggatttggtcaaaatctcactccactaccgagctgcggcgattcatcaagaagaccttcgtgccgatccctttgtgtaaataaaagtagcctcatctttctttgtcttgttgggatccgggaaccggccgactgtcgatcaagtgcgctttctgtgcgattcctgactgccaatttaagaacccttcttagca

SEQ ID NO: 50622 - DNA, 5604 bp, Zea Mays
ctcgctttcgtctcttccccctcttcccccaccttaccaaggcaccaacctcgctggcatgctcgccgtctctccctctccccctcctcgccttcctctcctcaccttaacccacctctgcgctttccctctcctcccacctcgacgccgcggcctctctcgcctccgcagccaccgcagtggcacccctctcgtcctgctccgcgcgcgcgcagtgcgtcacgctggtatcgtgatcgacatcgacgagatggtcgagaatgaggaccgtgacctacccgtggacgtatcgttcacgaggaggcttcctcccgcgctcactttcggtgacggcctcgacgcactgctgcgggccgccaacgaggtcaaggccaccccgcctgctggcgccaggagcggcgtgatcaggttcgaggtacttgttccacccagtacaaaggcacttaagtggtgctctcagtttagaggatcatcattgtttccccagttttatttatcaagggaactgaggtctgctccatcatgtcaacttgaaatctgtggcattggttccacaatctgctttcatggttcctacctaataaataatgaatttgatttggtatcaagatatatttcttctgattcacacttgataaaggcttatggattcgtagacatgaattatgacaaggaactaccatcaatagaggagaaacttgactcatattacttcttcatccctcaatttgagttgaacgagtttgatagttgttccatattatcatctaccctggtttgggatgattctatttctcatacgttcgaggacgcggtttctttatttaaatcttgttttgatcagatacaaaatagctatgattcttcagctagcatttcttacaaaggcttggtaccaagtcacatttctggagacgcacatttgtcagagactggaaatgctcagttggtgtatgtggatgcagaagtactagcctcaatagatgccaaaggtagtgtgcaaaagaagtttttgatatctgatcggtcatttgttagattttcgccacagttattctattattcaaacatggagttatatttgcaacacaacacgattgaatctttcatcaaagagttgctctaacataaatttggcatgggcatcccttatagttgaagaatgtgttaggctcggtttcacgtacttctgtatagctccagggtcaagatcatccccgcttgcactttctgctacaggccatcctttgacaaaatgcatatcatgttacgatgaacgttcacttggatttcatgctcttggctatgggagaggttctcgaaagccagcagtagtaatcacatcatcaggaaccgctgtatcaaatcttctcccttcggtggttgaggctagtcaagatttcataccaattatattactcacagctgaccgtcctcctgagttgcatgatgctggagctaaccaagccatcaatcaggtcaatcattttggtacctttgtaagatatttttttaacctccctccacctggagaccgaatcaatgcaagaatggtgctcactacacttgattcagcagcctactatgcaatgcaagcaccacaaggccccgtgcatataaactgtgcttttagagaaccactagattacactaatcaacattggaatgttgattgtttgctaggtttggataagtggtttaaaaatagtgaaccatatactaaatacgtaagaatgaaaacagtttctgcattgggtaattactcttgctcagtaatggaggtcctggagatcatagagaaggcagaacaagggcttcttttagtgggtgctattcatacggatgaagatatgtgggctgtagctttactagctaggcacctatcctggccagttgctacagacattctgtctggactgcgattgcggaaagttgtaaattcattaccagggcttgataagagcattttgtttatagaccacattgatcaaattctgttgtctgagtctgctaaaaactggatacgccctgatgtcattgttcagattggtagccgcattactagcaaacgagtgggaatgtttcttgagacttccttcccatcttcctacatattgatcgataggcatccatgtcgtcatgatccttcacatgttgttactcacagaatacaagctaatgtagcagaatttgctgctaggttgtgccggtgtacttttcaaaggaagagaagcagatggacagaatttttgaccattcttaattcagtggtttgtcaggagataatgtttcagatacatgcgaagtgctcacttacagaaccatatgttgctcatgtaattggggagtcactttatggtgatgctgtcatgtttgttgggaacagcatggtcatccgagacttagacatgtttggcaacggttggatggattacactacaaatggaaataatgtgatgacacatcattttccagattttgttggcactgtagtggctgggaacagaggagcaagtggtattgatggtttaatcagcacagcagtcggatttgctgttgggtcaaacaagcatgtattttgtgtggttggtgacatatcttttcttcatgatacaaatggattggcacttctcaatcaaagggcatggcggaaacctatgacaataattgttgtcaacaaccatggtggtgcaatcttcagccttctaccagttgcaaaaactacttcaccacaaattttggagaaattcttctacacctctcatgacatatcaatttccaaactatgtgctgcacacagggtaaaacattttctagttcaaacaaaagcagagcttcatgatgcgttggtgaaatccaatatggaacaggttcatgagcatgttctctaactattctacaagtcagtatctgggctatcttctgggagttccacgttttaagaatgaggtagatgccatgcctgttgacagaattgatgcagtggaatacatgttgtacagaatccagctttctgcaccacgtacttcaggactatctgatggtagattcattcatgaaggatttgttctgaagcttcgtgtggaggataacattgtgggatttggtgaggttgcaccaatcgaaattcatgaagaggatctgttggatgtcgaagagcaaattagatatcttctccatagggtgaaagattctgtgctagatattattcccttactgagagggtccttttccaattggatatggacaagcctcggggttcctccttcttcgatattcccaagtgttaaatgcggtttggagatggctattcttaatttacttgcatcacaacggaaatgtagtttgttcaaagttctctctggttgtgacctgttctgccgagacgagaatgtggttgaatataatcagaacagttctgcaagcatacaaatttgtgcactcgtagattgcaatggctctccaatggaagtagcacttggtgtcgccaaactggttgctgaaggttttaccacatttaaactgaaggttgggcgccgtgaaagccccattgaggatgcaactgttcttcataaaataagagaagttgtggggtaccagatcaatatccgtgttgatgcaaatcagaaatggacatatgaacaggcagttgaatttggatccagggtacaaagtcttcatttggaatacattgaggaaccagtgagctctgtatatgatctcatcaagttctgtgaaaagaatgtcttgcctgttgcacttgatgagactattgacaaccttaggggggatgtaatttgtaagcttcatcaatttgttcatccaggaataattgctcttgttataaagcctagtgttgttggaggttttgagaatgcagctcatattgccaaatgggcgcagctacatgataagatggccgtcatcagtagcacgtatgagagttctataggtttggcatcctatatacagttagcacattatgttgaccaacagagctctatagtctccagaataagaaacaaagatacatgtagagccactgcacatggacttggaacatatcagtggttaagggaagatgtatcagaacaaaagttaaagatccatgcatccccacttggtgacggaatccgagccacagtagaagatgcccatggttatcttcaccatttaaacataaacaatgagaagataaaaagtacgtatggtgaagaaaaacataggtcatattctatccaagttgatgtggacgattgttcttatctagtcaaacttcgagaggctggtgatcatacaaatgaaaaggttgtccttttacttcatggatttcttggtacaagtgaagactgggttcccacgatgaaagctcttgcccccagtgcacggatttgttgttgaagttgatataccacataactaatggtgaggtggtggtggttggctattcaatgggtgcaaggattgcactccacatggcactaaatcaagatcacaagatccgtggagctgttacaatatcaggaagtcctggactgagagatgaagcaagcagaagacgccgtattgctattgataaatcaagagcccagttcctgatgtgttgtggacttgaatgttttcttcagacatggtactctggaaaactgtggaccagtctacgagagcatcctgagtttaattctctggtgaggacacgcagtaaacacaaaaacatcaaagctctagctaaggttcttgcagactcaagcgtggggagacaaaagtcccctgtgggaagacctgaagcacttgaagaggcctttactcgtcgttgctggtgaaaaggacgcaaagttcaaagacatctcgcagaaaatgcgcacggagataatgagccacgcagaatgcggatctgatggtcctaaagggaaggaactttgtgaagtgctcattatcccagatagcggccatgctgtgcatgttgagaaccctcttcctttggtgagagccgtgaggaagttcttactgaagctgtattgaggagaacatctgagtagaaccggtaaatggagcatcatgcaggtatattggtgtcctcacatatgcaggtgaagaaaggtttcaaattcgtgccgcccaagaagaactgaaatttggtctccgtctcgtccaatttgtcgtcgttggatcgttgcagtaactttttcccgtttggccttagtgttaatagcgtggctggtagatccaactggtgatgcctcttacgagggtttttgaaccccaatggactggcttccctttggtgattgtcagggttctgcatttcctagagataaattctcagcatgttcagacctggagtgccgtgccctttgtacaaggattccttttctagagttgtatgaaataaatgctcgctctcgagaagcggatttggtcaaaatctcactccactaccgagctgcggcgattcatcaagaagaccttcgtgccgatccctttgtgtaaataaaagtagcctcatctttctttgtcttgttgggatccgggaaccggccgactgtcgatcaagtgcgctttctgtgcgattcctgactgccaatttaagaacccttcttagca

SEQ ID NO: 50623 - DNA, 5854 bp, Zea Mays
ctcgctttcgtctcttccccctcttcccccaccttaccaaggcaccaacctcgctggcatgctcgccgtctctccctctccccctcctcgccttcctctcctcaccttaacccacctctgcgctttccctctcctcccacctcgacgccgcggcctctctcgcctccgcagccaccgcagtggcacccctctcgtcctgctccgcgcgcgcgcagtgcgtcacgctggtatcgtgatcgacatcgacgagatggtcgagaatgaggaccgtgacctacccgtggacgtatcgttcacgaggaggcttcctcccgcgctcactttcggtgacggcctcgacgcactgctgcgggccgccaacgaggtcaaggccaccccgcctgctggcgccaggagcggcgtgatcaggttcgaggtacttgttccacccagtacaaaggcacttaagtggtgctctcagtttagaggatcatcattgtttccccagttttatttatcaagggaactgaggtctgctccatcatgtcaacttgaaatctgtggcattggttccacaatctgctttcatggttcctacctaataaataatgaatttgatttggtatcaagatatatttcttctgattcacacttgataaaggcttatggattcgtagacatgaattatgacaaggaactaccatcaatagaggagaaacttgactcatattacttcttcatccctcaatttgagttgaacgagtttgatagttgttccatattatcatctaccctggtttgggatgattctatttctcatacgttcgaggacgcggtttctttatttaaatcttgttttgatcagatacaaaatagctatgattcttcagctagcatttcttacaaaggcttggtaccaagtcacatttctggagacgcacatttgtcagagactggaaatgctcagttggtgtatgtggatgcagaagtactagcctcaatagatgccaaaggtagtgtgcaaaaggtatccccttaaccttgaagtttttgatatctgatcggtcatttgttagattttcgccacagttattctattattcaaacatggagttatatttgcaacacaacacgattgaatctttcatcaaagagttgctctaacataaatttggcatgggcatcccttatagttgaagaatgtgttaggctcggtttcacgtacttctgtatagctccagggtcaagatcatccccgcttgcactttctgctacaggccatcctttgacaaaatgcatatcatgttacgatgaacgttcacttggatttcatgctcttggctatgggagaggttctcgaaagccagcagtagtaatcacatcatcaggaaccgctgtatcaaatcttctcccttcggtggttgaggctagtcaagatttcataccaattatattactcacagctgaccgtcctcctgagttgcatgatgctggagctaaccaagccatcaatcaggtcaatcattttggtacctttgtaagatatttttttaacctccctccacctggagaccgaatcaatgcaagaatggtgctcactacacttgattcagcagcctactatgcaatgcaagcaccacaaggccccgtgcatataaactgtgcttttagagaaccactagattacactaatcaacattggaatgttgattgtttgctaggtttggataagtggtttaaaaatagtgaaccatatactaaatacgtaagaatgaaaacagtttctgcattgggtaattactcttgctcagtaatggaggtcctggagatcatagagaaggcagaacaagggcttcttttagtgggtgctattcatacggatgaagatatgtgggctgtagctttactagctaggcacctatcctggccagttgctacagacattctgtctggactgcgattgcggaaagttgtaaattcattaccagggcttgataagagcattttgtttatagaccacattgatcaaattctgttgtctgagtctgctaaaaactggatacgccctgatgtcattgttcagattggtagccgcattactagcaaacgagtgggaatgtttcttgagacttccttcccatcttcctacatattgatcgataggcatccatgtcgtcatgatccttcacatgttgttactcacagaatacaagctaatgtagcagaatttgctgctaggttgtgccggtgtacttttcaaaggaagagaagcagatggacagaatttttgaccattcttaattcagtggtttgtcaggagataatgtttcagatacatgcgaagtgctcacttacagaaccatatgttgctcatgtaattggggagtcactttatggtgatgctgtcatgtttgttgggaacagcatggtcatccgagacttagacatgtttggcaacggttggatggattacactacaaatggaaataatgtgatgacacatcattttccagattttgttggcactgtagtggctgggaacagaggagcaagtggtattgatggtttaatcagcacagcagtcggatttgctgttgggtcaaacaagcatgtattttgtgtggttggtgacatatcttttcttcatgatacaaatggattggcacttctcaatcaaagggcatggcggaaacctatgacaataattgttgtcaacaaccatggtggtgcaatcttcagccttctaccagttgcaaaaactacttcaccacaaattttggagaaattcttctacacctctcatgacatatcaatttccaaactatgtgctgcacacagggtaaaacattttctagttcaaacaaaagcagagcttcatgatgcgttggtgaaatccaatatggaacaggttgattgtgtggtagaaataaacaatagtattgatagcaatgccgagtttcataggttcatatccaaagtaaatttattttatctttttttataactgtgttctccatcatgtatttacatatttgtacaagttctgcaggttcatgagcatgttctctaactattctacaagtcagtatctgggctatcttctgggagttccacgttttaagaatgaggtagatgccatgcctgttgacagaattgatgcagtggaatacatgttgtacagaatccagctttctgcaccacgtacttcaggactatctgatggtagattcattcatgaaggatttgttctgaagcttcgtgtggaggataacattgtgggatttggttgcaccaatcgaaattcatgaagaggatctgttggatgtcgaagagcaaattagatatcttctccatagggtgaaagattctgtgctagatattattcccttactgagagggtccttttccaattggatatggacaagcctcggggttcctccttcttcgatattcccaagtgttaaatgcggtttggagatggctattcttaatttacttgcatcacaacggaaatgtagtttgttcaaagttctctctggttgtgacctgttctgccgagacgagaatgtggttgaatataatcagaacagttctgcaagcatacaaatttgtgcactcgtagattgcaatggctctccaatggaagtagcacttggtgtcgccaaactggttgctgaaggttttaccacatttaaactgaaggttgggcgccgtgaaagccccattgaggatgcaactgttcttcataaaataagagaagttgtggggtaccagatcaatatccgtgttgatgcaaatcagaaatggacatatgaacaggcagttgaatttggatccagggtacaaagtcttcatttggaatacattgaggaaccagtgagctctgtatatgatctcatcaagttctgtgaaaagaatgtcttgcctgttgcacttgatgagactattgacaaccttaggggggatgtaatttgtaagcttcatcaatttgttcatccaggaataattgctcttgttataaagcctagtgttgttggaggttttgagaatgcagctcatattgccaaatgggcgcagctacatgataagatggccgtcatcagtagcacgtatgagagttctataggtttggcatcctatatacagttagcacattatgttgaccaacagagctctatagtctccagaataagaaacaaagatacatgtagagccactgcacatggacttggaacatatcagtggttaagggaagatgtatcagaacaaaagttaaagatccatgcatccccacttggtgacggaatccgagccacagtagaagatgcccatggttatcttcaccatttaaacataaacaatgagaagataaaaagtacgtatggtgaagaaaaacataggtcatattctatccaagttgatgtggacgattgttcttatctagtcaaacttcgagaggctggtgatcatacaaatgaaaaggttgtccttttacttcatggatttcttggtacaagtgaagactgggttcccacgatgaaagctcttgcccccagtgcacgggtaattgcaattgatcttcctggtcatggcgagtcacagatactgcaacgtcacaaaaattcagaacaacctgctgtaacagttcaactagttgcagatttgttgttgaagttgatataccacataactaatggtgaggtggtggtggttggctattcaatgggtgcaaggattgcactccacatggcactaaatcaagatcacaagatccgtggagctgttacaatatcaggaagtcctggactgagagatgaagcaagcagaagacgccgtattgctattgataaatcaagagcccagttcctgatgtgttgtggacttgaatgttttcttcagacatggtactctggaaaactgtggaccagtctacgagagcatcctgagtttaattctctggtgaggacacgcagtaaacacaaaaacatcaaagctctagctaaggttcttgcagactcaagcgtggggagacaaaagtcccctgtgggaagacctgaagcacttgaagaggcctttactcgtcgttgctggtgaaaaggacgcaaagttcaaagacatctcgcagaaaatgcgcacggagataatgagccacgcagaatgcggatctgatggtcctaaagggaaggaactttgtgaagtgctcattatcccagatagcggccatgctgtgcatgttgagaaccctcttcctttggtgagagccgtgaggaagttcttactgaagctgtattgaggagaacatctgagtagaaccggtaaatggagcatcatgcaggtatattggtgtcctcacatatgcaggtgaagaaaggtttcaaattcgtgccgcccaagaagaactgaaatttggtctccgtctcgtccaatttgtcgtcgttggatcgttgcagtaactttttcccgtttggccttagtgttaatagcgtggctggtagatccaactggtgatgcctcttacgagggtttttgaaccccaatggactggcttccctttggtgattgtcagggttctgcatttcctagagataaattctcagcatgttcagacctggagtgccgtgccctttgtacaaggattccttttctagagttgtatgaaataaatgctcgctctcgagaagcggatttggtcaaaatctcactccactaccgagctgcggcgattcatcaagaagaccttcgtgccgatccctttgtgtaaataaaagtagcctcatctttctttgtcttgttgggatccgggaaccggccgactgtcgatcaagtgcgctttctgtgcgattcctgactgccaatttaagaacccttcttagca

SEQ ID NO: 50624 - DNA, 5800 bp, Zea Mays
ctcgctttcgtctcttccccctcttcccccaccttaccaaggcaccaacctcgctggcatgctcgccgtctctccctctccccctcctcgccttcctctcctcaccttaacccacctctgcgctttccctctcctcccacctcgacgccgcggcctctctcgcctccgcagccaccgcagtggcacccctctcgtcctgctccgcgcgcgcgcagtgcgtcacgctggtatcgtgatcgacatcgacgagatggtcgagaatgaggaccgtgacctacccgtggacgtatcgttcacgaggaggcttcctcccgcgctcactttcggtgacggcctcgacgcactgctgcgggccgccaacgaggtcaaggccaccccgcctgctggcgccaggagcggcgtgatcaggttcgaggtacttgttccacccagtacaaaggcacttaagtggtgctctcagtttagaggatcatcattgtttccccagttttatttatcaagggaactgaggtctgctccatcatgtcaacttgaaatctgtggcattggttccacaatctgctttcatggttcctacctaataaataatgaatttgatttggtatcaagatatatttcttctgattcacacttgataaaggcttatggattcgtagacatgaattatgacaaggaactaccatcaatagaggagaaacttgactcatattacttcttcatccctcaatttgagttgaacgagtttgatagttgttccatattatcatctaccctggtttgggatgattctatttctcatacgttcgaggacgcggtttctttatttaaatcttgttttgatcagatacaaaatagctatgattcttcagctagcatttcttacaaaggcttggtaccaagtcacatttctggagacgcacatttgtcagagactggaaatgctcagttggtgtatgtggatgcagaagtactagcctcaatagatgccaaaggtagtgtgcaaaaggtatccccttaaccttgaagtttttgatatctgatcggtcatttgttagattttcgccacagttattctattattcaaacatggagttatatttgcaacacaacacgattgaatctttcatcaaagagttgctctaacataaatttggcatgggcatcccttatagttgaagaatgtgttaggctcggtttcacgtacttctgtatagctccagggtcaagatcatccccgcttgcactttctgctacaggccatcctttgacaaaatgcatatcatgttacgatgaacgttcacttggatttcatgctcttggctatgggagaggttctcgaaagccagcagtagtaatcacatcatcaggaaccgctgtatcaaatcttctcccttcggtggttgaggctagtcaagatttcataccaattatattactcacagctgaccgtcctcctgagttgcatgatgctggagctaaccaagccatcaatcaggtcaatcattttggtacctttgtaagatatttttttaacctccctccacctggagaccgaatcaatgcaagaatggtgctcactacacttgattcagcagcctactatgcaatgcaagcaccacaaggccccgtgcatataaactgtgcttttagagaaccactagattacactaatcaacattggaatgttgattgtttgctaggtttggataagtggtttaaaaatagtgaaccatatactaaatacgtaagaatgaaaacagtttctgcattgggtaattactcttgctcagtaatggaggtcctggagatcatagagaaggcagaacaagggcttcttttagtgggtgctattcatacggatgaagatatgtgggctgtagctttactagctaggcacctatcctggccagttgctacagacattctgtctggactgcgattgcggaaagttgtaaattcattaccagggcttgataagagcattttgtttatagaccacattgatcaaattctgttgtctgagtctgctaaaaactggatacgccctgatgtcattgttcagattggtagccgcattactagcaaacgagtgggaatgtttcttgagacttccttcccatcttcctacatattgatcgataggcatccatgtcgtcatgatccttcacatgttgttactcacagaatacaagctaatgtagcagaatttgctgctaggttgtgccggtgtacttttcaaaggaagagaagcagatggacagaatttttgaccattcttaattcagtggtttgtcaggagataatgtttcagatacatgcgaagtgctcacttacagaaccatatgttgctcatgtaattggggagtcactttatggtgatgctgtcatgtttgttgggaacagcatggtcatccgagacttagacatgtttggcaacggttggatggattacactacaaatggaaataatgtgatgacacatcattttccagattttgttggcactgtagtggctgggaacagaggagcaagtggtattgatggtttaatcagcacagcagtcggatttgctgttgggtcaaacaagcatgtattttgtgtggttggtgacatatcttttcttcatgatacaaatggattggcacttctcaatcaaagggcatggcggaaacctatgacaataattgttgtcaacaaccatggtggtgcaatcttcagccttctaccagttgcaaaaactacttcaccacaaattttggagaaattcttctacacctctcatgacatatcaatttccaaactatgtgctgcacacagggtaaaacattttctagttcaaacaaaagcagagcttcatgatgcgttggtgaaatccaatatggaacaggttgattgtgtggtagaaataaacaatagtattgatagcaatgccgagtttcataggttcatatccaaagtaaatttattttatctttttttataactgtgttctccatcatgtatttacatatttgtacaagttctgcaggttcatgagcatgttctctaactattctacaagtcagtatctgggctatcttctgggagttccacgttttaagaatgaggtagatgccatgcctgttgacagaattgatgcagtggaatacatgttgtacaggatttgttctgaagcttcgtgtggaggataacattgtgggatttggtgaggttgcaccaatcgaaattcatgaagaggatctgttggatgtcgaagagcaaattagatatcttctccatagggtgaaagattctgtgctagatattattcccttactgagagggtccttttccaattggatatggacaagcctcggggttcctccttcttcgatattcccaagtgttaaatgcggtttggagatggctattcttaatttacttgcatcacaacggaaatgtagtttgttcaaagttctctctggttgtgacctgttctgccgagacgagaatgtggttgaatataatcagaacagttctgcaagcatacaaatttgtgcactcgtagattgcaatggctctccaatggaagtagcacttggtgtcgccaaactggttgctgaaggttttaccacatttaaactgaaggttgggcgccgtgaaagccccattgaggatgcaactgttcttcataaaataagagaagttgtggggtaccagatcaatatccgtgttgatgcaaatcagaaatggacatatgaacaggcagttgaatttggatccagggtacaaagtcttcatttggaatacattgaggaaccagtgagctctgtatatgatctcatcaagttctgtgaaaagaatgtcttgcctgttgcacttgatgagactattgacaaccttaggggggatgtaatttgtaagcttcatcaatttgttcatccaggaataattgctcttgttataaagcctagtgttgttggaggttttgagaatgcagctcatattgccaaatgggcgcagctacatgataagatggccgtcatcagtagcacgtatgagagttctataggtttggcatcctatatacagttagcacattatgttgaccaacagagctctatagtctccagaataagaaacaaagatacatgtagagccactgcacatggacttggaacatatcagtggttaagggaagatgtatcagaacaaaagttaaagatccatgcatccccacttggtgacggaatccgagccacagtagaagatgcccatggttatcttcaccatttaaacataaacaatgagaagataaaaagtacgtatggtgaagaaaaacataggtcatattctatccaagttgatgtggacgattgttcttatctagtcaaacttcgagaggctggtgatcatacaaatgaaaaggttgtccttttacttcatggatttcttggtacaagtgaagactgggttcccacgatgaaagctcttgcccccagtgcacgggtaattgcaattgatcttcctggtcatggcgagtcacagatactgcaacgtcacaaaaattcagaacaacctgctgtaacagttcaactagttgcagatttgttgttgaagttgatataccacataactaatggtgaggtggtggtggttggctattcaatgggtgcaaggattgcactccacatggcactaaatcaagatcacaagatccgtggagctgttacaatatcaggaagtcctggactgagagatgaagcaagcagaagacgccgtattgctattgataaatcaagagcccagttcctgatgtgttgtggacttgaatgttttcttcagacatggtactctggaaaactgtggaccagtctacgagagcatcctgagtttaattctctggtgaggacacgcagtaaacacaaaaacatcaaagctctagctaaggttcttgcagactcaagcgtggggagacaaaagtcccctgtgggaagacctgaagcacttgaagaggcctttactcgtcgttgctggtgaaaaggacgcaaagttcaaagacatctcgcagaaaatgcgcacggagataatgagccacgcagaatgcggatctgatggtcctaaagggaaggaactttgtgaagtgctcattatcccagatagcggccatgctgtgcatgttgagaaccctcttcctttggtgagagccgtgaggaagttcttactgaagctgtattgaggagaacatctgagtagaaccggtaaatggagcatcatgcaggtatattggtgtcctcacatatgcaggtgaagaaaggtttcaaattcgtgccgcccaagaagaactgaaatttggtctccgtctcgtccaatttgtcgtcgttggatcgttgcagtaactttttcccgtttggccttagtgttaatagcgtggctggtagatccaactggtgatgcctcttacgagggtttttgaaccccaatggactggcttccctttggtgattgtcagggttctgcatttcctagagataaattctcagcatgttcagacctggagtgccgtgccctttgtacaaggattccttttctagagttgtatgaaataaatgctcgctctcgagaagcggatttggtcaaaatctcactccactaccgagctgcggcgattcatcaagaagaccttcgtgccgatccctttgtgtaaataaaagtagcctcatctttctttgtcttgttgggatccgggaaccggccgactgtcgatcaagtgcgctttctgtgcgattcctgactgccaatttaagaacccttcttagca

SEQ ID NO: 50625 - DNA, 5188 bp, Zea Mays
ctcgctttcgtctcttccccctcttcccccaccttaccaaggcaccaacctcgctggcatgctcgccgtctctccctctccccctcctcgccttcctctcctcaccttaacccacctctgcgctttccctctcctcccacctcgacgccgcggcctctctcgcctccgcagccaccgcagtggcacccctctcgtcctgctccgcgcgcgcgcagtgcgtcacgctggtatcgtgatcgacatcgacgagatggtcgagaatgaggaccgtgacctacccgtggacgtatcgttcacgaggaggcttcctcccgcgctcactttcggtgacggcctcgacgcactgctgcgggccgccaacgaggtcaaggccaccccgcctgctggcgccaggagcggcgtgatcaggttcgaggtacttgttccacccagtacaaaggcacttaagtggtgctctcagtttagaggatcatcattgtttccccagttttatttatcaagggaactgaggtctgctccatcatgtcaacttgaaatctgtggcattggttccacaatctgctttcatggttcctacctaataaataatgaatttgatttggtatcaagatatatttcttctgattcacacttgataaaggcttatggattcgtagacatgaattatgacaaggaactaccatcaatagaggagaaacttgactcatattacttcttcatccctcaatttgagttgaacgagtttgatagttgttccatattatcatctaccctggtttgggatgattctatttctcatacgttcgaggacgcggtttctttatttaaatcttgttttgatcagatacaaaatagctatgattcttcagctagcatttcttacaaaggcttggtaccaagtcacatttctggagacgcacatttgtcagagactggaaatgctcagttggtgtatgtggatgcagaagtactagcctcaatagatgccaaaggtagtgtgcaaaaggtatccccttaaccttgaagtttttgatatctgatcggtcatttgttagattttcgccacagttattctattattcaaacatggagttatatttgcaacacaacacgattgaatctttcatcaaagagttgctctaacataaatttggcatgggcatcccttatagttgaagaatgtgttaggctcggtttcacgtacttctgtatagctccagggtcaagatcatccccgcttgcactttctgctacaggccatcctttgacaaaatgcatatcatgttacgatgaacgttcacttggatttcatgctcttggctatgggagaggttctcgaaagccagcagtagtaatcacatcatcaggaaccgctgtatcaaatcttctcccttcggtggttgaggctagtcaagatttcataccaattatattactcacagctgaccgtcctcctgagttgcatgatgctggagctaaccaagccatcaatcagattggtagccgcattactagcaaacgagtgggaatgtttcttgagacttccttcccatcttcctacatattgatcgataggcatccatgtcgtcatgatccttcacatgttgttactcacagaatacaagctaatgtagcagaatttgctgctaggttgtgccggtgtacttttcaaaggaagagaagcagatggacagaatttttgaccattcttaattcagtggtttgtcaggagataatgtttcagatacatgcgaagtgctcacttacagaaccatatgttgctcatgtaattggggagtcactttatggtgatgctgtcatgtttgttgggaacagcatggtcatccgagacttagacatgtttggcaacggttggatggattacactacaaatggaaataatgtgatgacacatcattttccagattttgttggcactgtagtggctgggaacagaggagcaagtggtattgatggtttaatcagcacagcagtcggatttgctgttgggtcaaacaagcatgtattttgtgtggttggtgacatatcttttcttcatgatacaaatggattggcacttctcaatcaaagggcatggcggaaacctatgacaataattgttgtcaacaaccatggtggtgcaatcttcagccttctaccagttgcaaaaactacttcaccacaaattttggagaaattcttctacacctctcatgacatatcaatttccaaactatgtgctgcacacagggtaaaacattttctagttcaaacaaaagcagagcttcatgatgcgttggtgaaatccaatatggaacaggttgattgtgtggtagaaataaacaatagtattgatagcaatgccgagtttcataggttcatatccaaagtaaatttattttatctttttttataactgtgttctccatcatgtatttacatatttgtacaagttctgcaggttcatgagcatgttctctaactattctacaagtcagtatctgggctatcttctgggagttccacgttttaagaatgaggtagatgccatgcctgttgacagaattgatgcagtggaatacatgttgtacagctttctgcaccacgtacttcaggactatctgatggtagattcattcatgaaggatttgttctgaagcttcgtgtggaggataacattgtgggatttggtgaggttgcaccaatcgaaattcatgaagaggatctgttggatgtcgaagagcaaattagatatcttctccatagggtgaaagattctgtgctagatattattcccttactgagagggtccttttccaattggatatggacaagcctcggggttcctccttcttcgatattcccaagtgttaaatgcggtttggagatggctattcttaatttacttgcatcacaacggaaatgtagtttgttcaaagttctctctggttgtgacctgttctgccgagacgagaatgtggttgaatataatcagaacagttctgcaagcatacaaatttgtgcactcgtagattgcaatggctctccaatggaagtagcacttggtgtcgccaaactggttgctgaaggttttaccacatttaaactgaaggttgggcgccgtgaaagccccattgaggatgcaactgttcttcataaaataagagaagttgtggggtaccagatcaatatccgtgttgatgcaaatcagaaatggacatatgaacaggcagttgaatttggatccagggtacaaagtcttcatttggaatacattgaggaaccagtgagctctgtatatgatctcatcaagttctgtgaaaagaatgtcttgcctgttgcacttgatgagactattgacaaccttaggggggatgtaatttgtaagcttcatcaatttgttcatccaggaataattgctcttgttataaagcctagtgttgttggaggttttgagaatgcagctcatattgccaaatgggcgcagctacatgataagatggccgtcatcagtagcacgtatgagagttctataggtttggcatcctatatacagttagcacattatgttgaccaacagagctctatagtctccagaataagaaacaaagatacatgtagagccactgcacatggacttggaacatatcagtggttaagggaagatgtatcagaacaaaagttaaagatccatgcatccccacttggtgacggaatccgagccacagtagaagatgcccatggttatcttcaccatttaaacataaacaatgagaagataaaaagtacgtatggtgaagaaaaacataggtcatattctatccaagttgatgtggacgattgttcttatctagtcaaacttcgagaggctggtgatcatacaaatgaaaaggttgtccttttacttcatggatttcttggtacaagtgaagactgggttcccacgatgaaagctcttgcccccagtgcacggatttgttgttgaagttgatataccacataactaatggtgaggtggtggtggttggctattcaatgggtgcaaggattgcactccacatggcactaaatcaagatcacaagatccgtggagctgttacaatatcaggaagtcctggactgagagatgaagcaagcagaagacgccgtattgctattgataaatcaagagcccagttcctgatgtgttgtggacttgaatgttttcttcagacatggtactctggaaaactgtggaccagtctacgagagcatcctgagtttaattctctggtgaggacacgcagtaaacacaaaaacatcaaagctctagctaaggttcttgcagactcaagcgtggggagacaaaagtcccctgtgggaagacctgaagcacttgaagaggcctttactcgtcgttgctggtgaaaaggacgcaaagttcaaagacatctcgcagaaaatgcgcacggagataatgagccacgcagaatgcggatctgatggtcctaaagggaaggaactttgtgaagtgctcattatcccagatagcggccatgctgtgcatgttgagaaccctcttcctttggtgagagccgtgaggaagttcttactgaagctgtattgaggagaacatctgagtagaaccggtaaatggagcatcatgcaggtatattggtgtcctcacatatgcaggtgaagaaaggtttcaaattcgtgccgcccaagaagaactgaaatttggtctccgtctcgtccaatttgtcgtcgttggatcgttgcagtaactttttcccgtttggccttagtgttaatagcgtggctggtagatccaactggtgatgcctcttacgagggtttttgaaccccaatggactggcttccctttggtgattgtcagggttctgcatttcctagagataaattctcagcatgttcagacctggagtgccgtgccctttgtacaaggattccttttctagagttgtatgaaataaatgctcgctctcgagaagcggatttggtcaaaatctcactccactaccgagctgcggcgattcatcaagaagaccttcgtgccgatccctttgtgtaaataaaagtagcctcatctttctttgtcttgttgggatccgggaaccggccgactgtcgatcaagtgcgctttctgtgcgattcctgactgccaatttaagaacccttcttagca

SEQ ID NO: 50626 - DNA, 5580 bp, Zea Mays
ctcgctttcgtctcttccccctcttcccccaccttaccaaggcaccaacctcgctggcatgctcgccgtctctccctctccccctcctcgccttcctctcctcaccttaacccacctctgcgctttccctctcctcccacctcgacgccgcggcctctctcgcctccgcagccaccgcagtggcacccctctcgtcctgctccgcgcgcgcgcagtgcgtcacgctggtatcgtgatcgacatcgacgagatggtcgagaatgaggaccgtgacctacccgtggacgtatcgttcacgaggaggcttcctcccgcgctcactttcggtgacggcctcgacgcactgctgcgggccgccaacgaggtcaaggccaccccgcctgctggcgccaggagcggcgtgatcaggttcgaggtacttgttccacccagtacaaaggcacttaagtggtgctctcagtttagaggatcatcattgtttccccagttttatttatcaagggaactgaggtctgctccatcatgtcaacttgaaatctgtggcattggttccacaatctgctttcatggttcctacctaataaataatgaatttgatttggtatcaagatatatttcttctgattcacacttgataaaggcttatggattcgtagacatgaattatgacaaggaactaccatcaatagaggagaaacttgactcatattacttcttcatccctcaatttgagttgaacgagtttgatagttgttccatattatcatctaccctggtttgggatgattctatttctcatacgttcgaggacgcggtttctttatttaaatcttgttttgatcagatacaaaatagctatgattcttcagctagcatttcttacaaaggcttggtaccaagtcacatttctggagacgcacatttgtcagagactggaaatgctcagttggtgtatgtggatgcagaagtactagcctcaatagatgccaaaggtagtgtgcaaaaggagttatatttgcaacacaacacgattgaatctttcatcaaagagttgctctaacataaatttggcatgggcatcccttatagttgaagaatgtgttaggctcggtttcacggccatcctttgacaaaatgcatatcatgttacgatgaacgttcacttggatttcatgctcttggctatgggagaggttctcgaaagccagcagtagtaatcacatcatcaggaaccgctgtatcaaatcttctcccttcggtggttgaggctagtcaagatttcataccaattatattactcacagctgaccgtcctcctgagttgcatgatgctggagctaaccaagccatcaatcaggtcaatcattttggtacctttgtaagatatttttttaacctccctccacctggagaccgaatcaatgcaagaatggtgctcactacacttgattcagcagcctactatgcaatgcaagcaccacaaggccccgtgcatataaactgtgcttttagagaaccactagattacactaatcaacattggaatgttgattgtttgctaggtttggataagtggtttaaaaatagtgaaccatatactaaatacgtaagaatgaaaacagtttctgcattgggtaattactcttgctcagtaatggaggtcctggagatcatagagaaggcagaacaagggcttcttttagtgggtgctattcatacggatgaagatatgtgggctgtagctttactagctaggcacctatcctggccagttgctacagacattctgtctggactgcgattgcggaaagttgtaaattcattaccagggcttgataagagcattttgtttatagaccacattgatcaaattctgttgtctgagtctgctaaaaactggatacgccctgatgtcattgttcagattggtagccgcattactagcaaacgagtgggaatgtttcttgagacttccttcccatcttcctacatattgatcgataggcatccatgtcgtcatgatccttcacatgttgttactcacagaatacaagctaatgtagcagaatttgctgctaggttgtgccggtgtacttttcaaaggaagagaagcagatggacagaatttttgaccattcttaattcagtggtttgtcaggagataatgtttcagatacatgcgaagtgctcacttacagaaccatatgttgctcatgtaattggggagtcactttatggtgatgctgtcatgtttgttgggaacagcatggtcatccgagacttagacatgtttggcaacggttggatggattacactacaaatggaaataatgtgatgacacatcattttccagattttgttggcactgtagtggctgggaacagaggagcaagtggtattgatggtttaatcagcacagcagtcggatttgctgttgggtcaaacaagcatgtattttgtgtggttggtgacatatcttttcttcatgatacaaatggattggcacttctcaatcaaagggcatggcggaaacctatgacaataattgttgtcaacaaccatggtggtgcaatcttcagccttctaccagttgcaaaaactacttcaccacaaattttggagaaattcttctacacctctcatgacatatcaatttccaaactatgtgctgcacacagggtaaaacattttctagttcaaacaaaagcagagcttcatgatgcgttggtgaaatccaatatggaacaggttcatgagcatgttctctaactattctacaagtcagtatctgggctatcttctgggagttccacgttttaagaatgaggtagatgccatgcctgttgacagaattgatgcagtggaatacatgttgtacagaatccagctttctgcaccacgtacttcaggactatctgatggtagattcattcatgaaggatttgttctgaagcttcgtgtggaggataacattgtgggatttggtgaggttgcaccaatcgaaattcatgaagaggatctgttggatgtcgaagagcaaattagatatcttctccatagggtgaaagattctgtgctagatattattcccttactgagagggtccttttccaattggatatggacaagcctcggggttcctccttcttcgatattcccaagtgttaaatgcggtttggagatggctattcttaatttacttgcatcacaacggaaatgtagtttgttcaaagttctctctggttgtgacctgttctgccgagacgagaatgtggttgaatataatcagaacagttctgcaagcatacaaatttgtgcactcgtagattgcaatggctctccaatggaagtagcacttggtgtcgccaaactggttgctgaaggttttaccacatttaaactgaaggttgggcgccgtgaaagccccattgaggatgcaactgttcttcataaaataagagaagttgtggggtaccagatcaatatccgtgttgatgcaaatcagaaatggacatatgaacaggcagttgaatttggatccagggtacaaagtcttcatttggaatacattgaggaaccagtgagctctgtatatgatctcatcaagttctgtgaaaagaatgtcttgcctgttgcacttgatgagactattgacaaccttaggggggatgtaatttgtaagcttcatcaatttgttcatccaggaataattgctcttgttataaagcctagtgttgttggaggttttgagaatgcagctcatattgccaaatgggcgcagctacatgataagatggccgtcatcagtagcacgtatgagagttctataggtttggcatcctatatacagttagcacattatgttgaccaacagagctctatagtctccagaataagaaacaaagatacatgtagagccactgcacatggacttggaacatatcagtggttaagggaagatgtatcagaacaaaagttaaagatccatgcatccccacttggtgacggaatccgagccacagtagaagatgcccatggttatcttcaccatttaaacataaacaatgagaagataaaaagtacgtatggtgaagaaaaacataggtcatattctatccaagttgatgtggacgattgttcttatctagtcaaacttcgagaggctggtgatcatacaaatgaaaaggttgtccttttacttcatggatttcttggtacaagtgaagactgggttcccacgatgaaagctcttgcccccagtgcacgggtaattgcaattgatcttcctggtcatggcgagtcacagatactgcaacgtcacaaaaattcagaacaacctgctgtaacagttcaactagttgcagatttgttgttgaagttgatataccacataactaatggtgaggtggtggtggttggctattcaatgggtgcaaggattgcactccacatggcactaaatcaagatcacaagatccgtggagctgttacaatatcaggaagtcctggactgagagatgaagcaagcagaagacgccgtattgctattgataaatcaagagcccagttcctgatgtgttgtggacttgaatgttttcttcagacatggtactctggaaaactgtggaccagtctacgagagcatcctgagtttaattctctggtgaggacacgcagtaaacacaaaaacatcaaagctctagctaaggttcttgcagactcaagcgtggggagacaaaagtcccctgtgggaagacctgaagcacttgaagaggcctttactcgtcgttgctggtgaaaaggacgcaaagttcaaagacatctcgcagaaaatgcgcacggagataatgagccacgcagaatgcggatctgatggtcctaaagggaaggaactttgtgaagtgctcattatcccagatagcggccatgctgtgcatgttgagaaccctcttcctttggtgagagccgtgaggaagttcttactgaagctgtattgaggagaacatctgagtagaaccggtaaatggagcatcatgcaggtatattggtgtcctcacatatgcaggtgaagaaaggtttcaaattcgtgccgcccaagaagaactgaaatttggtctccgtctcgtccaatttgtcgtcgttggatcgttgcagtaactttttcccgtttggccttagtgttaatagcgtggctggtagatccaactggtgatgcctcttacgagggtttttgaaccccaatggactggcttccctttggtgattgtcagggttctgcatttcctagagataaattctcagcatgttcagacctggagtgccgtgccctttgtacaaggattccttttctagagttgtatgaaataaatgctcgctctcgagaagcggatttggtcaaaatctcactccactaccgagctgcggcgattcatcaagaagaccttcgtgccgatccctttgtgtaaataaaagtagcctcatctttctttgtcttgttgggatccgggaaccggccgactgtcgatcaagtgcgctttctgtgcgattcctgactgccaatttaagaacccttcttagca

SEQ ID NO: 50627 - DNA, 5775 bp, Zea Mays
ctcgctttcgtctcttccccctcttcccccaccttaccaaggcaccaacctcgctggcatgctcgccgtctctccctctccccctcctcgccttcctctcctcaccttaacccacctctgcgctttccctctcctcccacctcgacgccgcggcctctctcgcctccgcagccaccgcagtggcacccctctcgtcctgctccgcgcgcgcgcagtgcgtcacgctggtatcgtgatcgacatcgacgagatggtcgagaatgaggaccgtgacctacccgtggacgtatcgttcacgaggaggcttcctcccgcgctcactttcggtgacggcctcgacgcactgctgcgggccgccaacgaggtcaaggccaccccgcctgctggcgccaggagcggcgtgatcaggttcgaggtacttgttccacccagtacaaaggcacttaagtggtgctctcagtttagaggatcatcattgtttccccagttttatttatcaagggaactgaggtctgctccatcatgtcaacttgaaatctgtggcattggttccacaatctgctttcatggttcctacctaataaataatgaatttgatttggtatcaagatatatttcttctgattcacacttgataaaggcttatggattcgtagacatgaattatgacaaggaactaccatcaatagaggagaaacttgactcatattacttcttcatccctcaatttgagttgaacgagtttgatagttgttccatattatcatctaccctggtttgggatgattctatttctcatacgttcgaggacgcggtttctttatttaaatcttgttttgatcagatacaaaatagctatgattcttcagctagcatttcttacaaaggcttggtaccaagtcacatttctggagacgcacatttgtcagagactggaaatgctcagttggtgtatgtggatgcagaagtactagcctcaatagatgccaaaggtagtgtgcaaaaggtatccccttaaccttgaagtttttgatatctgatcggtcatttgttagattttcgccacagttattctattattcaaacatggagttatatttgcaacacaacacgattgaatctttcatcaaagagttgctctaacataaatttggcatgggcatcccttatagttgaagaatgtgttaggctcggtttcacggccatcctttgacaaaatgcatatcatgttacgatgaacgttcacttggatttcatgctcttggctatgggagaggttctcgaaagccagcagtagtaatcacatcatcaggaaccgctgtatcaaatcttctcccttcggtggttgaggctagtcaagatttcataccaattatattactcacagctgaccgtcctcctgagttgcatgatgctggagctaaccaagccatcaatcaggtcaatcattttggtacctttgtaagatatttttttaacctccctccacctggagaccgaatcaatgcaagaatggtgctcactacacttgattcagcagcctactatgcaatgcaagcaccacaaggccccgtgcatataaactgtgcttttagagaaccactagattacactaatcaacattggaatgttgattgtttgctaggtttggataagtggtttaaaaatagtgaaccatatactaaatacgtaagaatgaaaacagtttctgcattgggtaattactcttgctcagtaatggaggtcctggagatcatagagaaggcagaacaagggcttcttttagtgggtgctattcatacggatgaagatatgtgggctgtagctttactagctaggcacctatcctggccagttgctacagacattctgtctggactgcgattgcggaaagttgtaaattcattaccagggcttgataagagcattttgtttatagaccacattgatcaaattctgttgtctgagtctgctaaaaactggatacgccctgatgtcattgttcagattggtagccgcattactagcaaacgagtgggaatgtttcttgagacttccttcccatcttcctacatattgatcgataggcatccatgtcgtcatgatccttcacatgttgttactcacagaatacaagctaatgtagcagaatttgctgctaggttgtgccggtgtacttttcaaaggaagagaagcagatggacagaatttttgaccattcttaattcagtggtttgtcaggagataatgtttcagatacatgcgaagtgctcacttacagaaccatatgttgctcatgtaattggggagtcactttatggtgatgctgtcatgtttgttgggaacagcatggtcatccgagacttagacatgtttggcaacggttggatggattacactacaaatggaaataatgtgatgacacatcattttccagattttgttggcactgtagtggctgggaacagaggagcaagtggtattgatggtttaatcagcacagcagtcggatttgctgttgggtcaaacaagcatgtattttgtgtggttggtgacatatcttttcttcatgatacaaatggattggcacttctcaatcaaagggcatggcggaaacctatgacaataattgttgtcaacaaccatggtggtgcaatcttcagccttctaccagttgcaaaaactacttcaccacaaattttggagaaattcttctacacctctcatgacatatcaatttccaaactatgtgctgcacacagggtaaaacattttctagttcaaacaaaagcagagcttcatgatgcgttggtgaaatccaatatggaacaggttgattgtgtggtagaaataaacaatagtattgatagcaatgccgagtttcataggttcatatccaaagtaaatttattttatctttttttataactgtgttctccatcatgtatttacatatttgtacaagttctgcaggttcatgagcatgttctctaactattctacaagtcagtatctgggctatcttctgggagttccacgttttaagaatgaggtagatgccatgcctgttgacagaattgatgcagtggaatacatgttgtacaggactatctgatggtagattcattcatgaaggatttgttctgaagcttcgtgtggaggataacattgtgggatttggtgaggttgcaccaatcgaaattcatgaagaggatctgttggatgtcgaagagcaaattagatatcttctccatagggtgaaagattctgtgctagatattattcccttactgagagggtccttttccaattggatatggacaagcctcggggttcctccttcttcgatattcccaagtgttaaatgcggtttggagatggctattcttaatttacttgcatcacaacggaaatgtagtttgttcaaagttctctctggttgtgacctgttctgccgagacgagaatgtggttgaatataatcagaacagttctgcaagcatacaaatttgtgcactcgtagattgcaatggctctccaatggaagtagcacttggtgtcgccaaactggttgctgaaggttttaccacatttaaactgaaggttgggcgccgtgaaagccccattgaggatgcaactgttcttcataaaataagagaagttgtggggtaccagatcaatatccgtgttgatgcaaatcagaaatggacatatgaacaggcagttgaatttggatccagggtacaaagtcttcatttggaatacattgaggaaccagtgagctctgtatatgatctcatcaagttctgtgaaaagaatgtcttgcctgttgcacttgatgagactattgacaaccttaggggggatgtaatttgtaagcttcatcaatttgttcatccaggaataattgctcttgttataaagcctagtgttgttggaggttttgagaatgcagctcatattgccaaatgggcgcagctacatgataagatggccgtcatcagtagcacgtatgagagttctataggtttggcatcctatatacagttagcacattatgttgaccaacagagctctatagtctccagaataagaaacaaagatacatgtagagccactgcacatggacttggaacatatcagtggttaagggaagatgtatcagaacaaaagttaaagatccatgcatccccacttggtgacggaatccgagccacagtagaagatgcccatggttatcttcaccatttaaacataaacaatgagaagataaaaagtacgtatggtgaagaaaaacataggtcatattctatccaagttgatgtggacgattgttcttatctagtcaaacttcgagaggctggtgatcatacaaatgaaaaggttgtccttttacttcatggatttcttggtacaagtgaagactgggttcccacgatgaaagctcttgcccccagtgcacgggtaattgcaattgatcttcctggtcatggcgagtcacagatactgcaacgtcacaaaaattcagaacaacctgctgtaacagttcaactagttgcagatttgttgttgaagttgatataccacataactaatggtgaggtggtggtggttggctattcaatgggtgcaaggattgcactccacatggcactaaatcaagatcacaagatccgtggagctgttacaatatcaggaagtcctggactgagagatgaagcaagcagaagacgccgtattgctattgataaatcaagagcccagttcctgatgtgttgtggacttgaatgttttcttcagacatggtactctggaaaactgtggaccagtctacgagagcatcctgagtttaattctctggtgaggacacgcagtaaacacaaaaacatcaaagctctagctaaggttcttgcagactcaagcgtggggagacaaaagtcccctgtgggaagacctgaagcacttgaagaggcctttactcgtcgttgctggtgaaaaggacgcaaagttcaaagacatctcgcagaaaatgcgcacggagataatgagccacgcagaatgcggatctgatggtcctaaagggaaggaactttgtgaagtgctcattatcccagatagcggccatgctgtgcatgttgagaaccctcttcctttggtgagagccgtgaggaagttcttactgaagctgtattgaggagaacatctgagtagaaccggtaaatggagcatcatgcaggtatattggtgtcctcacatatgcaggtgaagaaaggtttcaaattcgtgccgcccaagaagaactgaaatttggtctccgtctcgtccaatttgtcgtcgttggatcgttgcagtaactttttcccgtttggccttagtgttaatagcgtggctggtagatccaactggtgatgcctcttacgagggtttttgaaccccaatggactggcttccctttggtgattgtcagggttctgcatttcctagagataaattctcagcatgttcagacctggagtgccgtgccctttgtacaaggattccttttctagagttgtatgaaataaatgctcgctctcgagaagcggatttggtcaaaatctcactccactaccgagctgcggcgattcatcaagaagaccttcgtgccgatccctttgtgtaaataaaagtagcctcatctttctttgtcttgttgggatccgggaaccggccgactgtcgatcaagtgcgctttctgtgcgattcctgactgccaatttaagaacccttcttagca

SEQ ID NO: 50628 - DNA, 5660 bp, Zea Mays
ctcgctttcgtctcttccccctcttcccccaccttaccaaggcaccaacctcgctggcatgctcgccgtctctccctctccccctcctcgccttcctctcctcaccttaacccacctctgcgctttccctctcctcccacctcgacgccgcggcctctctcgcctccgcagccaccgcagtggcacccctctcgtcctgctccgcgcgcgcgcagtgcgtcacgctggtatcgtgatcgacatcgacgagatggtcgagaatgaggaccgtgacctacccgtggacgtatcgttcacgaggaggcttcctcccgcgctcactttcggtgacggcctcgacgcactgctgcgggccgccaacgaggtcaaggccaccccgcctgctggcgccaggagcggcgtgatcaggttcgaggtacttgttccacccagtacaaaggcacttaagtggtgctctcagtttagaggatcatcattgtttccccagttttatttatcaagggaactgaggtctgctccatcatgtcaacttgaaatctgtggcattggttccacaatctgctttcatggttcctacctaataaataatgaatttgatttggtatcaagatatatttcttctgattcacacttgataaaggcttatggattcgtagacatgaattatgacaaggaactaccatcaatagaggagaaacttgactcatattacttcttcatccctcaatttgagttgaacgagtttgatagttgttccatattatcatctaccctggtttgggatgattctatttctcatacgttcgaggacgcggtttctttatttaaatcttgttttgatcagatacaaaatagctatgattcttcagctagcatttcttacaaaggcttggtaccaagtcacatttctggagacgcacatttgtcagagactggaaatgctcagttggtgtatgtggatgcagaagtactagcctcaatagatgccaaaggtagtgtgcaaaagaagtttttgatatctgatcggtcatttgttagattttcgccacagttattctattattcaaacatggagttatatttgcaacacaacacgattgaatctttcatcaaagagttgctctaacataaatttggcatgggcatcccttatagttgaagaatgtgttaggctcggtttcacgtacttctgtatagctccagggtcaagatcatccccgcttgcactttctgctacaggccatcctttgacaaaatgcatatcatgttacgatgaacgttcacttggatttcatgctcttggctatgggagaggttctcgaaagccagcagtagtaatcacatcatcaggaaccgctgtatcaaatcttctcccttcggtggttgaggctagtcaagatttcataccaattatattactcacagctgaccgtcctcctgagttgcatgatgctggagctaaccaagccatcaatcaggtcaatcattttggtacctttgtaagatatttttttaacctccctccacctggagaccgaatcaatgcaagaatggtgctcactacacttgattcagcagcctactatgcaatgcaagcaccacaaggccccgtgcatataaactgtgcttttagagaaccactagattacactaatcaacattggaatgttgattgtttgctaggtttggataagtggtttaaaaatagtgaaccatatactaaatacgtaagaatgaaaacagtttctgcattgggtaattactcttgctcagtaatggaggtcctggagatcatagagaaggcagaacaagggcttcttttagtgggtgctattcatacggatgaagatatgtgggctgtagctttactagctaggcacctatcctggccagttgctacagacattctgtctggactgcgattgcggaaagttgtaaattcattaccagggcttgataagagcattttgtttatagaccacattgatcaaattctgttgtctgagtctgctaaaaactggatacgccctgatgtcattgttcagattggtagccgcattactagcaaacgagtgggaatgtttcttgagacttccttcccatcttcctacatattgatcgataggcatccatgtcgtcatgatccttcacatgttgttactcacagaatacaagctaatgtagcagaatttgctgctaggttgtgccggtgtacttttcaaaggaagagaagcagatggacagaatttttgaccattcttaattcagtggtttgtcaggagataatgtttcagatacatgcgaagtgctcacttacagaaccatatgttgctcatgtaattggggagtcactttatggtgatgctgtcatgtttgttgggaacagcatggtcatccgagacttagacatgtttggcaacggttggatggattacactacaaatggaaataatgtgatgacacatcattttccagattttgttggcactgtagtggctgggaacagaggagcaagtggtattgatggtttaatcagcacagcagtcggatttgctgttgggtcaaacaagcatgtattttgtgtggttggtgacatatcttttcttcatgatacaaatggattggcacttctcaatcaaagggcatggcggaaacctatgacaataattgttgtcaacaaccatggtggtgcaatcttcagccttctaccagttgcaaaaactacttcaccacaaattttggagaaattcttctacacctctcatgacatatcaatttccaaactatgtgctgcacacagggtaaaacattttctagttcaaacaaaagcagagcttcatgatgcgttggtgaaatccaatatggaacaggttgattgtgtggtagaaataaacaatagtattgatagcaatgccgagtttcataggttcatgagcatgttctctaactattctacaagtcagtatctgggctatcttctgggagttccacgttttaagaatgaggtagatgccatgcctgttgacagaattgatgcagtggaatacatgttgtacagaatccagctttctgcaccacgtacttcaggactatctgatggtagattcattcatgaaggatttgttctgaagcttcgtgtggaggataacattgtgggatttggtgaggttgcaccaatcgaaattcatgaagaggatctgttggatgtcgaagagcaaattagatatcttctccatagggtgaaagattctgtgctagatattattcccttactgagagggtccttttccaattggatatggacaagcctcggggttcctccttcttcgatattcccaagtgttaaatgcggtttggagatggctattcttaatttacttgcatcacaacggaaatgtagtttgttcaaagttctctctggttgtgacctgttctgccgagacgagaatgtggttgaatataatcagaacagttctgcaagcatacaaatttgtgcactcgtagattgcaatggctctccaatggaagtagcacttggtgtcgccaaactggttgctgaaggttttaccacatttaaactgaaggttgggcgccgtgaaagccccattgaggatgcaactgttcttcataaaataagagaagttgtggggtaccagatcaatatccgtgttgatgcaaatcagaaatggacatatgaacaggcagttgaatttggatccagggtacaaagtcttcatttggaatacattgaggaaccagtgagctctgtatatgatctcatcaagttctgtgaaaagaatgtcttgcctgttgcacttgatgagactattgacaaccttaggggggatgtaatttgtaagcttcatcaatttgttcatccaggaataattgctcttgttataaagcctagtgttgttggaggttttgagaatgcagctcatattgccaaatgggcgcagctacatgataagatggccgtcatcagtagcacgtatgagagttctataggtttggcatcctatatacagttagcacattatgttgaccaacagagctctatagtctccagaataagaaacaaagatacatgtagagccactgcacatggacttggaacatatcagtggttaagggaagatgtatcagaacaaaagttaaagatccatgcatccccacttggtgacggaatccgagccacagtagaagatgcccatggttatcttcaccatttaaacataaacaatgagaagataaaaagtacgtatggtgaagaaaaacataggtcatattctatccaagttgatgtggacgattgttcttatctagtcaaacttcgagaggctggtgatcatacaaatgaaaaggttgtccttttacttcatggatttcttggtacaagtgaagactgggttcccacgatgaaagctcttgcccccagtgcacggatttgttgttgaagttgatataccacataactaatggtgaggtggtggtggttggctattcaatgggtgcaaggattgcactccacatggcactaaatcaagatcacaagatccgtggagctgttacaatatcaggaagtcctggactgagagatgaagcaagcagaagacgccgtattgctattgataaatcaagagcccagttcctgatgtgttgtggacttgaatgttttcttcagacatggtactctggaaaactgtggaccagtctacgagagcatcctgagtttaattctctggtgaggacacgcagtaaacacaaaaacatcaaagctctagctaaggttcttgcagactcaagcgtggggagacaaaagtcccctgtgggaagacctgaagcacttgaagaggcctttactcgtcgttgctggtgaaaaggacgcaaagttcaaagacatctcgcagaaaatgcgcacggagataatgagccacgcagaatgcggatctgatggtcctaaagggaaggaactttgtgaagtgctcattatcccagatagcggccatgctgtgcatgttgagaaccctcttcctttggtgagagccgtgaggaagttcttactgaagctgtattgaggagaacatctgagtagaaccggtaaatggagcatcatgcaggtatattggtgtcctcacatatgcaggtgaagaaaggtttcaaattcgtgccgcccaagaagaactgaaatttggtctccgtctcgtccaatttgtcgtcgttggatcgttgcagtaactttttcccgtttggccttagtgttaatagcgtggctggtagatccaactggtgatgcctcttacgagggtttttgaaccccaatggactggcttccctttggtgattgtcagggttctgcatttcctagagataaattctcagcatgttcagacctggagtgccgtgccctttgtacaaggattccttttctagagttgtatgaaataaatgctcgctctcgagaagcggatttggtcaaaatctcactccactaccgagctgcggcgattcatcaagaagaccttcgtgccgatccctttgtgtaaataaaagtagcctcatctttctttgtcttgttgggatccgggaaccggccgactgtcgatcaagtgcgctttctgtgcgattcctgactgccaatttaagaacccttcttagca

SEQ ID NO: 50629 - DNA, 5719 bp, Zea Mays
ctcgctttcgtctcttccccctcttcccccaccttaccaaggcaccaacctcgctggcatgctcgccgtctctccctctccccctcctcgccttcctctcctcaccttaacccacctctgcgctttccctctcctcccacctcgacgccgcggcctctctcgcctccgcagccaccgcagtggcacccctctcgtcctgctccgcgcgcgcgcagtgcgtcacgctggtatcgtgatcgacatcgacgagatggtcgagaatgaggaccgtgacctacccgtggacgtatcgttcacgaggaggcttcctcccgcgctcactttcggtgacggcctcgacgcactgctgcgggccgccaacgaggtcaaggccaccccgcctgctggcgccaggagcggcgtgatcaggttcgaggtacttgttccacccagtacaaaggcacttaagtggtgctctcagtttagaggatcatcattgtttccccagttttatttatcaagggaactgaggtctgctccatcatgtcaacttgaaatctgtggcattggttccacaatctgctttcatggttcctacctaataaataatgaatttgatttggtatcaagatatatttcttctgattcacacttgataaaggcttatggattcgtagacatgaattatgacaaggaactaccatcaatagaggagaaacttgactcatattacttcttcatccctcaatttgagttgaacgagtttgatagttgttccatattatcatctaccctggtttgggatgattctatttctcatacgttcgaggacgcggtttctttatttaaatcttgttttgatcagatacaaaatagctatgattcttcagctagcatttcttacaaaggcttggtaccaagtcacatttctggagacgcacatttgtcagagactggaaatgctcagttggtgtatgtggatgcagaagtactagcctcaatagatgccaaaggtagtgtgcaaaaggtatccccttaaccttgaagtttttgatatctgatcggtcatttgttagattttcgccacagttattctattattcaaacatggagttatatttgcaacacaacacgattgaatctttcatcaaagagttgctctaacataaatttggcatgggcatcccttatagttgaagaatgtgttaggctcggtttcacggccatcctttgacaaaatgcatatcatgttacgatgaacgttcacttggatttcatgctcttggctatgggagaggttctcgaaagccagcagtagtaatcacatcatcaggaaccgctgtatcaaatcttctcccttcggtggttgaggctagtcaagatttcataccaattatattactcacagctgaccgtcctcctgagttgcatgatgctggagctaaccaagccatcaatcaggtcaatcattttggtacctttgtaagatatttttttaacctccctccacctggagaccgaatcaatgcaagaatggtgctcactacacttgattcagcagcctactatgcaatgcaagcaccacaaggccccgtgcatataaactgtgcttttagagaaccactagattacactaatcaacattggaatgttgattgtttgctaggtttggataagtggtttaaaaatagtgaaccatatactaaatacgtaagaatgaaaacagtttctgcattgggtaattactcttgctcagtaatggaggtcctggagatcatagagaaggcagaacaagggcttcttttagtgggtgctattcatacggatgaagatatgtgggctgtagctttactagctaggcacctatcctggccagttgctacagacattctgtctggactgcgattgcggaaagttgtaaattcattaccagggcttgataagagcattttgtttatagaccacattgatcaaattctgttgtctgagtctgctaaaaactggatacgccctgatgtcattgttcagattggtagccgcattactagcaaacgagtgggaatgtttcttgagacttccttcccatcttcctacatattgatcgataggcatccatgtcgtcatgatccttcacatgttgttactcacagaatacaagctaatgtagcagaatttgctgctaggttgtgccggtgtacttttcaaaggaagagaagcagatggacagaatttttgaccattcttaattcagtggtttgtcaggagataatgtttcagatacatgcgaagtgctcacttacagaaccatatgttgctcatgtaattggggagtcactttatggtgatgctgtcatgtttgttgggaacagcatggtcatccgagacttagacatgtttggcaacggttggatggattacactacaaatggaaataatgtgatgacacatcattttccagattttgttggcactgtagtggctgggaacagaggagcaagtggtattgatggtttaatcagcacagcagtcggatttgctgttgggtcaaacaagcatgtattttgtgtggttggtgacatatcttttcttcatgatacaaatggattggcacttctcaatcaaagggcatggcggaaacctatgacaataattgttgtcaacaaccatggtggtgcaatcttcagccttctaccagttgcaaaaactacttcaccacaaattttggagaaattcttctacacctctcatgacatatcaatttccaaactatgtgctgcacacagggtaaaacattttctagttcaaacaaaagcagagcttcatgatgcgttggtgaaatccaatatggaacaggttgattgtgtggtagaaataaacaatagtattgatagcaatgccgagtttcataggttcatgagcatgttctctaactattctacaagtcagtatctgggctatcttctgggagttccacgttttaagaatgaggtagatgccatgcctgttgacagaattgatgcagtggaatacatgttgtacagaatccagctttctgcaccacgtacttcaggactatctgatggtagattcattcatgaaggatttgttctgaagcttcgtgtggaggataacattgtgggatttggtgaggttgcaccaatcgaaattcatgaagaggatctgttggatgtcgaagagcaaattagatatcttctccatagggtgaaagattctgtgctagatattattcccttactgagagggtccttttccaattggatatggacaagcctcggggttcctccttcttcgatattcccaagtgttaaatgcggtttggagatggctattcttaatttacttgcatcacaacggaaatgtagtttgttcaaagttctctctggttgtgacctgttctgccgagacgagaatgtggttgaatataatcagaacagttctgcaagcatacaaatttgtgcactcgtagattgcaatggctctccaatggaagtagcacttggtgtcgccaaactggttgctgaaggttttaccacatttaaactgaaggttgggcgccgtgaaagccccattgaggatgcaactgttcttcataaaataagagaagttgtggggtaccagatcaatatccgtgttgatgcaaatcagaaatggacatatgaacaggcagttgaatttggatccagggtacaaagtcttcatttggaatacattgaggaaccagtgagctctgtatatgatctcatcaagttctgtgaaaagaatgtcttgcctgttgcacttgatgagactattgacaaccttaggggggatgtaatttgtaagcttcatcaatttgttcatccaggaataattgctcttgttataaagcctagtgttgttggaggttttgagaatgcagctcatattgccaaatgggcgcagctacatgataagatggccgtcatcagtagcacgtatgagagttctataggtttggcatcctatatacagttagcacattatgttgaccaacagagctctatagtctccagaataagaaacaaagatacatgtagagccactgcacatggacttggaacatatcagtggttaagggaagatgtatcagaacaaaagttaaagatccatgcatccccacttggtgacggaatccgagccacagtagaagatgcccatggttatcttcaccatttaaacataaacaatgagaagataaaaagtacgtatggtgaagaaaaacataggtcatattctatccaagttgatgtggacgattgttcttatctagtcaaacttcgagaggctggtgatcatacaaatgaaaaggttgtccttttacttcatggatttcttggtacaagtgaagactgggttcccacgatgaaagctcttgcccccagtgcacgggtaattgcaattgatcttcctggtcatggcgagtcacagatactgcaacgtcacaaaaattcagaacaacctgctgtaacagttcaactagttgcagatttgttgttgaagttgatataccacataactaatggtgaggtggtggtggttggctattcaatgggtgcaaggattgcactccacatggcactaaatcaagatcacaagatccgtggagctgttacaatatcaggaagtcctggactgagagatgaagcaagcagaagacgccgtattgctattgataaatcaagagcccagttcctgatgtgttgtggacttgaatgttttcttcagacatggtactctggaaaactgtggaccagtctacgagagcatcctgagtttaattctctggtgaggacacgcagtaaacacaaaaacatcaaagctctagctaaggttcttgcagactcaagcgtggggagacaaaagtcccctgtgggaagacctgaagcacttgaagaggcctttactcgtcgttgctggtgaaaaggacgcaaagttcaaagacatctcgcagaaaatgcgcacggagataatgagccacgcagaatgcggatctgatggtcctaaagggaaggaactttgtgaagtgctcattatcccagatagcggccatgctgtgcatgttgagaaccctcttcctttggtgagagccgtgaggaagttcttactgaagctgtattgaggagaacatctgagtagaaccggtaaatggagcatcatgcaggtatattggtgtcctcacatatgcaggtgaagaaaggtttcaaattcgtgccgcccaagaagaactgaaatttggtctccgtctcgtccaatttgtcgtcgttggatcgttgcagtaactttttcccgtttggccttagtgttaatagcgtggctggtagatccaactggtgatgcctcttacgagggtttttgaaccccaatggactggcttccctttggtgattgtcagggttctgcatttcctagagataaattctcagcatgttcagacctggagtgccgtgccctttgtacaaggattccttttctagagttgtatgaaataaatgctcgctctcgagaagcggatttggtcaaaatctcactccactaccgagctgcggcgattcatcaagaagaccttcgtgccgatccctttgtgtaaataaaagtagcctcatctttctttgtcttgttgggatccgggaaccggccgactgtcgatcaagtgcgctttctgtgcgattcctgactgccaatttaagaacccttcttagca

SEQ ID NO: 50630 - DNA, 445 bp, Zea Mays
gtctcttccccctcttcccccaccttaccaaggcaccaacctcgctggcatgctcgccgtctctccctctccccctcctcgccttcctctcctcaccttaacccacctctgcgctttccctctcctcccacctcgacgccgcggcctctctcgcctccgcagccaccgcagtggcacccctctcgtcctgctccgcgcgcgcgcagtgcgtcacgctggtatcgtgatcgacatcgacgagatggtcgagaatgaggaccgtgacctacccgtggacgtatcgttcacgaggaggcttcctcccgcgctcactttcggtgacggcctcgacgcactgctgcgggccgccaacgaggtcaaggccaccccgcctgctggcgccaggagcggcgtgatcaggttcgagggctccaagcaatattggaagttgattaactcaacatat

SEQ ID NO: 50631 - DNA, 559 bp, Zea Mays
attggtagccgcattactagcaaacgagtgggaatgtttcttgagacttccttcccatcttcctacatattgatcgataggcatccatgtcgtcatgatccttcacatgttgttactcacagaatacaagctaatgtagcagaatttgctgctaggttgtgccggtgtacttttcaaaggaagagaagcagatggacagaatttttgaccattcttaattcagtggtatgagctgacacatggtagctatcttgtaaaagacataacatgctttatgacatacgaacttgacctggataattaatctttctgtacttagccatttattataagcctttaatccatcattcttgcactaatacatttattttataacggataaaaaggttcactgtgccttgaattttgaatgtagcaaacaagttgtcatgtgtgtatgtgccattaccacgaaacacgtttgcaaaattgtcatcagacccacaattcatagacacatgggtatttataacaaggagacaacgtttcaagtggcaaaattccaattatttcgtttgtg

SEQ ID NO: 50632 - DNA, 2604 bp, Zea Mays
atgagtgctatgcggcccgaggggtccgtaggtcatgagtgggaagcgaaccggtgcccacgatgtggctcggtgccagacgtggttaatgctgtcagtcatttatggcgggttgcaccaatcgaaattcatgaagaggatctgttggatgtcgaagagcaaattagatatcttctccatagggtgaaagattctgtgctagatattattcccttactgagagggtccttttccaattggatatggacaagcctcggggttcctccttcttcgatattcccaagtgttaaatgcggtttggagatggctattcttaatttacttgcatcacaacggaaatgtagtttgttcaaagttctctctggttgtgacctgttctgccgagacgagaatgtggttgaatataatcagaacagttctgcaagcatacaaatttgtgcactcgtagattgcaatggctctccaatggaagtagcacttggtgtcgccaaactggttgctgaaggttttaccacatttaaactgaaggttgggcgccgtgaaagccccattgaggatgcaactgttcttcataaaataagagaagttgtggggtaccagatcaatatccgtgttgatgcaaatcagaaatggacatatgaacaggcagttgaatttggatccagggtacaaagtcttcatttggaatacattgaggaaccagtgagctctgtatatgatctcatcaagttctgtgaaaagaatgtcttgcctgttgcacttgatgagactattgacaaccttaggggggatgtaatttgtaagcttcatcaatttgttcatccaggaataattgctcttgttataaagcctagtgttgttggaggttttgagaatgcagctcatattgccaaatgggcgcagctacatgataagatggccgtcatcagtagcacgtatgagagttctataggtttggcatcctatatacagttagcacattatgttgaccaacagagctctatagtctccagaataagaaacaaagatacatgtagagccactgcacatggacttggaacatatcagtggttaagggaagatgtatcagaacaaaagttaaagatccatgcatccccacttggtgacggaatccgagccacagtagaagatgcccatggttatcttcaccatttaaacataaacaatgagaagataaaaagtacgtatggtgaagaaaaacataggtcatattctatccaagttgatgtggacgattgttcttatctagtcaaacttcgagaggctggtgatcatacaaatgaaaaggttgtccttttacttcatggatttcttggtacaagtgaagactgggttcccacgatgaaagctcttgcccccagtgcacggatttgttgttgaagttgatataccacataactaatggtgaggtggtggtggttggctattcaatgggtgcaaggattgcactccacatggcactaaatcaagatcacaagatccgtggagctgttacaatatcaggaagtcctggactgagagatgaagcaagcagaagacgccgtattgctattgataaatcaagagcccagttcctgatgtgttgtggacttgaatgttttcttcagacatggtactctggaaaactgtggaccagtctacgagagcatcctgagtttaattctctggtgaggacacgcagtaaacacaaaaacatcaaagctctagctaaggttcttgcagactcaagcgtggggagacaaaagtcccctgtgggaagacctgaagcacttgaagaggcctttactcgtcgttgctggtgaaaaggacgcaaagttcaaagacatctcgcagaaaatgcgcacggagataatgagccacgcagaatgcggatctgatggtcctaaagggaaggaactttgtgaagtgctcattatcccagatagcggccatgctgtgcatgttgagaaccctcttcctttggtgagagccgtgaggaagttcttactgaagctgtattgaggagaacatctgagtagaaccggtaaatggagcatcatgcaggtatattggtgtcctcacatatgcaggtgaagaaaggtttcaaattcgtgccgcccaagaagaactgaaatttggtctccgtctcgtccaatttgtcgtcgttggatcgttgcagtaactttttcccgtttggccttagtgttaatagcgtggctggtagatccaactggtgatgcctcttacgagggtttttgaaccccaatggactggcttccctttggtgattgtcagggttctgcatttcctagagataaattctcagcatgttcagacctggagtgccgtgccctttgtacaaggattccttttctagagttgtatgaaataaatgctcgctctcgagaagcggatttggtcaaaatctcactccactaccgagctgcggcgattcatcaagaagaccttcgtgccgatccctttgtgtaaataaaagtagcctcatctttctttgtcttgttgggatccgggaaccggccgactgtcgatcaagtgcgctttctgtgcgattcctgactgccaatttaagaacccttcttagca

SEQ ID NO: 50633 - DNA, 2993 bp, Zea Mays
atgagtgctatgcggcccgaggggtccgtaggtcatgagtgggaagcgaaccggtgcccacgatgtggctcggtgccagacgtggttaatgctgtcagtcatttatggcgggttgcaccaatcgaaattcatgaagaggatctgttggatgtcgaagagcaaattagatatcttctccatagggtgaaagattctgtgctagatattattcccttactgagagggtccttttccaattggatatggacaagcctcggggttcctccttcttcgatattcccaagtgttaaatgcggtttggagatggctattcttaatttacttgcatcacaacggaaatgtagtttgttcaaagttctctctggttgtgacctgttctgccgagacgagaatgtggttgaatataatcagaacagttctgcaagcatacaaatttgtgcactcgtagattgcaatggctctccaatggaagtagcacttggtgtcgccaaactggttgctgaaggttttaccacatttaaactgaaggttgggcgccgtgaaagccccattgaggatgcaactgttcttcataaaataagagaagttgtggggtaccagatcaatatccgtgttgatgcaaatcagaaatggacatatgaacaggcagttgaatttggatccagggtacaaagtcttcatttggaatacattgaggtaatttaccttattttcataagctatgtattaaaaagtcactcacatacacatcatgcactcacccttatgaacacacatacacacaccctacctttatgaacactttcgagagactggcaggtttttgagattgaggaagttaccatgggtgtctcaatgtcaatggccatgtcacttaccactaaattgatagtgccatttgttcggaaaataggagcacctgtgcccaggtggttggttgcataaataagaaacttggctaccgctccaccttattctatagcactgttattcagggctgcagttcattctgtttgcacaatgcatgttttcatcttgttctttcttcagaatcttcttctacttttcttttttttactttacaggaaccagtgagctctgtatatgatctcatcaagttctgtgaaaagaatgtcttgcctgttgcacttgatgagactattgacaaccttaggggggatgtaatttgtaagcttcatcaatttgttcatccaggaataattgctcttgttataaagcctagtgttgttggaggttttgagaatgcagctcatattgccaaatgggcgcagctacatgataagatggccgtcatcagtagcacgtatgagagttctataggtttggcatcctatatacagttagcacattatgttgaccaacagagctctatagtctccagaataagaaacaaagatacatgtagagccactgcacatggacttggaacatatcagtggttaagggaagatgtatcagaacaaaagttaaagatccatgcatccccacttggtgacggaatccgagccacagtagaagatgcccatggttatcttcaccatttaaacataaacaatgagaagataaaaagtacgtatggtgaagaaaaacataggtcatattctatccaagttgatgtggacgattgttcttatctagtcaaacttcgagaggctggtgatcatacaaatgaaaaggttgtccttttacttcatggatttcttggtacaagtgaagactgggttcccacgatgaaagctcttgcccccagtgcacggatttgttgttgaagttgatataccacataactaatggtgaggtggtggtggttggctattcaatgggtgcaaggattgcactccacatggcactaaatcaagatcacaagatccgtggagctgttacaatatcaggaagtcctggactgagagatgaagcaagcagaagacgccgtattgctattgataaatcaagagcccagttcctgatgtgttgtggacttgaatgttttcttcagacatggtactctggaaaactgtggaccagtctacgagagcatcctgagtttaattctctggtgaggacacgcagtaaacacaaaaacatcaaagctctagctaaggttcttgcagactcaagcgtggggagacaaaagtcccctgtgggaagacctgaagcacttgaagaggcctttactcgtcgttgctggtgaaaaggacgcaaagttcaaagacatctcgcagaaaatgcgcacggagataatgagccacgcagaatgcggatctgatggtcctaaagggaaggaactttgtgaagtgctcattatcccagatagcggccatgctgtgcatgttgagaaccctcttcctttggtgagagccgtgaggaagttcttactgaagctgtattgaggagaacatctgagtagaaccggtaaatggagcatcatgcaggtatattggtgtcctcacatatgcaggtgaagaaaggtttcaaattcgtgccgcccaagaagaactgaaatttggtctccgtctcgtccaatttgtcgtcgttggatcgttgcagtaactttttcccgtttggccttagtgttaatagcgtggctggtagatccaactggtgatgcctcttacgagggtttttgaaccccaatggactggcttccctttggtgattgtcagggttctgcatttcctagagataaattctcagcatgttcagacctggagtgccgtgccctttgtacaaggattccttttctagagttgtatgaaataaatgctcgctctcgagaagcggatttggtcaaaatctcactccactaccgagctgcggcgattcatcaagaagaccttcgtgccgatccctttgtgtaaataaaagtagcctcatctttctttgtcttgttgggatccgggaaccggccgactgtcgatcaagtgcgctttctgtgcgattcctgactgccaatttaagaacccttcttagca

SEQ ID NO: 50634 - DNA, 1421 bp, Zea Mays
cgggtagccaaaaaccgcgcgccgtttgggcaaggcccaacccagccagccagagaggcgccccgttggaatcctgattgggagcgctgggacggaaccgaacgcgttgccattagctgtcgctgggacggaaccggaacgtttcgctagccctcgttcccgttcggccttgacaaccccaccccaccccacccccaagttcccaacgcagaggatcgaaccgaatcctccgcaactcgccgccgccgggaccgaccgacccggtcctatcgatcgaggatgtcgtacgcctacctcttcaagtacatcatcatcggcgacacaggcgtggggaagtcgtgcctgctgctgcagttcacggacaagcgcttccagcccgtgcacgacctcaccatcggcgtcgaattcggcgcccgcatgatcaccattgaaaataagcccatcaagctccagatttgggacacggctggccaagaatcattcagatctattactagatcatactacagaggtgctgctggtgcccttttggtttatgatattactaggagggagaccttcaatcatctcgcaagttggttagaagatgcaaggcagcatgcaaatgctaacatgactgtgatgctgattggaaacaagtgtgatctttctcatagacgtgctgtcagctatgaggaaggtgaacagtttgccaaggagcatggtctggtctttatggaggcatctgctaaaactgcacaaaacgttgaggaggcattcattaagaccgctggtacaatatacaagaaaatccaagatggcatatttgatgtatcaaatgagtccaacgggatcaaagttggctacgctgttcccaactcatctggaggtggtgctggctcgtcctctcaggctggtggctgctgcagttgagtggtggcagcaagtcatacaaatgcacaagatgatgggaggagacaacagatcagttctggtcagaaaatggtaaaatcgatgaaagttttctttagcaactgatgtgcatcgcaatttgcaaggacacgcgtggattcaagatgctgctatttactttcctcgttgtaactgagagattaatgtatagtagctatatacacgtttgttcatctaaaagattgtttgatctctttattttgttgagcatgcacaaaaggaaatcatgatccacaagtataaaagcttcatgtatggttttggtaattgagacaactaagtgaactaacctacattttgggtattatgaatgagatatgttaaagttcataaagatgaaacagatgctctatatggatgaagattgacaagagtaaagcaaacgaggtgtctaccattgttgaatttgaagaggtcattgatgctgcagaagttgagacttgcaaaaagacaaaaaaacatgatgcaag

SEQ ID NO: 50635 - DNA, 719 bp, Zea Mays
gtacgtgcagttgcatgccgacgacggcactcgactcgatcgaaagaaaagatatccagcggcctcctcgtcgtcctgctccctagctgccctgatctgcctataaatacgcttggttacttcgcatgcatctcatcacactcgatcgcagttgatccagtacacaattgcagagagctagaagacacaagaccatggcgtccaagcgactcctcgtgctagctctcctgctcgccgccgttttccttgccgtctcaggagcagctaacgacgaccaagcccaaccgaggaaggacggcggcgagaacaaagccgacgtgcaggactaccgtggcggcgcccaccgaggtccacaactgaagccgagccacacatcgatctacaaagatgcatggacgacgactcttatcttagctaattaataagcactacatccatgcatgtccacaatagggccctagccctactatactatacgtcgtcagcagaaagtctggttttgatttcaataataagatgcacctatatgtgtgtgttacatgtacgccgttgtcttaattactgtgtggtgattggactcactagtagctattgtcgtcgtgttgtcgtctctcggtgagtcggtgtagcgtagtacttgctcttggaccaaatgctgcgtttaatctgtaaaactaccaaattatactagacacgtgttgcgtttcggattgtgcctc

SEQ ID NO: 50636 - DNA, 3677 bp, Zea Mays
tgaccaccttcccctccccctgaggccctgaccaccttctcctcctgtacacagctcagcacttcagcagcagcatcgcatcatatcgccctcgtctccagttctcctctctctcggtcttaaaaatccagcgccaacgcggccgccggacgcgcattgctctccctccctgcctcgtctcctcacctcattctcgccacatcttcctctgctcccctcctcccaggtggcgttcttggagctccagctcctcgagctgcgtctgtctacgccgccgcggttgtcgcttgggtggcggcagcccgcaatggggaggagcagccgcgcctgctcccttctcggttccgcccagctgctcctcctgctgctgctctcgctcggctccgcggccgcccagaagggctccacatggaagaccctgagcggcaaggctccagtaatcgttgctaagggcgggttctccggtctatttcctgattccagtgattttgcttatcggattcttgggaccattagctcccctgacacagtcatgtggtgtgatgttcggttgacaaaggatggcgatggtatctgcctaccgagcataaacatggataactgcacaatgatagacaatgtttttccagaagggaagaagacctacaatgttaatggtgtatctacggtgggatggttctccgtggactatacgagcactgatctgctgccaaacgtgacactgaagcaatcggtcctatctcgtacccctgtttatgatggttccatgttgataaattctgttgaaaatgttttcacctcatttaacgcctctgcagtttggttaaatgtccagcaagacagtttctacagccagtttaagcttagcatgcgaaactatatcctgtctttatcgaaacaattcattactgattacatctcatcgcctgaagtgaacttcctcaccagtatatctggaagagttagcaagaagacaaagcttgtgttccgctttcttgacgaaggctctattgagccatcgacaaaccagacatatgggtccatgttgaaaaatctaacatttgtcaagacttttgcctctggaatacttgttcccaaaagctatatctggcctgttacaccagataattacctactgccttatacttcagttgttgatgatgctcacaaagcggggctagaaatctatgctgctgattttgcaaatgactttactatcagctataactacagctttgatccattagcggaatatctttccttcattggtaacagtgccttctctgtcgatggtgtgttgactgatttcccgattactccttcagaagcagttggttgctttagtaacctgaacaacagcaagatcgaccatgctgtcctgttcaagtgaccaaagatggcatactgatatgcatgagttctgttgacctaatggatgttactactgttggaaaatcatcatttacttcgcaagtaactaccatcaacgatctgaaggctggtcctggagtcttcaccttcaaccttacttgggatgatatttctaagaacctacagcccatgatatcgaacccaatgagcacctataaactgtacagaaatcccagaaacaagaatgcaggaaatttcatgagattatcagactttttgacgtttgcaaagggaaaggatttgtcaggaatcatgataactgttgagcatgctgcattcatggcagagaagcttggatttggagtggtagacgcagtggtcaaagcacttgatgactctggttatagcaaacagactgcccagaatgttatgattcagtcaaccaacagctcggtgctaaagaagttcaagcaggaaaccaagtacagccttgtctacatgattgaagaaggtgtcagagatgccgcaccttcatcccttgcagacattaagaagtttgctaatgccgtctctgttagcaccacatctgttttaccacagacccattattatttgacaaaccagaccaataagcttgtcacgtcccttcagtctgcgggcctccaagtttacgtctatgtgctcatgaatgagtttgcatctcagccgaatgacttcttcgcagacgccacttcacagattaatgcttatgtgcaaggtgctaaggtggacgggatcatcactgatttccctgggactgctcacagatacaaattgaactcctgcacgagcatgggaaacagcgcaccactatttatgcagcctccgcaaccaggtagcctccttttaaccatggccccagatgtacagccaccagcagcggcgccaatgccgctcttgacggacgctgacgttgcagaaccagccctacctccagtcagtaacaccacaacagctgcatctccttcgcatgccgccctcagaatgcgaaccgatgtctcgatcctcatcgcattgctgatgctatgtgcttccctcctcatctgaaggtagtcctgcacaacatcatatgcggcgtggtgcattagagctgaggatttcacattgagctgctaatagcaattctttccaccatttatgtagcgatttttttttcttgttctgtccggtgttttgaaggatggatggatgttcagcttgatacctcaacggtgacacttgtgtgtgctgccgctgcctctagtttagaaaaggttgtacctgagacgaaatccgggcggcagcagccatcggaggctgggcggcagccgccagcctcccgctcgcacgggagccacacacggacaccacgctgcgttcactcgcaaccgtggcccgtggcccgtgggtttcgcctgtggtcaccgcgaggccgcatccagtcgcccatgccgccttccgcatcgatgccggcgacgcacacggccgtgtacgtggcggcggtgcccctgcgggcgcccaagggccccgcccagctgctgatgtcggcgggctactcgctgggcatgtgggacctgcagcacttcatggtgctcctccgtcccgacccggcgctggcccaggcgctggtcttcgatttccagccgcgggacccggaggacgtcctcgccgcgctcgcggtgctgtcgcggagagagatccctggcgtggttcgcagaagaacgctgcggagggtcccggacgggcggtgctggctcgtggggcactgctgcgacgccgtcggtgccgccacaaggttcagcgagcggtggacgaccggcctggtggtcggggagcacgactgccgggactacaccaacgatggatgatctaaactgtacggactacggtcatatatcggattctataaactggagacccaacacgcaatgcagaaatttcatggaaacgaggagacgttttgaaagggaaaaaaaatgaggagagaaaacaaagaagctactactcaagacaaggcgatggtgtaacgaagaaatgaggccacttgactagttgactgtgaaagatactagaggtgctacgtgaagcaagaaattagacacgctatgtggagaagcaccgttgactaagtaaacttaggaggtgtttggtttgaagaaatcaatctattctaaatgaggtggtatatcatgagtctattatacaaattttgtggaataaacttattctttatattattactaattattagcccacgtagaatgaaatggtgatggatcgactcaaac

SEQ ID NO: 50637 - DNA, 3326 bp, Zea Mays
tgaccaccttctcctcctgtacacagctcagcacttcagcagcagcatcgcatcatatcgccctcgtctccagttctcctctctctcggtcttaaaaatccagcgccaacgcggccgccggacgcgcattgctctccctccctgcctcgtctcctcacctcattctcgccacatcttcctctgctcccctcctcccaggtggcgttcttggagctccagctcctcgagctgcgtctgtctacgccgccgcggttgtcgcttgggtggcggcagcccgcaatggggaggagcagccgcgcctgctcccttctcggttccgcccagctgctcctcctgctgctgctctcgctcggctccgcggccgcccagaagggctccacatggaagaccctgagcggcaaggctccagtaatcgttgctaagggcgggttctccggtctatttcctgattccagtgattttgcttatcggattcttgggaccattagctcccctgacacagtcatgtggtgtgatgttcggttgacaaaggatggcgatggtatctgcctaccgagcataaacatggataactgcacaatgatagacaatgtttttccagaagggaagaagacctacaatgttaatggtgtatctacggtgggatggttctccgtggactatacgagcactgatctgctgccaaacgtgacacgtaagtgcagttacaaatttgtgcttcactgtggccttcagcattttgatattgtgaactgtgatggtattctttatatgtacggaaagaaacatgttcaaatatctgtgccttgaatcttataccacttaacaaatgcacatgacatgcttcgctaaccctgtttgatattttcagtgaagcaatcggtcctatctcgtacccctgtttatgatggttccatgttgataaattctgttgaaaatgttttcacctcatttaacgcctctgcagtttggttaaatgtccaggtagggataacaataactaacttcgaactacacatttggtgattttcctctcacctgaacatttgttttcttttcaaattgcagcaagacagtttctacagccagtttaagcttagcatgcgaaactatatcctgtctttatcgaaacaattcattactgattacatctcatcgcctgaagtgaacttcctcaccagtatatctggaagagttagcaagaagacaaagcttgtgttccgctttcttgacgaaggctctattgagccatcgacaaaccagacatatgggtccatgttgaaaaatctaacatttgtcaagacttttgcctctggaatacttgttcccaaaagctatatctggcctgttacaccagataattacctactgccttatacttcagttgttgatgatgctcacaaagcggggctagaaatctatgctgctgattttgcaaatgactttactatcagctataactacagctttgatccattagcggaatatctttccttcattggtaacagtgccttctctgtcgatggtgtgttgactgatttcccgattactccttcagaagcagttggtgagtccacctatcctttttttttcatgatgctatgcataagtatctgttcaagaattctatgcactcaagatgccagtgggtcagtgtgaacttttatttagaatagttgttaacttatggaatcatggttcagttatttttatcttttggcacaagttttctaacaagttggaagatgtagcatggatcacggcccttgatttgttcttcttcttcccctgcaggttgctttagtaacctgaacaacagcaagatcgaccatgctaaacctctggttatctctcataatggtgctagcggtgactacccagactgcactgaccaagcttatgaaaaggcagttgccgatggtgcagatgtcattgactgtcctgttcaagtgaccaaagatggcatactgatatgcatgagttctgttgacctaatggatgttactactgttggaaaatcatcatttacttcgcaagtaactaccatcaacgatctgaaggctggtcctggagtcttcaccttcaaccttacttgggatgatatttctaagaacctacagcccatgatatcgaacccaatgagcacctataaactgtacagaaatcccagaaacaagaatgcaggaaatttcatgagattatcagactttttgacgtttgcaaagggaaaggatttgtcaggaatcatgataactgttgagcatgctgcattcatggcagagaagcttggatttggagtggtagacgcagtggtcaaagcacttgatgactctggttatagcaaacagactgcccagaatgttatgattcagtcaaccaacagctcggtgctaaagaagttcaagcaggaaaccaagtacagccttgtctacatgattgaagaaggtgtcagagatgccgcaccttcatcccttgcagacattaagaagtttgctaatgccgtctctgttagcaccacatctgttttaccacagacccattattatttgacaaaccagaccaataagcttgtcacgtcccttcagtctgcgggcctccaagtttacgtctatgtgctcatgaatgagtttgcatctcagccgaatgacttcttcgcagacgccacttcacagattaatgcttatgtgcaaggtgctaaggtggacgggatcatcactgatttccctgggactgctcacagatacaaattgaactcctgcacgagcatgggaaacagcgcaccactatttatgcagcctccgcaaccaggtagcctccttttaaccatggccccagatgtacagccaccagcagcggcgccaatgccgctcttgacggacgctgacgttgcagaaccagccctacctccagtcagtaacaccacaacagctgcatctccttcgcatgccgccctcagaatgcgaaccgatgtctcgatcctcatcgcattgctgatgctatgtgcttccctcctcatctgaaggtagtcctgcacaacatcatatgcggcgtggtgcattagagctgaggatttcacattgagctgctaatagcaattctttccaccatttatgtagcgatttttttttcttgttctgtccggtgttttgaaggatggatggatgttcagcttgatacctcaacggtgacacttgtgtgtgctgccgctgcctctaggtatattttggtacatatatgtggtgatacattgttcaggtcatcttttctactgccaaaccctggcccggagggcaaaaatattcactgcaaactgttgtaactgatgt

SEQ ID NO: 50638 - DNA, 3357 bp, Zea Mays
tgaccaccttctcctcctgtacacagctcagcacttcagcagcagcatcgcatcatatcgccctcgtctccagttctcctctctctcggtcttaaaaatccagcgccaacgcggccgccggacgcgcattgctctccctccctgcctcgtctcctcacctcattctcgccacatcttcctctgctcccctcctcccaggtggcgttcttggagctccagctcctcgagctgcgtctgtctacgccgccgcggttgtcgcttgggtggcggcagcccgcaatggggaggagcagccgcgcctgctcccttctcggttccgcccagctgctcctcctgctgctgctctcgctcggctccgcggccgcccagaagggctccacatggaagaccctgagcggcaaggctccagtaatcgttgctaagggcgggttctccggtctatttcctgattccagtgattttgcttatcggattcttgggaccattagctcccctgacacagtcatgtggtgtgatgttcggttgacaaaggatggcgatggtatctgcctaccgagcataaacatggataactgcacaatgatagacaatgtttttccagaagggaagaagacctacaatgttaatggtgtatctacggtgggatggttctccgtggactatacgagcactgatctgctgccaaacgtgacactgaagcaatcggtcctatctcgtacccctgtttatgatggttccatgttgataaattctgttgaaaatgttttcacctcatttaacgcctctgcagtttggttaaatgtccaggtagggataacaataactaacttcgaactacacatttggtgattttcctctcacctgaacatttgttttcttttcaaattgcagcaagacagtttctacagccagtttaagcttagcatgcgaaactatatcctgtctttatcgaaacaattcattactgattacatctcatcgcctgaagtgaacttcctcaccagtatatctggaagagttagcaagaagacaaagcttgtgttccgctttcttgacgaaggctctattgagccatcgacaaaccagacatatgggtccatgttgaaaaatctaacatttgtcaagacttttgcctctggaatacttgttcccaaaagctatatctggcctgttacaccagataattacctactgccttatacttcagttgttgatgatgctcacaaagcggggctagaaatctatgctgctgattttgcaaatgactttactatcagctataactacagctttgatccattagcggaatatctttccttcattggtaacagtgccttctctgtcgatggtgtgttgactgatttcccgattactccttcagaagcagttggtgagtccacctatcctttttttttcatgatgctatgcataagtatctgttcaagaattctatgcactcaagatgccagtgggtcagtgtgaacttttatttagaatagttgttaacttatggaatcatggttcagttatttttatcttttggcacaagttttctaacaagttggaagatgtagcatggatcacggcccttgatttgttcttcttcttcccctgcaggttgctttagtaacctgaacaacagcaagatcgaccatgctaaacctctggttatctctcataatggtgctagcggtgactacccagactgcactgaccaagcttatgaaaaggcagttgccgatggtgcagatgtcattgactgtcctgttcaagtgaccaaagatggcatactgatatgcatgagttctgttgacctaatggatgttactactgttggaaaatcatcatttacttcgcaagtaactaccatcaacgatctgaaggctggtcctggagtcttcaccttcaaccttacttgggatgatatttctaagaacctacagcgtaagttgatttgataccatttcgcctactttttgtaaacctgaatgtttgctatgcaaaatagatgccaaatgtttagatatcctcatgtatatatagttatgctaagtcatcttttttgtgcaattcataactcgtgaatagttaatgtgtaatttttactgcactggtcacacatttgcttcaaaactaacaattttattggcagccatgatatcgaacccaatgagcacctataaactgtacagaaatcccagaaacaagaatgcaggaaatttcatgagattatcagactttttgacgtttgcaaagggaaaggatttgtcaggaatcatgataactgttgagcatgctgcattcatggcagagaagcttggatttggagtggtagacgcagtggtcaaagcacttgatgactctggttatagcaaacagactgcccagaatgttatgattcagtcaaccaacagctcggtgctaaagaagttcaagcaggaaaccaagtacagccttgtctacatgattgaagaaggtgtcagagatgccgcaccttcatcccttgcagacattaagaagtttgctaatgccgtctctgttagcaccacatctgttttaccacagacccattattatttgacaaaccagaccaataagcttgtcacgtcccttcagtctgcgggcctccaagtttacgtctatgtgctcatgaatgagtttgcatctcagccgaatgacttcttcgcagacgccacttcacagattaatgcttatgtgcaaggtgctaaggtggacgggatcatcactgatttccctgggactgctcacagatacaaattgaactcctgcacgagcatgggaaacagcgcaccactatttatgcagcctccgcaaccaggtagcctccttttaaccatggccccagatgtacagccaccagcagcggcgccaatgccgctcttgacggacgctgacgttgcagaaccagccctacctccagtcagtaacaccacaacagctgcatctccttcgcatgccgccctcagaatgcgaaccgatgtctcgatcctcatcgcattgctgatgctatgtgcttccctcctcatctgaaggtagtcctgcacaacatcatatgcggcgtggtgcattagagctgaggatttcacattgagctgctaatagcaattctttccaccatttatgtagcgatttttttttcttgttctgtccggtgttttgaaggatggatggatgttcagcttgatacctcaacggtgacacttgtgtgtgctgccgctgcctctaggtatattttggtacatatatgtggtgatacattgttcaggtcatcttttctactgccaaaccctggcccggagggcaaaaatattcactgcaaactgttgtaactgatgt

SEQ ID NO: 50639 - DNA, 2484 bp, Zea Mays
cgcataaccacttccttagtgagatgcactcgtaaatcattagcagctggcgtctactattctctgctttggcacatgggaattgcttgttttgagaatgggatgggagtggatcagttcgatgggggtggtgctttgaactaacggcaaggctccagtaatcgttgctaagggcgggttctccggtctatttcctgattccagtgattttgcttatcggattcttgggaccattagctcccctgacacagtcatgtggtgtgatgttcggttgacaaaggatggcgatggtatctgcctaccgagcataaacatggataactgcacaatgatagacaatgtttttccagaagggaagaagacctacaatgttaatggtgtatctacggtgggatggttctccgtggactatacgagcactgatctgctgccaaacgtgacactgaagcaatcggtcctatctcgtacccctgtttatgatggttccatgttgataaattctgttgaaaatgttttcacctcatttaacgcctctgcagtttggttaaatgtccagcaagacagtttctacagccagtttaagcttagcatgcgaaactatatcctgtctttatcgaaacaattcattactgattacatctcatcgcctgaagtgaacttcctcaccagtatatctggaagagttagcaagaagacaaagcttgtgttccgctttcttgacgaaggctctattgagccatcgacaaaccagacatatgggtccatgttgaaaaatctaacatttgtcaagacttttgcctctggaatacttgttcccaaaagctatatctggcctgttacaccagataattacctactgccttatacttcagttgttgatgatgctcacaaagcggggctagaaatctatgctgctgattttgcaaatgactttactatcagctataactacagctttgatccattagcggaatatctttccttcattggtaacagtgccttctctgtcgatggtgtgttgactgatttcccgattactccttcagaagcagttggttgctttagtaacctgaacaacagcaagatcgaccatgctgtcctgttcaagtgaccaaagatggcatactgatatgcatgagttctgttgacctaatggatgttactactgttggaaaatcatcatttacttcgcaagtaactaccatcaacgatctgaaggctggtcctggagtcttcaccttcaaccttacttgggatgatatttctaagaacctacagcccatgatatcgaacccaatgagcacctataaactgtacagaaatcccagaaacaagaatgcaggaaatttcatgagattatcagactttttgacgtttgcaaagggaaaggatttgtcaggaatcatgataactgttgagcatgctgcattcatggcagagaagcttggatttggagtggtagacgcagtggtcaaagcacttgatgactctggttatagcaaacagactgcccagaatgttatgattcagtcaaccaacagctcggtgctaaagaagttcaagcaggaaaccaagtacagccttgtctacatgattgaagaaggtgtcagagatgccgcaccttcatcccttgcagacattaagaagtttgctaatgccgtctctgttagcaccacatctgttttaccacagacccattattatttgacaaaccagaccaataagcttgtcacgtcccttcagtctgcgggcctccaagtttacgtctatgtgctcatgaatgagtttgcatctcagccgaatgacttcttcgcagacgccacttcacagattaatgcttatgtgcaaggtgctaaggtggacgggatcatcactgatttccctgggactgctcacagatacaaattgaactcctgcacgagcatgggaaacagcgcaccactatttatgcagcctccgcaaccaggtagcctccttttaaccatggccccagatgtacagccaccagcagcggcgccaatgccgctcttgacggacgctgacgttgcagaaccagccctacctccagtcagtaacaccacaacagctgcatctccttcgcatgccgccctcagaatgcgaaccgatgtctcgatcctcatcgcattgctgatgctatgtgcttccctcctcatctgaaggtagtcctgcacaacatcatatgcggcgtggtgcattagagctgaggatttcacattgagctgctaatagcaattctttccaccatttatgtagcgatttttttttcttgttctgtccggtgttttgaaggatggatggatgttcagcttgatacctcaacggtgacacttgtgtgtgctgccgctgcctctaggtatattttggtacatatatgtggtgatacattgttcaggtcatcttttctactgccaaaccctggcccggagggcaaaaatattcactgcaaactgttgtaactgatgt

SEQ ID NO: 50640 - DNA, 2581 bp, Zea Mays
tggtcatgcgtgtttaccagttttatgtccgtccggcaaggctccagtaatcgttgctaagggcgggttctccggtctatttcctgattccagtgattttgcttatcggattcttgggaccattagctcccctgacacagtcatgtggtgtgatgttcggttgacaaaggatggcgatggtatctgcctaccgagcataaacatggataactgcacaatgatagacaatgtttttccagaagggaagaagacctacaatgttaatggtgtatctacggtgggatggttctccgtggactatacgagcactgatctgctgccaaacgtgacactgaagcaatcggtcctatctcgtacccctgtttatgatggttccatgttgataaattctgttgaaaatgttttcacctcatttaacgcctctgcagtttggttaaatgtccagcaagacagtttctacagccagtttaagcttagcatgcgaaactatatcctgtctttatcgaaacaattcattactgattacatctcatcgcctgaagtgaacttcctcaccagtatatctggaagagttagcaagaagacaaagcttgtgttccgctttcttgacgaaggctctattgagccatcgacaaaccagacatatgggtccatgttgaaaaatctaacatttgtcaagacttttgcctctggaatacttgttcccaaaagctatatctggcctgttacaccagataattacctactgccttatacttcagttgttgatgatgctcacaaagcggggctagaaatctatgctgctgattttgcaaatgactttactatcagctataactacagctttgatccattagcggaatatctttccttcattggtaacagtgccttctctgtcgatggtgtgttgactgatttcccgattactccttcagaagcagttggttgctttagtaacctgaacaacagcaagatcgaccatgctgtcctgttcaagtgaccaaagatggcatactgatatgcatgagttctgttgacctaatggatgttactactgttggaaaatcatcatttacttcgcaagtaactaccatcaacgatctgaaggctggtcctggagtcttcaccttcaaccttacttgggatgatatttctaagaacctacagcgtaagttgatttgataccatttcgcctactttttgtaaacctgaatgtttgctatgcaaaatagatgccaaatgtttagatatcctcatgtatatatagttatgctaagtcatcttttttgtgcaattcataactcgtgaatagttaatgtgtaatttttactgcactggtcacacatttgcttcaaaactaacaattttattggcagccatgatatcgaacccaatgagcacctataaactgtacagaaatcccagaaacaagaatgcaggaaatttcatgagattatcagactttttgacgtttgcaaagggaaaggatttgtcaggaatcatgataactgttgagcatgctgcattcatggcagagaagcttggatttggagtggtagacgcagtggtcaaagcacttgatgactctggttatagcaaacagactgcccagaatgttatgattcagtcaaccaacagctcggtgctaaagaagttcaagcaggaaaccaagtacagccttgtctacatgattgaagaaggtgtcagagatgccgcaccttcatcccttgcagacattaagaagtttgctaatgccgtctctgttagcaccacatctgttttaccacagacccattattatttgacaaaccagaccaataagcttgtcacgtcccttcagtctgcgggcctccaagtttacgtctatgtgctcatgaatgagtttgcatctcagccgaatgacttcttcgcagacgccacttcacagattaatgcttatgtgcaaggtgctaaggtggacgggatcatcactgatttccctgggactgctcacagatacaaattgaactcctgcacgagcatgggaaacagcgcaccactatttatgcagcctccgcaaccaggtagcctccttttaaccatggccccagatgtacagccaccagcagcggcgccaatgccgctcttgacggacgctgacgttgcagaaccagccctacctccagtcagtaacaccacaacagctgcatctccttcgcatgccgccctcagaatgcgaaccgatgtctcgatcctcatcgcattgctgatgctatgtgcttccctcctcatctgaaggtagtcctgcacaacatcatatgcggcgtggtgcattagagctgaggatttcacattgagctgctaatagcaattctttccaccatttatgtagcgatttttttttcttgttctgtccggtgttttgaaggatggatggatgttcagcttgatacctcaacggtgacacttgtgtgtgctgccgctgcctctaggtatattttggtacatatatgtggtgatacattgttcaggtcatcttttctactgccaaaccctggcccggagggcaaaaatattcactgcaaactgttgtaactgatgt

SEQ ID NO: 50641 - DNA, 1127 bp, Zea Mays
tttttaaattattgtttatgtaatctaaagtttagaaaaggttgtacctgagacgaaatccgggcggcagcagccatcggaggctgggcggcagccgccagcctcccgctcgcacgggagccacacacggacaccacgctgcgttcactcgcaaccgtggcccgtggcccgtgggtttcgcctgtggtcaccgcgaggccgcatccagtcgcccatgccgccttccgcatcgatgccggcgacgcacacggccgtgtacgtggcggcggtgcccctgcgggcgcccaagggccccgcccagctgctgatgtcggcgggctactcgctgggcatgtgggacctgcagcacttcatggtgctcctccgtcccgacccggcgctggcccaggcgctggtcttcgatttccagccgcgggacccggaggacgtcctcgccgcgctcgcggtgctgtcgcggagagagatccctggcgtggttcgcagaagaacgctgcggagggtcccggacgggcggtgctggctcgtggggcactgctgcgacgccgtcggtgccgccacaaggttcagcgagcggtggacgaccggcctggtggtcggggagcacgactgccgggactacaccaacggtgaaaaacgtgtcctggagtcgctcagattgcgcggcaacggcagcagcaccagtggggcggcgccgccgtgatggatgatctaaactgtacggactacggtcatatatcggattctataaactggagacccaacacgcaatgcagaaatttcatggaaacgaggagacgttttgaaagggaaaaaaaatgaggagagaaaacaaagaagctactactcaagacaaggcgatggtgtaacgaagaaatgaggccacttgactagttgactgtgaaagatactagaggtgctacgtgaagcaagaaattagacacgctatgtggagaagcaccgttgactaagtaaacttaggaggtgtttggtttgaagaaatcaatctattctaaatgaggtggtatatcatgagtctattatacaaattttgtggaataaacttattctttatattattactaattattagcccacgtagaatgaaatggtgatggatcgactcaaac

SEQ ID NO: 50642 - DNA, 2664 bp, Zea Mays
caccatacaccgagcccttcggtcgtcgccagttttgaatttcgaacatgttaaaagccccgcctgcgctgcccaccaccaacggccaaacccccaacaaggacagagcagaaacttagccagagattcgtccaggataggggctgtatcgtagggagtagtcgttgcggagattgggtcgaagcggactggacaggagccgagcaaactatctgcagaagaggttaaagggttgccgtgcggactccggagctgtgagaatctaccccgaggtaagctcttagagtcgtagtcaaagaggagaagccaggccgggaacaaacagaaaagagaagagcaacaggagtacaggactcagtgcaccaagaataggaaagagcaaagaccataacagttgaacttcaagatgcttgaagtgaggactgcaagaaggccggctctcgccgacatctctggtggtgggttctttatgaggacagtagaatcgccaggagctgtgctggtgaatggtgctgtcaagcggccggctcggcagtttctatcaccttcaagcaacaaggagaatgtgccaccagtgggagctttcagggctacaccaaagaggaggacccccttgcctgactggtacccgaggacaccactccgtgacatcacatcaatcgtcaaggtggtggactatttccttgctattgtctaattccattttgttgtatttggtgcatgcactgtactctataatatgctacagtgtggtgcaatgtttcatttgtgagtccttgtgttcagaatgcctggttagtggccaacaaagataggttatgtagtaggtttggtaattggtattcagaatgttgagccttgtacactattattctataatacaatagatctgccagttctgctagctgccttgatgacatagaatgagaaatatatacagttggattttatcattagtttagcaactcatagcaaaagattcttataatttcaaataacatagtaataatactcttacaagacattaccaacactcttttattctatcttacttgcatctagctgtgttcactattcagttttaggtgcctgaccatttaaatgtgcttaaatttgcagaaaggtcagtagtcaataaggcatgttaaatctaaatttattcttctccattgtacttaatgttaccccatttccccttattctctttattctctttgaatatttaaccgatcataatagatgttcctttgtgtcgtgactgaattactgtacttgtttgtagaaactacgcactgcaactaaaaagtcacacactttaggctgtcatgttaagaagttatatacaggattgtgtttagaaattcattgacaatttgccatgatccgtaaacttaagtcagttgttgaggatcttatttgcaacggcatgtcttcttagttgttctgaaatgtccattcatttaaacgtagcctactaaaaatgagattcctataaagattcatagtatagggtttcgacttcatctttagttttaagctttatatgaccaatctatttaggatatttgcaagaatgtcatttggtgtttttaatgattttaatcgtcttcataacttatattacagaaacatttttatgttgttacttatatacacggttacagactacacgagttatatttgttgatattggaagcgttgaaactactgatagctgatactccctccgttcgtttttatttgttgttattgacctataatgtgcttactttgtctgttacttttaattattggcagaaggtatattcttagatgttagatgtgtatagtgtttccctggaaatttgctgatgtactaactgctagctgcaggcaattgagaggaggagaagtcgtctgcagaatgctgcagctcagcagcagatccagtggacagaagacccttcccgatctgtggatccaataactccagtacaggcagagcagggtggtgtgccaacaactgtggatggtcaaggtgttggaagccctgcaacctgtttggaggatggcaagctgaagacatcgtcctatccatcatctgactgctccttgcaggccactccatccaaaccaaacgatccagctctcgcagatctcgtggagaagaagctgtccagctcgatagagcagatcgagaagatggtgcggcgaaacctgaagagaacttcgaaggccgctcagccttccaagaggaccatccagaggcgcgtcctgatgtccatgcgatgagctgagaaagctatctgctctgccatggcttcccttgtctgctgctttcttagcagcaagtcgtaaccaaccattacgccagttttgcctgaaggaggggtggggccgtgggggctcctggttctctgcttgaggaccccggggtatgcggcttactactagctctctgcttgagggtacacattatggtgactgcgtatttttaatttgagaaattagtagttctatgtatagttttatagtgtggaacggatatgagaaattagtagcaattgtgacttcgacagcttgaatactgttgttatggagtagttcctctatactgttgtttccgagtaacataacacagttttggccatcagtaatggaatcataaccttaccgatttcagtt

SEQ ID NO: 50643 - DNA, 1401 bp, Zea Mays
gccaattctcattttggcgggaacatactctgggtctagcctgtttggtaattggtactcggctccactcggcgagattcgggagcgcgcttccaaacgccgccgcgattcggcatcctgctcgcgtgagaagcgctcatccggcattccggctccaaccgtccattctccgccccgcttcgccttttttcccgtcgcttccttctccgctgctcccgccgcccttctccggcaggattcgacggcggcggcggtctctgcgagcctcctcttacttcacggctgcctggagggcttcccgagccgcggcgatctctcacagctcgccttcctcgtcatcctgcaccgctgcggcctcccgcgccgtcgagagtgagcgagttcgggagcgctaccgctaccaaacatggagcttagctggagcgggagcccgtgtgagctggttgggagtcctaccaaacaggcattctaaccctaatcgagtggtgccttccctagccgtcggctatggacaagttcctcgtgccggcgccgcctcattgtggcgaggagcccgcgccgcctcctaggagacaccggtggaggcgcatcatcgcggagctggacggccgcatagactccaggttccagcacagagattcgcgcctccttcttgattccttcaccgaggttggggccttcgatcacaagtattacattcatggcgaggaaaggtgtcggacatacgtggatcgaataattagtgcttcaactataaattttcatccagtaagggagggtgtttcagcaatagaattcgatagaaagggaatatacattgcatcagtgacactctcagggtgtctgacggtgcatgactttgagactttgtactgctctaaatatggcccaccatgcagtatgccagatgaatcatcaaattatgtgctccatatatctaaccgaattcccctaaatgctgtccgatggaatccaggaaaccaagacgagattgcttgcacatcaaatcaaagtgataacgttttcctctttgatattggctatgtctcatctacaccaactgaagttttgcataaaggaaaatcgaaattcccctcgctctactctgaatcctgcaagagtttgactgatataacttttacttcagatgataagtcacggatatttgcatctggccttgatggggcagtgtacatgtgggacaggcgatcaagtaagacacactgtcttgagcttgtggcatctccagaagctcagttcaacactgtcaagttaactgtggataatcggactgtgtttggtgcaactaaaaatggcacaattcatgttgggatctccgtggagggagggcatcagctgcttttcaaagccacaacgaggttcagcaattgatgtcagtgc

SEQ ID NO: 50644 - DNA, 1367 bp, Zea Mays
gcctgtttggtaattggtactcggctccactcggcgagattcgggagcgcgcttccaaacgccgccgcgattcggcatcctgctcgcgtgagaagcgctcatccggcattccggctccaaccgtccattctccgccccgcttcgccttttttcccgtcgcttccttctccgctgctcccgccgcccttctccggcaggattcgacggcggcggcggtctctgcgagcctcctcttacttcacggctgcctggagggcttcccgagccgcggcgatctctcacagctcgccttcctcgtcatcctgcaccgctgcggcctcccgcgccgtcgagagtgagcgagttcgggagcgctaccgctaccaaacatggagcttagctggagcgggagcccgtgtgagctggttgggagtcctaccaaacaggcattctaaccctaatcgagtggtgccttccctagccgtcggctatggacaagttcctcgtgccggcgccgcctcattgtggcgaggagcccgcgccgcctcctaggagacaccggtggaggcgcatcatcgcggagctggacggccgcatagactccaggttccagcacagagattcgcgcctccttcttgattccttcaccgaggtttattgtgattgcttctatcaggtggatcgaataattagtgcttcaactataaattttcatccagtaagggagggtgtttcagcaatagaattcgatagaaagggaatatacattgcatcagtgacactctcagggtgtctgacggtgcatgactttgagactttgtactgctctaaatatggcccaccatgcagtatgccagatgaatcatcaaattatgtgctccatatatctaaccgaattcccctaaatgctgtccgatggaatccaggaaaccaagacgagattgcttgcacatcaaatcaaagtgataacgttttcctctttgatattggctatgtctcatctacaccaactgaagttttgcataaaggaaaatcgaaattcccctcgctctactctgaatcctgcaagagtttgactgatataacttttacttcagatgataagtcacggatatttgcatctggccttgatggggcagtgtacatgtgggacaggcgatcaagtaagacacactgtcttgagcttgtggcatctccagaagctcagttcaacactgtcaagttaactgtggataatcggactgtgtttggtgcaactaaaaatggcacaattcatgttgggatctccgtggagggagggcatcagctgcttttcaaagccacaacgagggacatggtgcaaaagcatcgccattgcctgccttgtcaaggagccaagcaaaaccttg

SEQ ID NO: 50645 - DNA, 1350 bp, Zea Mays
gcctgtttggtaattggtactcggctccactcggcgagattcgggagcgcgcttccaaacgccgccgcgattcggcatcctgctcgcgtgagaagcgctcatccggcattccggctccaaccgtccattctccgccccgcttcgccttttttcccgtcgcttccttctccgctgctcccgccgcccttctccggcaggattcgacggcggcggcggtctctgcgagcctcctcttacttcacggctgcctggagggcttcccgagccgcggcgatctctcacagctcgccttcctcgtcatcctgcaccgctgcggcctcccgcgccgtcgagagtgagcgagttcgggagcgctaccgctaccaaacatggagcttagctggagcgggagcccgtgtgagctggttgggagtcctaccaaacaggcattctaaccctaatcgagtggtgccttccctagccgtcggctatggacaagttcctcgtgccggcgccgcctcattgtggcgaggagcccgcgccgcctcctaggagacaccggtggaggcgcatcatcgcggagctggacggccgcatagactccaggttccagcacagagattcgcgcctccttcttgattccttcaccgaggttggggccttcgatcacaagtattacattcatggcgaggaaaggtggatcgaataattagtgcttcaactataaattttcatccagtaagggagggtgtttcagcaatagaattcgatagaaagggaatatacattgcatcagtgacactctcagggtgtctgacggtgcatgactttgagactttgtactgctctaaatatggcccaccatgcagtatgccagatgaatcatcaaattatgtgctccatatatctaaccgaattcccctaaatgctgtccgatggaatccaggaaaccaagacgagattgcttgcacatcaaatcaaagtgataacgttttcctctttgatattggctatgtctcatctacaccaactgaagttttgcataaaggaaaatcgaaattcccctcgctctactctgaatcctgcaagagtttgactgatataacttttacttcagatgataagtcacggatatttgcatctggccttgatggggcagtgtacatgtgggacaggcgatcaagtaagacacactgtcttgagcttgtggcatctccagaagctcagttcaacactgtcaagttaactgtggataatcggactgtgtttggtgcaactaaaaatggcacaattcatgttgggatctccgtggagggagggcatcagctgcttttcaaagccacaacgaggttcagcaattgatgtcagtgc

SEQ ID NO: 50646 - DNA, 1391 bp, Zea Mays
gagagatgcatgggcctcaacgtttaggcccactactacacgcagatgagcccaacgatctagggtttccagctctacacgccgcacacataaatcccgagaccaaaccttcgcctccattcgtcccccgccgccgccgctcccagtctccacgcggaagcagcgcctcgcaacgctcctacccaatggcgccgacgtcgaagctgtcgatgggcatcaagcgcgcgtcgcggtcgcacgcgtaccaccgccgtgggctctgggccatcaaggccaagaacggcggcgtcttccccaaggccgagaagcccgccgccgccgcggaacccaagttctaccccgccgacgacgtcaagcctcgcgttcccagcacccgcaagcctaatcccaccaagctcaggtcgagcatcacgcctgggacggtgctgatcctcctcgcggggcgcttcatggggaagagagtggtgttcctcaagcagctcaactccggcctgctcctcgtctctggtccattcaagatcaatggagtaccgatccgtcgtgtcaaccagacctatgtcattgctacatcaaccaaggttgacatctctggtgttgatgtcgcgaagtttgatgacaagtactttgccagggagaaaaagcagaaggtgaagaagacggagggcgtccaagtctctgcctgatttcaaaaaggatgaccagaaggccgtggatgctgctctgatcaaggctattgaggctatcccagagctgaaggcctatcttggcgctcggttctcccttagggatggtgacaagccccacgagatggtcttctaaaccgagttttggagttcggaggaagtcgctttggctgtgctctcttgtgacaagccccacgagatggtctcccagagctgaaggcctaccttgtttcattctgcttgaagtctgtcaaatattatgagaagatctaagaaagttttatcggtattggtggttcagcatggcgttatctgcttttggttctttgtgtaggtcaatgttgtcttaagatcatattttgtttgaattgctgactgtcgtgtttttttgctatctttgaacgtcttaaccgttccactaagagcatgtttggatgagttaggttttagttactagttgagctaaggctatctccaggacattttctatttcaaacttttctctgcaaacattgttaactgttaaacagtgttattcatagttttgcgaaccttgttttttaaaccaatcaaagttaaattaatacttgtaataaactctactgccaaatagcttaaattaaatcaatcaaagttaaattagtacttgtaattgtcattcaaacatttgatgtgacgtggtattgtggtatgaaactctagtttggt

SEQ ID NO: 50647 - DNA, 2413 bp, Zea Mays
gaccacacgtccacaccccaccagcggccaccttcgtcatcgccatgtctccaccgctccacgtctcgaccctttcctgcttccttccttcctccttccttcccgtcagactcgccaaagtgcgcccgggcgcgccgaatctccagacgagatcgcactccgcacctgacgccgccagtgccggagccgacggagatagcgggcctccacctccgatctagtgaaacatttggagaaccatacccaacaaaataagcaccagcatttcatcctttgtctcggcattccaataataataatgtggaaacgtaatccctttgggggtaaagcacatagtggactggatgggcgcactattgttgttagaagtctgaagatctcagtacgaaatgtcattgcacaaggaggcttctcttgtgtatatctggcatgtgacacagtacatccatcaaagatgtatgcattgaagcacattatttgcaatgactcagaatcacttgatcttgtcatgaaggagatccaggttatgaacctccttaaagggcatcctaatgtggtcacacttgttgcccatgatgttgttgacatgggccgtacaaaggaggcacttcttgtaatggagttttgtgagaagtccttggtgagtgcaatggagagcagaggtagtggttactatgaggagaagaaggtgcttttaattttcagagatgtctgcaatgctgtctttgccatgcatggacaatcactgccaattgcacatagggatctgaaagctgaaaatgttcttcttggatcggatggtgcatggaaaatatgtgattttggaagcacatcaactaatcataaatgctttaacaaaccagaagagatgggcattgaggaagatgtcatcaggaagcatacaaccccagactacagggccccagagatgtgggatctctacagaagagaagttatcagtgaaaaagttgacatttgggctttggggtgccttctatatagaatatgctacttcaagtctgcatttgacggagaatccaagttgcaggtactcaatggcaattatcatatccctgagcaacccaaatatagcattgctgtcacagggctgatcaaagatatgctggaagcctcaccaaatgccagaccagacatcacacaggcaagagctttgattgattgatcattcatcttcacgatactctaggtctggtttcgtgttaatgagctactgtcgcttgagttacagaaaaggttacctgatggaccttcaccagccgtttccttgagctcgcaagatgaaggtgctcataaaagaacacctgtgatgcctagaaggaaccctccacctccaagagagcaatctaatagttttttaccgcatggaagctcaaaggcaggagatgcacctttaggtgcattttgggcgacacagcatgcacaagaggtctctctgacacggagatacaaaattctgggaaaagtagagcacaacaacctcaacccgagccaaaatgtgagaaagacccatttaatagctttgttgcagattttgacactcacaatctcaacattgccgttggtaaggcatccgaacttgaacttgaagtgtccaatctgaaggagcagttgaagaaaaccacattagaaaaggctgagatgacagccaagcatctcctcatcgtcaggagatccaagagctgaagctcactcttgccgagccaacacctccctcaaacaaagtcagctcaaggacacaagattctggatctcagcgaaaggaaaagatccaaggtactgtgtgggagcttgaacaagggatgcttgctagcaactcctcatcagccagttctgatgccaaaacatggcaggctttccctgacacaaagactcaggcccgaccaaaggtcgatcatgcaactaatgggagccaaaacataaccaagaacacaacgtcaggtgcttcccccgatgcgtggggttttggtactgataatttcagaacaccagcaacagcattaagcgctaccacacagatcaacagggcagctgcccaacggagctcatcccaaagatttaacgctggtgtggccaaggtagagcagccatctggatgggctggtttttaacttcaatcgacatgcgttaaccatcattctggtcaacatttgcaatccgcgctacacagctgctgttgccgatggagttgtgatctttgacatccacagggcatcaaaatcggttatttttagtgtgttcatcaattttggttgtgccaactttgatattgattcatgagatcacttgaaattacccgttgttaataagtaaatatatattgacagtattgtgcgtatttctttgtatgattatgaatatgcaacgggagaattcgggcggtatgacggtcccg

SEQ ID NO: 50648 - DNA, 3121 bp, Zea Mays
gaccacacgtccacaccccaccagcggccaccttcgtcatcgccatgtctccaccgctccacgtctcgaccctttcctgcttccttccttcctccttccttcccgtcagactcgccaaagtgcgcccgggcgcgccgaatctccagacgagatcgcactccgcacctgacgccgccagtgccggagccgacggagatagcgggcctccacctccgatctagtggcgtggtgttacagtcatcactcatcagcagtggcggagcacgacccaaaattaagggcagcaggctttccaagcagccgaatttgaaagcagcaaaagaaagcaggcggagcagtggagcacgggctgcacatccgaagcaggcggagcaaagcaaagcaggcaagcagccgtggagcagtggaggtggagcacggccgtgcggccgccggccagccaacgcccaacgggtcaaccggacaagcacgcgcgcacagcaggaaggcagaggcagccaccagccaggcaagaccgcagcccgcaggaagcagaagccagagacggaggtgggcaggcggccgcggacggacaggcggtcggccggccgggcgagccgcgagcggacgtcttgtgctgcagcggctgtgttgcggcggctgtgctgtgcgggctgcgtgggctgggcggctgaatacctagatttcacttttttactgggccgagttgaggtatggcgcgggccatacttggccataacgggccctccgcccctgctcatcagaacggtgcagaatcattatcagaaacatttggagaaccatacccaacaaaataagcaccagcatttcatcctttgtctcggcattccaataataataatgtggaaacgtaatccctttgggggtaaagcacatagtggactggatgggcgcactattgttgttagaagtctgaagatctcagtacgaaatgtcattgcacaaggaggcttctcttgtgtatatctggcatgtgacacagtacatccatcaaagatgtatgcattgaagcacattatttgcaatgactcagaatcacttgatcttgtcatgaaggagatccaggttatgaacctccttaaagggcatcctaatgtggtcacacttgttgcccatgatgttgttgacatgggccgtacaaaggaggcacttcttgtaatggagttttgtgagaagtccttggtgagtgcaatggagagcagaggtagtggttactatgaggagaagaaggtgcttttaattttcagagatgtctgcaatgctgtctttgccatgcatggacaatcactgccaattgcacatagggatctgaaagctgaaaatgttcttcttggatcggatggtgcatggaaaatatgtgattttggaagcacatcaactaatcataaatgctttaacaaaccagaagagatgggcattgaggaagatgtcatcaggaagcatacaaccccagactacagggccccagagatgtgggatctctacagaagagaagttatcagtgaaaaagttgacatttgggctttggggtgccttctatatagaatatgctacttcaagtctgcatttgacggagaatccaagttgcaggtactcaatggcaattatcatatccctgagcaacccaaatatagcattgctgtcacagggctgatcaaagatatgctggaagcctcaccaaatgccagaccagacatcacacaggtctggtttcgtgttaatgagctactgtcgcttgagttacagaaaaggttacctgatggaccttcaccagccgtttccttgagctcgcaagatgaaggtgctcataaaagaacacctgtgatgcctagaaggaaccctccacctccaagagagcaatctaatagttttttaccgcatggaagctcaaaggcaggagatgcacctttaggtgcattttgggcgacacagcatgcacaaggtgctcaagctgtagttaataggaaccctttgtttgatggggagtcaattaaggcaccactgtcatcaaagcagaaccaaagctgggtggacaccagcatcagtattcctggcaataggcatgatcattctggtcagatgtcactgacaagtaaagcacaaaataactctttgtccaataatggtttcagaggtctctctgacacggagatacaaaattctgggaaaagtagagcacaacaacctcaacccgagccaaaatgtgagaaagacccatttaatagctttgttgcagattttgacactcacaatctcaacattgccgttggtaaggcatccgaacttgaacttgaagtgtccaatctgaaggagcagttgaagaaaaccacattagaaaaggctgagatgacagccaagcatctcctcatcgtcaggagatccaagagctgaagctcactcttgccgagccaacacctccctcaaacaaagtcagctcaaggacacaagattctggatctcagcgaaaggaaaagatccaaggtactgtgtgggagcttgaacaagggatgcttgctagcaactcctcatcagccagttctgatgccaaaacatggcaggctttccctgacacaaagactcaggcccgaccaaaggtcgatcatgcaactaatgggagccaaaacataaccaagaacacaacgtcaggtgcttcccccgatgcgtggggttttggtactgataatttcagaacaccagcaacagcattaagcgctaccacacagatcaacagggcagctgcccaacggagctcatcccaaagatttaacgctggtgtggccaaggtagagcagccatctggatgggctggtttttaacttcaatcgacatgcgttaaccatcattctggtcaacatttgcaatccgcgctacacagctgctgttgccgatggagttgtgatctttgacatccacagggcatcaaaatcggttatttttagtgtgttcatcaattttggttgtgccaactttgatattgattcatgagatcacttgaaattacccgttgttaataagtaaatatatattgacagtattgtgcgtatttctttgtatgattatgaatatgcaacgggagaattcgggcggtatgacggtcccg

SEQ ID NO: 50649 - DNA, 2423 bp, Zea Mays
aaaactgaaggaggggaggcatcattcctacacatgggacgataaacatttggagaaccatacccaacaaaataagcaccagcatttcatcctttgtctcggcattccaataataataatgtggaaacgtaatccctttgggggtaaagcacatagtggactggatgggcgcactattgttgttagaagtctgaagatctcagtacgaaatgtcattgcacaaggaggcttctcttgtgtatatctggcatgtgacacagtacatccatcaaagatgtatgcattgaagcacattatttgcaatgactcagaatcacttgatcttgtcatgaaggagatccaggttatgaacctccttaaagggcatcctaatgtggtcacacttgttgcccatgatgttgttgacatgggccgtacaaaggaggcacttcttgtaatggagttttgtgagaagtccttggtgagtgcaatggagagcagaggtagtggttactatgaggagaagaaggtgcttttaattttcagagatgtctgcaatgctgtctttgccatgcatggacaatcactgccaattgcacatagggatctgaaagctgaaaatgttcttcttggatcggatggtgcatggaaaatatgtgattttggaagcacatcaactaatcataaatgctttaacaaaccagaagagatgggcattgaggaagatgtcatcaggaagcatacaaccccagactacagggccccagagatgtgggatctctacagaagagaagttatcagtgaaaaagttgacatttgggctttggggtgccttctatatagaatatgctacttcaagtctgcatttgacggagaatccaagttgcaggtactcaatggcaattatcatatccctgagcaacccaaatatagcattgctgtcacagggctgatcaaagatatgctggaagcctcaccaaatgccagaccagacatcacacaggcaagagctttgattgattgatcattcatcttcacgatactctaggtctggtttcgtgttaatgagctactgtcgcttgagttacagaaaaggttacctgatggaccttcaccagccgtttccttgagctcgcaagatgaaggtgctcataaaagaacacctgtgatgcctagaaggaaccctccacctccaagagagcaatctaatagttttttaccgcatggaagctcaaaggcaggagatgcacctttaggtgcattttgggcgacacagcatgcacaaggtgctcaagctgtagttaataggaaccctttgtttgatggggagtcaattaaggcaccactgtcatcaaagcagaaccaaagctgggtggacaccagcatcagtattcctggcaataggcatgatcattctggtcagatgtcactgacaagtaaagcacaaaataactctttgtccaataatggtttcagaggtctctctgacacggagatacaaaattctgggaaaagtagagcacaacaacctcaacccgagccaaaatgtgagaaagacccatttaatagctttgttgcagattttgacactcacaatctcaacattgccgttggtaaggcatccgaacttgaacttgaagtgtccaatctgaaggagcagttgaagaaaaccacattagaaaaggctgagatgacagccaagcatctcctcatcgtcaggagatccaagagctgaagctcactcttgccgagccaacacctccctcaaacaaagtcagctcaaggacacaagattctggatctcagcgaaaggaaaagatccaaggtactgtgtgggagcttgaacaagggatgcttgctagcaactcctcatcagccagttctgatgccaaaacatggcaggctttccctgacacaaagactcaggcccgaccaaaggtcgatcatgcaactaatgggagccaaaacataaccaagaacacaacgtcaggtgcttcccccgatgcgtggggttttggtactgataatttcagaacaccagcaacagcattaagcgctaccacacagatcaacagggcagctgcccaacggagctcatcccaaagatttaacgctggtgtggccaaggtagagcagccatctggatgggctggtttttaacttcaatcgacatgcgttaaccatcattctggtcaacatttgcaatccgcgctacacagctgctgttgccgatggagttgtgatctttgacatccacagggcatcaaaatcggttatttttagtgtgttcatcaattttggttgtgccaactttgatattgattcatgagatcacttgaaattacccgttgttaataagtaaatatatattgacagtattgtgcgtatttctttgtatgattatgaatatgcaacgggagaattcgggcggtatgacggtcccg

SEQ ID NO: 50650 - DNA, 1856 bp, Zea Mays
ctgtgggagggcaaatactgtatgtaaacagttatttcttgtactggtctgccgtattagggatctgaaagctgaaaatgttcttcttggatcggatggtgcatggaaaatatgtgattttggaagcacatcaactaatcataaatgctttaacaaaccagaagagatgggcattgaggaagatgtcatcaggaagcatacaaccccagactacagggccccagagatgtgggatctctacagaagagaagttatcagtgaaaaagttgacatttgggctttggggtgccttctatatagaatatgctacttcaagtctgcatttgacggagaatccaagttgcaggtactcaatggcaattatcatatccctgagcaacccaaatatagcattgctgtcacagggctgatcaaagatatgctggaagcctcaccaaatgccagaccagacatcacacaggtctggtttcgtgttaatgagctactgtcgcttgagttacagaaaaggttacctgatggaccttcaccagccgtttccttgagctcgcaagatgaaggtgctcataaaagaacacctgtgatgcctagaaggaaccctccacctccaagagagcaatctaatagttttttaccgcatggaagctcaaaggcaggagatgcacctttaggtgcattttgggcgacacagcatgcacaaggtgctcaagctgtagttaataggaaccctttgtttgatggggagtcaattaaggcaccactgtcatcaaagcagaaccaaagctgggtggacaccagcatcagtattcctggcaataggcatgatcattctggtcagatgtcactgacaagtaaagcacaaaataactctttgtccaataatggtttcagaggtctctctgacacggagatacaaaattctgggaaaagtagagcacaacaacctcaacccgagccaaaatgtgagaaagacccatttaatagctttgttgcagattttgacactcacaatctcaacattgccgttggtaaggcatccgaacttgaacttgaagtgtccaatctgaaggagcagttgaagaaaaccacattagaaaaggctgagatgacagccaagcatctcctcatcgtcaggagatccaagagctgaagctcactcttgccgagccaacacctccctcaaacaaagtcagctcaaggacacaagattctggatctcagcgaaaggaaaagatccaaggtactgtgtgggagcttgaacaagggatgcttgctagcaactcctcatcagccagttctgatgccaaaacatggcaggctttccctgacacaaagactcaggcccgaccaaaggtcgatcatgcaactaatgggagccaaaacataaccaagaacacaacgtcaggtgcttcccccgatgcgtggggttttggtactgataatttcagaacaccagcaacagcattaagcgctaccacacagatcaacagggcagctgcccaacggagctcatcccaaagatttaacgctggtgtggccaaggtagagcagccatctggatgggctggtttttaacttcaatcgacatgcgttaaccatcattctggtcaacatttgcaatccgcgctacacagctgctgttgccgatggagttgtgatctttgacatccacagggcatcaaaatcggttatttttagtgtgttcatcaattttggttgtgccaactttgatattgattcatgagatcacttgaaattacccgttgttaataagtaaatatatattgacagtattgtgcgtatttctttgtatgattatgaatatgcaacgggagaattcgggcggtatgacggtcccg

SEQ ID NO: 50651 - DNA, 1876 bp, Zea Mays
aaacagttatttcttgtactggtctgccgtattagggatctgaaagctgaaaatgttcttcttggatcggatggtgcatggaaaatatgtgattttggaagcacatcaactaatcataaatgctttaacaaaccagaagagatgggcattgaggaagatgtcatcaggaagcatacaaccccagactacagggccccagagatgtgggatctctacagaagagaagttatcagtgaaaaagttgacatttgggctttggggtgccttctatatagaatatgctacttcaagtctgcatttgacggagaatccaagttgcaggtactcaatggcaattatcatatccctgagcaacccaaatatagcattgctgtcacagggctgatcaaagatatgctggaagcctcaccaaatgccagaccagacatcacacaggcaagagctttgattgattgatcattcatcttcacgatactctaggtctggtttcgtgttaatgagctactgtcgcttgagttacagaaaaggttacctgatggaccttcaccagccgtttccttgagctcgcaagatgaaggtgctcataaaagaacacctgtgatgcctagaaggaaccctccacctccaagagagcaatctaatagttttttaccgcatggaagctcaaaggcaggagatgcacctttaggtgcattttgggcgacacagcatgcacaaggtgctcaagctgtagttaataggaaccctttgtttgatggggagtcaattaaggcaccactgtcatcaaagcagaaccaaagctgggtggacaccagcatcagtattcctggcaataggcatgatcattctggtcagatgtcactgacaagtaaagcacaaaataactctttgtccaataatggtttcagaggtctctctgacacggagatacaaaattctgggaaaagtagagcacaacaacctcaacccgagccaaaatgtgagaaagacccatttaatagctttgttgcagattttgacactcacaatctcaacattgccgttggtaaggcatccgaacttgaacttgaagtgtccaatctgaaggagcagttgaagaaaaccacattagaaaaggctgagatgacagccaagcatctcctcatcgtcaggagatccaagagctgaagctcactcttgccgagccaacacctccctcaaacaaagtcagctcaaggacacaagattctggatctcagcgaaaggaaaagatccaaggtactgtgtgggagcttgaacaagggatgcttgctagcaactcctcatcagccagttctgatgccaaaacatggcaggctttccctgacacaaagactcaggcccgaccaaaggtcgatcatgcaactaatgggagccaaaacataaccaagaacacaacgtcaggtgcttcccccgatgcgtggggttttggtactgataatttcagaacaccagcaacagcattaagcgctaccacacagatcaacagggcagctgcccaacggagctcatcccaaagatttaacgctggtgtggccaaggtagagcagccatctggatgggctggtttttaacttcaatcgacatgcgttaaccatcattctggtcaacatttgcaatccgcgctacacagctgctgttgccgatggagttgtgatctttgacatccacagggcatcaaaatcggttatttttagtgtgttcatcaattttggttgtgccaactttgatattgattcatgagatcacttgaaattacccgttgttaataagtaaatatatattgacagtattgtgcgtatttctttgtatgattatgaatatgcaacgggagaattcgggcggtatgacggtcccg

SEQ ID NO: 50652 - DNA, 1326 bp, Zea Mays
ggtgctagaagaaatttatctgtacaagtgctcataaaagaacacctgtgatgcctagaaggaaccctccacctccaagagagcaatctaatagttttttaccgcatggaagctcaaaggcaggagatgcacctttaggtgcattttgggcgacacagcatgcacaaggtgctcaagctgtagttaataggaaccctttgtttgatggggagtcaattaaggcaccactgtcatcaaagcagaaccaaagctgggtggacaccagcatcagtattcctggcaataggcatgatcattctggtcagatgtcactgacaagtaaagcacaaaataactctttgtccaataatggtttcagaggtctctctgacacggagatacaaaattctgggaaaagtagagcacaacaacctcaacccgagccaaaatgtgagaaagacccatttaatagctttgttgcagattttgacactcacaatctcaacattgccgttggtaaggcatccgaacttgaacttgaagtgtccaatctgaaggagcagttgaagaaaaccacattagaaaaggctgagatgacagccaagcatctcctcatcgtcaggagatccaagagctgaagctcactcttgccgagccaacacctccctcaaacaaagtcagctcaaggacacaagattctggatctcagcgaaaggaaaagatccaaggtactgtgtgggagcttgaacaagggatgcttgctagcaactcctcatcagccagttctgatgccaaaacatggcaggctttccctgacacaaagactcaggcccgaccaaaggtcgatcatgcaactaatgggagccaaaacataaccaagaacacaacgtcaggtgcttcccccgatgcgtggggttttggtactgataatttcagaacaccagcaacagcattaagcgctaccacacagatcaacagggcagctgcccaacggagctcatcccaaagatttaacgctggtgtggccaaggtagagcagccatctggatgggctggtttttaacttcaatcgacatgcgttaaccatcattctggtcaacatttgcaatccgcgctacacagctgctgttgccgatggagttgtgatctttgacatccacagggcatcaaaatcggttatttttagtgtgttcatcaattttggttgtgccaactttgatattgattcatgagatcacttgaaattacccgttgttaataagtaaatatatattgacagtattgtgcgtatttctttgtatgattatgaatatgcaacgggagaattcgggcggtatgacggtcccg

SEQ ID NO: 50653 - DNA, 1708 bp, Zea Mays
aagaagtagggctgctacaaacaattgtcaggaaggactaaatttcataggatctctttgtatgtcgatgatgtcctctttctgcaccccactgcagtggatatttccattaccatgaatctcttggatttatttggtaaagcttcagagctccataataatgagcagaaatccaatgtgttcccgatccagtgctccgaggatgatctaatggtggttcagaacttgttaccttgtgagaggtttgatttcccttgcagatatcttggaatccctctctcccttcgcaaattgtccaaagaacagtttcaacctttcatcgataggtttgctgactgcctgccaagctggaaagcagaccttatgacaagggccgggacaaaagttatggtgcagcatgtgcttacaggtgctcataaaagaacacctgtgatgcctagaaggaaccctccacctccaagagagcaatctaatagttttttaccgcatggaagctcaaaggcaggagatgcacctttaggtgcattttgggcgacacagcatgcacaaggtgctcaagctgtagttaataggaaccctttgtttgatggggagtcaattaaggcaccactgtcatcaaagcagaaccaaagctgggtggacaccagcatcagtattcctggcaataggcatgatcattctggtcagatgtcactgacaagtaaagcacaaaataactctttgtccaataatggtttcagaggtctctctgacacggagatacaaaattctgggaaaagtagagcacaacaacctcaacccgagccaaaatgtgagaaagacccatttaatagctttgttgcagattttgacactcacaatctcaacattgccgttggtaaggcatccgaacttgaacttgaagtgtccaatctgaaggagcagttgaagaaaaccacattagaaaaggctgagatgacagccaagcatctcctcatcgtcaggagatccaagagctgaagctcactcttgccgagccaacacctccctcaaacaaagtcagctcaaggacacaagattctggatctcagcgaaaggaaaagatccaaggtactgtgtgggagcttgaacaagggatgcttgctagcaactcctcatcagccagttctgatgccaaaacatggcaggctttccctgacacaaagactcaggcccgaccaaaggtcgatcatgcaactaatgggagccaaaacataaccaagaacacaacgtcaggtgcttcccccgatgcgtggggttttggtactgataatttcagaacaccagcaacagcattaagcgctaccacacagatcaacagggcagctgcccaacggagctcatcccaaagatttaacgctggtgtggccaaggtagagcagccatctggatgggctggtttttaacttcaatcgacatgcgttaaccatcattctggtcaacatttgcaatccgcgctacacagctgctgttgccgatggagttgtgatctttgacatccacagggcatcaaaatcggttatttttagtgtgttcatcaattttggttgtgccaactttgatattgattcatgagatcacttgaaattacccgttgttaataagtaaatatatattgacagtattgtgcgtatttctttgtatgattatgaatatgcaacgggagaattcgggcggtatgacggtcccg

SEQ ID NO: 50654 - DNA, 1322 bp, Zea Mays
cagagctctcgcctcttggcaaggtgctcataaaagaacacctgtgatgcctagaaggaaccctccacctccaagagagcaatctaatagttttttaccgcatggaagctcaaaggcaggagatgcacctttaggtgcattttgggcgacacagcatgcacaaggtgctcaagctgtagttaataggaaccctttgtttgatggggagtcaattaaggcaccactgtcatcaaagcagaaccaaagctgggtggacaccagcatcagtattcctggcaataggcatgatcattctggtcagatgtcactgacaagtaaagcacaaaataactctttgtccaataatggtttcagaggtctctctgacacggagatacaaaattctgggaaaagtagagcacaacaacctcaacccgagccaaaatgtgagaaagacccatttaatagctttgttgcagattttgacactcacaatctcaacattgccgttggtaaggcatccgaacttgaacttgaagtgtccaatctgaaggagcagttgaagaaaaccacattagaaaaggctgagatgacagccaagcatctcctcatcgtcaggagatccaagagctgaagctcactcttgccgagccaacacctccctcaaacaaagtcagctcaaggacacaagattctggatctcagcgaaaggaaaagatccaaggtactgtgtgggagcttgaacaagggatgcttgctagcaactcctcatcagccagttctgatgccaaaacatggcaggctttccctgacacaaagactcaggcccgaccaaaggtcgatcatgcaactaatgggagccaaaacataaccaagaacacaacgtcaggtgcttcccccgatgcgtggggttttggtactgataatttcagaacaccagcaacagcattaagcgctaccacacagatcaacagggcagctgcccaacggagctcatcccaaagatttaacgctggtgtggccaaggtagagcagccatctggatgggctggtttttaacttcaatcgacatgcgttaaccatcattctggtcaacatttgcaatccgcgctacacagctgctgttgccgatggagttgtgatctttgacatccacagggcatcaaaatcggttatttttagtgtgttcatcaattttggttgtgccaactttgatattgattcatgagatcacttgaaattacccgttgttaataagtaaatatatattgacagtattgtgcgtatttctttgtatgattatgaatatgcaacgggagaattcgggcggtatgacggtcccg

SEQ ID NO: 50655 - DNA, 1985 bp, Zea Mays
caaacaaggagcttccaactttcttcctcgctctttctctctctccgtgcgtctgcggtctgccatcggcatcgcccccaccccaccaccacacgtccacctctcccgcaattgggaatttctcctcaccgcctcgtctctgccgggctcgctcgtacgtcgctccccacccgcaatggcggccactttcgccctcctccttctcctgatcctgtcctcgtcggtccgcgccgcccccgacgccgtggtgtccaggatcgccttcggatcctgtgccaaccagagcgagccccagcccatttggaacgccgtcgcggggttcgacccgcaggtgttcgtctggctcggggacaacgtctacggcgacaacaagcgcccattccgggtcttcgggagggagcgcaccgtggggccctggaagaacgtgccgcgcttctacccttccaccgaggaggagctgcggaggcggtaccagctcgccagggcgcagcccgggaaaagaacttagtgggaaagtgattgctcaaaggcttatgttagatttcttggatgaacctgaagacagtaaacggaggaaacaagctggtgtttatgcctcatacatgtttggccctgaaggaaaacgtgtgaaggtaatcttgctggataccagatatcacagagacccgctattaagtgatggaactattctgggagatccccagtggcagtggctagagagggagcttcatggtccacaatcagagatcaccatcattggatcttcgatccaggtagtgtctaatctttcagccactactgggcctttgttctatgtggagtcctgggcacgcttcccgagggagagagaaaggctgttcagattgattgatagtagtaagagacctggagtgctatttattagtggggatgtccatttcggagaaatcaccagattcgattgtggagctgaatacccatcatatgatgttacttcgagtggtcttacccaatctgtcgagaactctgtgccagaagtgtttcaacctcttatgagacttctggcaatactaacaccaactaccatgcgagttttgagcccaaattgccaatataaatcatgtacaataggccaaccaaattttggagcgattgaaattgattggaacgctgtacctccgcggattaaacttgaactaagagatgttgagggtcattctgttcacagcgtagagttccctatatctgaactgcagccctcggaagcgcatgcaatcaaaagacaaacccatactttccaacgtcactgtactctcgaaacagagctcccatggctaacacgataccggcttgctctgatgctgtttgtcatcatagctgtttttgcggtggttgtggtgatgctagcgatcgcctgcttgtcaaactttaccaagtccagtaagaaaagcaagaaggaatagctgtgagctgcagaggagaaacgaagattcggtccagctataagctggatttcacactgaccagggatcacatatctcaaaccatgcctttgagcaggcaagagccagattgcaccacagtatcaagcagtacactgcgttgtgcaatttgcaaagcgcagattggataaatagatatgatagctaacaaataacttacaaccatgtgcctgcctcgtacagcttcgctttttgttttccgtcttcatgccttccgccctgtttttgttttctggtaagcattacattgactaagaaaaatcttggcggtggaagtgtcccacaagtcagctaactagtctgctgtgtgcctcctcgcacacggatggcatccctggtgctctcggttaattgcagtgtactcagacacgcgttcacatgtaccctgctagggccaatacggcctccagtctcgaaatagaactgatgtgaaacacgtgagcgacggtttatcttcgtatcgcatctatattcatatttaacattaaggactcgtttggtttg

SEQ ID NO: 50656 - DNA, 1958 bp, Zea Mays
caaacaaggagcttccaactttcttcctcgctctttctctctctccgtgcgtctgcggtctgccatcggcatcgcccccaccccaccaccacacgtccacctctcccgcaattgggaatttctcctcaccgcctcgtctctgccgggctcgctcgatcgccttcggatcctgtgccaaccagagcgagccccagcccatttggaacgccgtcgcggggttcgacccgcaggtgttcgtctggctcggggacaacgtctacggcgacaacaagcgcccattccgggtcttcgggagggagcgcaccgtggggccctggaagaacgtgccgcgcttctacccttccaccgaggaggagctgcggaggcggtaccagctcgccagggcgcagcccgggtacgccaggctcagggagagggctcaggttcttggaacatgggatgaccatgattatggattgaatgatgcaggaaaagaacttagtgggaaagtgattgctcaaaggcttatgttagatttcttggatgaacctgaagacagtaaacggaggaaacaagctggtgtttatgcctcatacatgtttggccctgaaggaaaacgtgtgaaggtaatcttgctggataccagatatcacagagacccgctattaagtgatggaactattctgggagatccccagtggcagtggctagagagggagcttcatggtccacaatcagagatcaccatcattggatcttcgatccaggtagtgtctaatctttcagccactactgggcctttgttctatgtggagtcctgggcacgcttcccgagggagagagaaaggctgttcagattgattgatagtagtaagagacctggagtgctatttattagtggggatgtccatttcggagaaatcaccagattcgattgtggagctgaatacccatcatatgatgttacttcgagtggtcttacccaatctgtcgagaactctgtgccagaagtgtttcaacctcttatgagacttctggcaatactaacaccaactaccatgcgagttttgagcccaaattgccaatataaatcatgtacaataggccaaccaaattttggagcgattgaaattgattggaacgctgtacctccgcggattaaacttgaactaagagatgttgagggtcattctgttcacagcgtagagttccctatatctgaactgcagccctcggaagcgcatgcaatcaaaagacaaacccatactttccaacgtcactgtactctcgaaacagagctcccatggctaacacgataccggcttgctctgatgctgtttgtcatcatagctgtttttgcggtggttgtggtgatgctagcgatcgcctgcttgtcaaactttaccaagtccagtaagaaaagcaagaaggaatagctgtgagctgcagaggagaaacgaagattcggtccagctataagctggatttcacactgaccagggatcacatatctcaaaccatgcctttgagcaggcaagagccagattgcaccacagtatcaagcagtacactgcgttgtgcaatttgcaaagcgcagattggataaatagatatgatagctaacaaataacttacaaccatgtgcctgcctcgtacagcttcgctttttgttttccgtcttcatgccttccgccctgtttttgttttctggtaagcattacattgactaagaaaaatcttggcggtggaagtgtcccacaagtcagctaactagtctgctgtgtgcctcctcgcacacggatggcatccctggtgctctcggttaattgcagtgtactcagacacgcgttcacatgtaccctgctagggccaatacggcctccagtctcgaaatagaactgatgtgaaacacgtgagcgacggtttatcttcgtatcgcatctatattcatatttaacattaaggactcgtttggtttg

SEQ ID NO: 50657 - DNA, 2342 bp, Zea Mays
caaacaaggagcttccaactttcttcctcgctctttctctctctccgtgcgtctgcggtctgccatcggcatcgcccccaccccaccaccacacgtccacctctcccgcaattgggaatttctcctcaccgcctcgtctctgccgggctcgctcgtacgtcgctccccacccgcaatggcggccactttcgccctcctccttctcctgatcctgtcctcgtcggtccgcgccgcccccgacgccgtggtgtccaggatcgccttcggatcctgtgccaaccagagcgagccccagcccatttggaacgccgtcgcggggttcgacccgcaggtgttcgtctggctcggggacaacgtctacggcgacaacaagcgcccattccgggtcttcgggagggagcgcaccgtggggccctggaagaacgtgccgcgcttctacccttccaccgaggaggagctgcggaggcggtaccagctcgccagggcgcagcccgggtacgccaggctcagggagagggctcaggttcttggaacatgggatgaccatgattatggattgaatgatgcaggaaaagaacttagtgggaaagtgattgctcaaaggcttatgttagatttcttggatgaacctgaagacagtaaacggaggaaacaagctggtgtttatgcctcatacatgtttggccctgaaggaaaacgtgtgaaggtaatcttgctggataccagatatcacagagacccgctattaagtgatggaactattctgggagatccccagtggcagtggctagagagggagcttcatggtccacaatcagagatcaccatcattggatcttcgatccaggtagtgtctaatctttcagccactactgggcctttgttctatgtggagtcctgggcacgcttcccgagggagagagaaaggctgttcagattgattgatagtagtaagagacctggagtgctatttattagtggggatgtccatttcggagaaatcaccagattcgattgtggagctgaatacccatcatatgatgttacttcgagtggtcttacccaatctgtcgagaactctgtgccagaagtgtttcaacctcttatgagacttctggcaatactaacaccaactaccatgcgagttttgagcccaaattgccaatataaatcatgtacaataggtacaattctttcttgggtagaaccttataagtatgaatcaaccagtgtagataacttattttgttttactgaatttcttagttttttttaagatcaaaagttctttctgttttggactaaactaaaactccccaaacaaaaatgagttcatttatattgtattatcatagaacatcttaaggcatcactaagatttctctatgattatctcatttccttctgtgttctgttctgttctgtttatacttgtactgttaattcgtttgtgttttgctgtttcaggccaaccaaattttggagcgattgaaattgattggaacgctgtacctccgcggattaaacttgaactaagagatgttgagggtcattctgttcacagcgtagagttccctatatctgaactgcagccctcggaagcgcatgcaatcaaaagacaaacccatactttccaacgtcactgtactctcgaaacagagctcccatggctaacacgataccggcttgctctgatgctgtttgtcatcatagctgtttttgcggtggttgtggtgatgctagcgatcgcctgcttgtcaaactttaccaagtccagtaagaaaagcaagaaggaatagctgtgagctgcagaggagaaacgaagattcggtccagctataagctggatttcacactgaccagggatcacatatctcaaaccatgcctttgagcaggcaagagccagattgcaccacagtatcaagcagtacactgcgttgtgcaatttgcaaagcgcagattggataaatagatatgatagctaacaaataacttacaaccatgtgcctgcctcgtacagcttcgctttttgttttccgtcttcatgccttccgccctgtttttgttttctggtaagcattacattgactaagaaaaatcttggcggtggaagtgtcccacaagtcagctaactagtctgctgtgtgcctcctcgcacacggatggcatccctggtgctctcggttaattgcagtgtactcagacacgcgttcacatgtaccctgctagggccaatacggcctccagtctcgaaatagaactgatgtgaaacacgtgagcgacggtttatcttcgtatcgcatctatattcatatttaacattaaggactcgtttggtttg

SEQ ID NO: 50658 - DNA, 855 bp, Zea Mays
caattggtggtttccttcatgcgctaaatgtggcaaaacaacagatgtcgactccaccgggtatcgctgctctgactgtaactggacaggacacaaattcaagtaaatcctacagcttattcaatttttttttaaaaaaatccttgctatcattccacatgtcaatattccaataatttccaattgcagatataagttgggttttctcgcctcagatgacacaacaacagctgaaatgttacgttttgaaaatgttgcaaaacaaattgttggaaaaccttgtgaaactcttcttaaaaacatatctgcttccaatgctcatacaatccctactgatatcaccgtgattatttccacaaaatacacattcgcggtgactctcacaaagtattcatttcatactgacaaaaaagtatttcaaccactgtctatccttgaatcacatggtcgacaaaaatcattgcctaaacttcttttggacaaggaagaaacaacaccatctactccaacaaaatgctcctttattccctacctagaacactcaccatcaaacaacactaaggagacttctacatttgaacgttcccatgttatcaaatcattgacattttcaaacgaagaaaacactagcaaaaaaactcaaaaaagaatgttgatgctccacataaggatacagaagatttggtatctactgatcctcaactcctaaccaatacagtacaatcacccacaaaaaggcccaaaaagatattggaaacagcaggcacctccacttctgaaacaccgccttaaaaatgactaaggacaaaactgtccacacttaccattggaaacaactttgctggtccttttgcc

SEQ ID NO: 50659 - DNA, 185 bp, Zea Mays
cgccgcaaagcagatggacgcaaagaggatgaatgccctggaacagatgttcaagcgactggccctcgccgacgacacgcgcctgaagccgctcgctaatcgacctcatttaggagtcaatttatgaatcaaacggcaccttacttcttggaatttttaggagtcaatttatacaaccagcaatt

SEQ ID NO: 50660 - DNA, 1556 bp, Zea Mays
ccacccctcgcctaactttcctagtgtcacccccggcgcccagagatcgaagcttcgagcaggaaacgcccccgccctccatctcccccgcgtccatggccaggagcaccgtccccctcaccaccccgacgcctggagatccatcctcaaacaccgctgctggggcgccgtcccacgctaggacccccgcgcctcgcaatcaaagtcactggcaactctgacgacctagggctcacagaggctagcgccgcgatggccgacccgggcgcctccgtcaacatcgctgcgcgccaccacctcacgccgcagctcgcggggcagccaccggtgacacatgcgggctggtggggaggggcgcgtccgtaccgccatgggagggggcatggcatcaagggtgagggaggggcgtcgaggaggcggacgccaacaagcccacacatccaacaccctaccaggaagttgactttcctctgctgctgctgctgtgctcagtgtggatgacattgtgttgcctcagatcaacgtccgctggtccgccctcagtacgcacctgccgttcgttgctgctagaagcatcgcattgcggatcgactttctccgtgctccacacctctgcctcgctgtcctcatgccccgcaccaaagacttcccatccgcctcctccacctcacgggtcgcagggtccatccttgccgtccaactcggcgacatctttgaccatgggaaacgagctccgcctccttgccccttctatcgaggctcgtggcggggtgtccctcagcctcgcacaggagcctcagccccgcgtaggagccgacgcagccgcggtgaccatccttggactcatgtctatgaccgtgttcctcaaaataaagatgtcacatgggcagattgaaggtgacaccaaattctttggggctctggcttttgtaattttctcaggaaagttggatttgtgctcagtagggaggccatttagttatgcaaattacatacggttaattgttaatgatttgaagaatgacctacaagatctctttactttggacctcttcaattacactttttgaaaatatgtgtacttgctgttcaaatgttattaatagactcagaacttgaccaaaacgtatgggtactcattcatttattattcctttttacatccatcatttccatggagttgtacttccaaatttcataatcgttggcatgattgttctgctcatctctaagttgtcaaatctttggcatttccagatgaaggcaatgttaggtatatacatgtcaatatcttggactactaaaataaacagaattgctaaagacaatgatgttgataaacacaacactactatacgttacgtatagaattaatattctttatcatattatttttatgatcttgtttttgcccacttaatacagccctacatacattgaactattagtacacggaaaaaactatgcgcacatgcttctatccgccatctttttccattcattttatatgtgtatttttatattaacatgtgcataatatttatgcacaatttaag

SEQ ID NO: 50661 - DNA, 2011 bp, Zea Mays
cctaactttcctagtgtcacccccggcgcccagagatcgaagcttcgagcaggaaacgcccccgccctccatctcccccgcgtccatggccaggagcaccgtccccctcaccaccccgacgcctggagatccatcctcaaacaccgctgctggggcgccgtcccacgctaggacccccgcgcctcgcaatcaaagtcactggcaactctgacgacctagggctcacagaggctagcgccgcgatggccgacccgggcgcctccgtcaacatcgctgcgcgccaccacctcacgccgcagctcgcggggcagccaccggtgacacatgcgggctggtggggaggggcgcgtccgtaccgccatgggagggggcatggcatcaagggtgagggaggggcgtcgaggaggcggacgccaacaagcccacacatccaacaccctaccaggaagttgactttcctctgctgctgctgctgtgctcagtgtggatgacattgtgttgcctcaggtgaccatccttggactcatgtctatgaccgtgttcctcaaaataaagatgtcacatgggcagattgaaggtgacaccaaattctttggggctctggcttttgtaattttctcaggaaagttggatttgtgctcagtagggaggccatttagttatgcaaattacatacggttaattgttaatgatttgaagaatgacctacaagatctctttactttggacctcttcaattacactttttgaaaatatgtgtacttgctgttcaaatgttattaatagactcagaacttgaccaaaacgtatgggtactcattcatttattattcctttttacatccatcatttccatggagttgtacttccaaatttcataatcgttggcatgattgttctgctcatctctaagtaagttccaagcaagagagaactagacatatgtaactctctattccctttttactcacctccactgatttttatgcaggttgtcaaatctttggcatttccagatgaaggcaatgttaggtaaatatatttatcttaccattcttttcatctcactattatctttgtcgacaaacaattccgatttactagcacgcgatttttcttacaaaaccatttaatacaattcaataatagaaagaactcaaaaaaggatattgaaacttcacatgaagtatgctttactgccttaaaataactatattcaacgaaacttaactattaaaccaaatgtcatcgtagggtccagacgatttaacatttaataatcttgaaattatgtccagtacattagaattacccacaaaaaaagttctttcatctttgtttttttggaatgctaaaacatttgtgttattatggtaaatattgttgcttagcacatttctcatcaaagaaattctacaacacaggcccaaacaaatttttgaagcagtccataaccttagttctgtaacacttgcttgaaacatgaataatgtacttcctcctaattttcctaacgtttgttttttctaattccataaaaaacgaaagcttacaaaaatcattattgtgttatattttccactaacttttacaaaaacatttgtctatccaggaacagaaggattagtgcatgtcgttgcatatggctcttttacagaaacttttatagctaatttattttgtatgacgtcatgtatgcccctaggacatacgtggctctttttgcaggtatatacatgtcaatatcttggactactaaaataaacagaattgctaaagacaatgatgttgataaacacaacactactatacgttacgtatagaattaatattctttatcatattatttttatgatcttgtttttgcccacttaatacagccctacatacattgaactattagtacacggaaaaaactatgcgcacatgcttctatccgccatctttttccattcattttatatgtgtatttttatattaacatgtgcataatatttatgcacaatttaag

SEQ ID NO: 50662 - DNA, 1638 bp, Zea Mays
ctttcctagtgtcacccccggcgcccagagatcgaagcttcgagcaggaaacgcccccgccctccatctcccccgcgtccatggccaggagcaccgtccccctcaccaccccgacgcctggagatccatcctcaaacaccgctgctggggcgccgtcccacgctaggacccccgcgcctcgcaatcaaagtcactggcaactctgacgacctagggctcacagaggctagcgccgcgatggccgacccgggcgcctccgtcaacatcgctgcgcgccaccacctcacgccgcagctcgcggggcagccaccggtgacacatgcgggctggtggggaggggcgcgtccgtaccgccatgggagggggcatggcatcaagggtgagggaggggcgtcgaggaggcggacgccaacaagcccacacatccaacaccctaccagattgtgtgacccttatcgttgtattatgggcttgcctgacccaatggaagttgactttcctctgctgctgctgctgtgctcagtgtggatgacattgtgttgcctcaggtgaccatccttggactcatgtctatgaccgtgttcctcaaaataaagatgtcacatgggcagattgaaggttgtcaaatctttggcatttccagatgaaggcaatgttaggtaaatatatttatcttaccattcttttcatctcactattatctttgtcgacaaacaattccgatttactagcacgcgatttttcttacaaaaccatttaatacaattcaataatagaaagaactcaaaaaaggatattgaaacttcacatgaagtatgctttactgccttaaaataactatattcaacgaaacttaactattaaaccaaatgtcatcgtagggtccagacgatttaacatttaataatcttgaaattatgtccagtacattagaattacccacaaaaaaagttctttcatctttgtttttttggaatgctaaaacatttgtgttattatggtaaatattgttgcttagcacatttctcatcaaagaaattctacaacacaggcccaaacaaatttttgaagcagtccataaccttagttctgtaacacttgcttgaaacatgaataatgtacttcctcctaattttcctaacgtttgttttttctaattccataaaaaacgaaagcttacaaaaatcattattgtgttatattttccactaacttttacaaaaacatttgtctatccaggaacagaaggattagtgcatgtcgttgcatatggctcttttacagaaacttttatagctaatttattttgtatgacgtcatgtatgcccctaggacatacgtggctctttttgcaggtatatacatgtcaatatcttggactactaaaataaacagaattgctaaagacaatgatgttgataaacacaacactactatacgttacgtatagaattaatattctttatcatattatttttatgatcttgtttttgcccacttaatacagccctacatacattgaactattagtacacggaaaaaactatgcgcacatgcttctatccgccatctttttccattcattttatatgtgtatttttatattaacatgtgcataatatttatgcacaatttaag

SEQ ID NO: 50663 - DNA, 837 bp, Zea Mays
gccaggagcaccgtccccctcaccaccccgacgcctggagatccatcctcaaacaccgctgctggggcgccgtcccacgctaggacccccgcgcctcgcaatcaaagtcactggcaactctgacgacctagggctcacagaggctagcgccgcgatggccgacccgggcgcctccgtcaacatcgctgcgcgccaccacctcacgccgcagctcgcggggcagccaccggtgacacatgcgggctggtggggaggggcgcgtccgtaccgccatgggagggggcatggcatcaagggtgagggaggggcgtcgaggaggcggacgccaacaagcccacacatccaacaccctaccagattgtgtgacccttatcgttgtattatgggcttgcctgacccaatggaagttgactttcctctgctgctgctgctgtgctcagtgtggatgacattgtgttgcctcagatcaacgtccgctggtccgccctcagttgtcaaatctttggcatttccagatgaaggcaatgttaggacatacgtggctctttttgcaggtatatacatgtcaatatcttggactactaaaataaacagaattgctaaagacaatgatgttgataaacacaacactactatacgttacgtatagaattaatattctttatcatattatttttatgatcttgtttttgcccacttaatacagccctacatacattgaactattagtacacggaaaaaactatgcgcacatgcttctatccgccatctttttccattcattttatatgtgtatttttatattaacatgtgcataatatttatgcacaatttaag

SEQ ID NO: 50664 - DNA, 810 bp, Zea Mays
agtcggatcgcagaggtatcctgccctgcagttcctcctcggcggaaaccaagaccctagctctcgtcgtcgtcggcgtcggcggcggcgaccgtggcggatccgacagccagccctcgtcgcagccgggccgccattgccgtcgtccagctcccaagacggcgtacctccttatgttctccagatccggaaccgtgcggatggtgttcggggttcggcgaccggaaagaaaaacgttttggcccgggtatacagcgtcttttgttactctttcctcccatattatggttcgtttatttgaccctgcagctggactgtgaggagcctatatattctatattttcccccatcatgcagtcttgacataaggttggagagttggaatgactactcaagacgtcggttagcaatggactgttcggttagcactggattaaaaaggattgaaggaaattaaattactaacaaaataaatttcttgttagtaaaaaataattagaagaggatttaatcacttaccttaatcctcttcgatctaagaatttactgtccatgatcttcacgcgatgcttgtgttgatgccctcagtctcagctacgtacttcccttattctttgaccaagcctactgaggagaggaaagagcatgatcgcaagagcccggtgacagcattggaggtctatcccagcaaaaaaacagaccaccgatctttttgataagaaacctcatcgctgatttacggccagcgtgtctgcatcggctcgatgccttcggtgggaggatgactccaatccatcaaaaaagaacgac

SEQ ID NO: 50665 - DNA, 912 bp, Zea Mays
agtcggatcgcagaggtatcctgccctgcagttcctcctcggcggaaaccaagaccctagctctcgtcgtcgtcggcgtcggcggcggcgaccgtggcggatccgacagccagccctcgtcgcagccgggccgccattgccgtcgtccagctcccaagacggcgtacctccttatgttctccagatccggaaccgtgcggatggtgttcggggttcggcgaccggaaagaaaaacgttttggcccggtctcagctacgtacttcccttattctttgaccaagcctactgaggagaggaaagagcatgatcgcaagagcccggtgacagcattggaggtctatcccagcaaaaaaacagaccaccgatctttttgataagaaacctcatcgctgatttacggccagcgtgtctgcatcggctcgatgtgcgcgtgaagtttctatcatcattggaagaccatcatcggtgttgaggtcaactgcaagcgtgccaatcaatctcaccatgccacacgagccgaggccaccaaccacgagccctgctgttgcggcatggattgctgtgtggattgcaacgtctttggtgaggtcattcgttgtgatgtgcctggcggcatgaacatctcagaggtggatctatggaaagaggagattggaaggctacgcttgaaagagagacgaaaggttgcgctgtgggatagacgaaaggttgtgcctgcgctacatttgggaactggaggaaaagtgaaaagaatgatgcattttctttgtgtaatcggtggtcatggtagttgtgctgcctcacccaaacctgttggtccaggattcgtcaaggacagggacagggtgccggtgccgatctgcaagataggaggaggatttaaaggttgttctaggtccttgcaggattaa

SEQ ID NO: 50666 - DNA, 1143 bp, Zea Mays
agtcggatcgcagaggtatcctgccctgcagttcctcctcggcggaaaccaagaccctagctctcgtcgtcgtcggcgtcggcggcggcgaccgtggcggatccgacagccagccctcgtcgcagccgggccgccattgccgtcgtccagctcccaagacggcgtacctccttatgttctccagatccggaaccgtgcggatggtgttcggggttcggcgaccggaaagaaaaacgttttggcccggtcttgacataaggttggagagttggaatgactactcaagacgtcggttagcaatggactgttcggttagcactggattaaaaaggattgaaggaaattaaattactaacaaaataaatttcttgttagtaaaaaataattagaagaggatttaatcacttaccttaatcctcttcgatctaagaatttactgtccatgatcttcacgcgatgcttgtgttgatgccctcagtctcagctacgtacttcccttattctttgaccaagcctactgaggagaggaaagagcatgatcgcaagagcccggtgacagcattggaggtctatcccagcaaaaaaacagaccaccgatctttttgataagaaacctcatcgctgatttacggccagcgtgtctgcatcggctcgatgtgcgcgtgaagtttctatcatcattggaagaccatcatcggtgttgaggtcaactgcaagcgtgccaatcaatctcaccatgccacacgagccgaggccaccaaccacgagccctgctgttgcggcatggattgctgtgtggattgcaacgtctttggtgaggtcattcgttgtgatgtgcctggcggcatgaacatctcagaggtggatctatggaaagaggagattggaaggctacgcttgaaagagagacgaaaggttgcgctgtgggatagacgaaaggttgtgcctgcgctacatttgggaactggaggaaaagtgaaaagaatgatgcattttctttgtgtaatcggtggtcatggtagttgtgctgcctcacccaaacctgttggtccaggattcgtcaaggacagggacagggtgccggtgccgatctgcaagataggaggaggatttaaaggttgttctaggtccttgcaggattaa

SEQ ID NO: 50667 - DNA, 1148 bp, Zea Mays
agtcggatcgcagaggtatcctgccctgcagttcctcctcggcggaaaccaagaccctagctctcgtcgtcgtcggcgtcggcggcggcgaccgtggcggatccgacagccagccctcgtcgcagccgggccgccattgccgtcgtccagctcccaagacggcgtacctccttatgttctccagatccggaaccgtgcggatggtgttcggggttcggcgaccggaaagaaaaacgttttggcccggtcttgacataaggttggagagttggaatgactactcaagacgtcggttagcaatggactgttcggttagcactggattaaaaaggattgaaggaaattaaattactaacaaaataaatttcttgttagtaaaaaataattagaagaggatttaatcacttaccttaatcctcttcgatctaagaatttactgtccatgatcttcacgcgatgcttgtgttgatgccctcagtctcagctacgtacttcccttattctttgaccaagcctactgaggagaggaaagagcatgatcgcaagagcccggtgacagcattggaggtctatcccagcaaaaaaacagaccaccgatctttttgataagaaacctcatcgctgatttacggccagcgtgtctgcatcggctcgatgaaaagtgcgcgtgaagtttctatcatcattggaagaccatcatcggtgttgaggtcaactgcaagcgtgccaatcaatctcaccatgccacacgagccgaggccaccaaccacgagccctgctgttgcggcatggattgctgtgtggattgcaacgtctttggtgaggtcattcgttgtgatgtgcctggcggcatgaacatctcagaggtggatctatggaaagaggagattggaaggctacgcttgaaagagagacgaaaggttgcgctgtgggatagacgaaaggttgtgcctgcgctacatttgggaactggaggaaaagtgaaaagaatgatgcattttctttgtgtaatcggtggtcatggtagttgtgctgcctcacccaaacctgttggtccaggattcgtcaaggacagggacagggtgccggtgccgatctgcaagataggaggaggatttaaaggttgttctaggtccttgcaggattaa

SEQ ID NO: 50668 - DNA, 917 bp, Zea Mays
agtcggatcgcagaggtatcctgccctgcagttcctcctcggcggaaaccaagaccctagctctcgtcgtcgtcggcgtcggcggcggcgaccgtggcggatccgacagccagccctcgtcgcagccgggccgccattgccgtcgtccagctcccaagacggcgtacctccttatgttctccagatccggaaccgtgcggatggtgttcggggttcggcgaccggaaagaaaaacgttttggcccggtctcagctacgtacttcccttattctttgaccaagcctactgaggagaggaaagagcatgatcgcaagagcccggtgacagcattggaggtctatcccagcaaaaaaacagaccaccgatctttttgataagaaacctcatcgctgatttacggccagcgtgtctgcatcggctcgatgaaaagtgcgcgtgaagtttctatcatcattggaagaccatcatcggtgttgaggtcaactgcaagcgtgccaatcaatctcaccatgccacacgagccgaggccaccaaccacgagccctgctgttgcggcatggattgctgtgtggattgcaacgtctttggtgaggtcattcgttgtgatgtgcctggcggcatgaacatctcagaggtggatctatggaaagaggagattggaaggctacgcttgaaagagagacgaaaggttgcgctgtgggatagacgaaaggttgtgcctgcgctacatttgggaactggaggaaaagtgaaaagaatgatgcattttctttgtgtaatcggtggtcatggtagttgtgctgcctcacccaaacctgttggtccaggattcgtcaaggacagggacagggtgccggtgccgatctgcaagataggaggaggatttaaaggttgttctaggtccttgcaggattaa

SEQ ID NO: 50669 - DNA, 2410 bp, Zea Mays
cccggaacgcgcggccgttcactcaagctctcgaataaaatttcccggttttccggtccggatcccaaatccagaaatcctacgactcgctcgtcctctcgtctcctccgatccgttccgttcgcgagccaccgatcccgccaacgggagcgaacgagaacgatcgcgtcgtcgtcgtcgcagccgccgccatggatccgacgccgcagtcacacccgatccttgcctacgtgctctcccgcctcccctcgctgcccgcggtgaggacgccgaggtccccgcgcgagcgggacctcgagcagccgtccccgcgcacgccgtcgggtgccgcggagatcgacttggtggggcgcatgccaggcctgcgccacccgtccgtgctgtctgccatgacccgcgccgtcgccgacgtctcctcggcgcgcgacgcgatccgcctcctggggccccggcccgaccacgagcaagtcgacgcctcccgcgaacttctccgcttggccgatgctgggaagaaggcagacgccaacgcggacgtgaagacgaaggatctcgacgaggagaagctggccaagtgccgggaggtggtgcggctggaggaggaccacgaggcgtacggcgccctgctgcgcgacgcggaggggaagctggagcacgtgtaccagatggcgatgcacgggagggacatcaagaaggtgggcggcggtgatggcaaaggggaagagggttccggggcggtggacgaggaggtggtgcgggtgctcaaggacgcgggggaagggaaggtggtggagcgggtgaacctcgccgatcggcagatgcgcctactgccggagcccattggccggatccgcggcctcctcgcgctcgacgtctcccgcaaccagctcaaggttagggactcgtacctaagcattcgcgccgtctccctacatcatgcattgtgacgtccacgaattttctgaatgagttgttgggattggtcgaatggcagtattttgtagtgatcatatcgaagttcattctcccttgcacattgcacaaagtgctttgaaattaaagtggttttctgtggaattaaagtggttttatgaaattcttaaaccgattcacatgaaaaggtctgtacaatttcggttaaattttcgcgttcaaacggatctaaattaaactacacatgtggcgctgtggcagttcagttcacgggcgaattccctgtttggcgccttcaacagtgatgttccttgcttgaattcgcaggtgattcccgacgcgattggtgggctcgaacacctagaagaactccgcctcgcttccaacgacttggtttctcttccagactccattggccttctctccaacctcaagatcctcgacgtctccggcaacaggctgagggttctgcccgacaccatctcgaaatgcagatcgctggtggagctggacgcgagctacaacgccctggcttacctcccgacaggcatcgggcacgagctggtggacctgcagatactgcgcgtgcacctcaacaagctgcgctccctaccgtcgtcggtctgcgagatgcgatcgctgcgcctcctggacgcacacttcaacgagctccacggcctaccggccgccatcggacagctgtccgcgctggagacgctggacctgagcagcaacttcagcgacatgcgggacctgccgccatcgttcggcgacctagctggcctgcgcgagctggacctgagcaacaaccagatccgtgcgctgccggactgtttcggccggcttgccaagctggagagactccgcctggaccagaacccgctcgctgtgccaccccccgaggtggtcgccgacggcgtcgtcgcggtgaatgagtacatggcgaggcggtgggccgaggccgttgccgaagaggagcggcggcgtgcgaacgcggccgccgtggcggagagccccagggcgtccacgcccagggagtggctgacgcggagcgtgtcgtcgctgagcacctgggtgtcggacgtgacggtgaaggttgtcgggcaggagaaggtggacgatgaggacgagttcctgcagcaacagttctgaacgtgagctggcaccaccatcgcccgaccattaccattcaaataacagcagattgtttatttgtgaggatgataagacattatttaattgcttttcaaatttcattgcttaccagtttaccactttaccagttgagtgaccgtgtgtaaagatctatgacatattattttttatatttatacttgctgtaattttcttattatgacattttttatatttgttataatttccttcagcctgtttgtatgtgctatctatagccgcaacaggcaaagaaacaataagaatttgttgcttcgtggctaactgcgccacactttgtttaatg

SEQ ID NO: 50670 - DNA, 2221 bp, Zea Mays
cattgacctagtacacgtacacgcagatccatcgctcctactccccttccctatcgtatcgcgtcgtcctcgtcgccgccctacgccccaactaccttggtggctagggttcccaaccaacgcgcctccatcctgcacctacctagatcacctcctccacttgaagcattcgtgccggcgtgtggaaggacgccacgaaggcgactcgggggatagcggcctatgcggctcggtacagtcttcccatccccaacaaccagcttagaggttcggttcgagcagagatcgccgaagcgaagacctagagtcgaagcggcccaaatcgccgcttggcagattcatcttggtggaggatggactcaggattcgtcagggccagaggaggatgccagcaccagatccagcaagacctaactcagaggaagcagcgatcaagcgtagccgtcagatagacaatgacaaggacgagtccatgtcttcgcctactcccccgctggacgtaggtgctggcgcgctgtgggtggaggtgctacaggagtgcctgagttcaataattccaataaggatctcaagacctacagttagggaatgctatttgacaatgtaagtaacaattggttattttagttgtaggtgtccatcctgcgacctctggtttggtctgggatggagcacccatatgtatttgatagattcaactatggtgtgtgatttaaattgggtctttgagttgttttaataacaacctaaaatctttcagtttgtgaactgtaataaaatgtaacctgggcctgatgccatgtctctgtttgtctacatagtgtatggcgatgatgacaaagccaagacttgtttcttgacatttgcagtagccacccaagagctttctccctgctaggtttgagagctagtcctactaattccttcatgggatgtctgagccatacatatttctgtttttttagatttcaattgcaagtaatgttcaaatcagagcttgtttctctatattcgcagttgctgctgttgctattgttgtgtatcctgcaactagcagccctcaatctttatcacaggatatattcatcgtagtaatccagcaacactatttttatatagcaacttgtttgtctcttgccaaagaaagttattagtcaaagggagggtttactatgtgttgataatgggcatttggctgtgcgtcactattttcatatagttatctttgtagccaaagttttagacctactacatgtaccttttttgttgttcctacacttgaaagattaaatgtatgtttggttcgtgtctaactatgccacaatttgcttaaatgcctgtaatttttatttcctaaatatgtcttttcatgctaatttgaatacgctattacgcccaattactagatcacgcgtatgctccgctttgtaaacacgtagaccaccaatcctacattgttcttgttcttccttttgtgcttttacgatgatttgaattggtccttttcagaacaatgcacccccagtacctagtccactcttgagcagtatacgacagatacgtccagtacccccagatgatggacaaggtacaccatgacagtagaattttttacaccctcattatcttgttttaattcatcctttctacgctccaattattttggtgaatcttagcatagaacttgaccttctattattttgtatgtttggtttgcatgggatatatttatgaacattgatatcgtttttatgcttactcatatgggataatctgatcttctaactaaagagatttttcttttggtaatctgatcgtccaactcaagtttgcattcagtttagactttaggttatgttagccataacaagcttgaaaagacatattaacaaagaaagatcatattagcagttcatgttacgtttgcaggtatggacctcggtggttttctccacattaggaaagctggaagagccttttgaactcagtttttttgctaacagtggtgttatggtgaaacagagttttgtgtgtatgtaccaacaactaaaatgtaaacacgacattatcatagttgagtacaggaataattaccttagatcacttcttgttgtatcttacaccaatttacgaaatttcttgatgcgttttatgacaacctcgtgcgctgagagatacattcggtctatattcgttattatgaaaaagatggacgatttac

SEQ ID NO: 50671 - DNA, 1096 bp, Zea Mays
cattgacctagtacacgtacacgcagatccatcgctcctactccccttccctatcgtatcgcgtcgtcctcgtcgccgccctacgccccaactaccttggtggctagggttcccaaccaacgcgcctccatcctgcacctacctagatcacctcctccacttgaagcattcgtgccggcgtgtggaaggacgccacgaaggcgactcgggggatagcggcctatgcggctcggtacagtcttcccatccccaacaaccagcttagaggttcggttcgagcagagatcgccgaagcgaagacctagagtcgaagcggcccaaatcgccgcttggcagattcatcttggtggaggatggactcaggattcgtcagggccagaggaggatgccagcaccagatccagcaagacctaactcagaggaagcagcgatcaagcgtagccgtcagatagacaatgacaaggacgagtccatgtcttcgcctactcccccgctggacgtaggtgctggcgcgctgtgggtggaggtgctacaggagtgcctgaggtccgctgtcgacctgagcttcgcccaggtcgtcgctaccactgataatcggcctccagcccactgctttagctttagtctttacttttggcgatgagttgacgactaggcaactgccaccgcccaaggtcaggtgctcgagtatccgttgaccccttcgctagtccattccccgttgacagcaagcattagaacaatgcacccccagtacctagtccactcttgagcagtatacgacagatacgtccagtacccccagtatggacctcggtggttttctccacattaggaaagctggaagagccttttgaactcagtttttttgctaacagtggtgttatggtgaaacagagttttgtgtgtatgtaccaacaactaaaatgtaaacacgacattatcatagttgagtacaggaataattaccttagatcacttcttgttgtatcttacaccaatttacgaaatttcttgatgcgttttatgacaacctcgtgcgctgagagatacattcggtctatattcgttattatgaaaaagatggacgatttac

SEQ ID NO: 50672 - DNA, 2413 bp, Zea Mays
cattgacctagtacacgtacacgcagatccatcgctcctactccccttccctatcgtatcgcgtcgtcctcgtcgccgccctacgccccaactaccttggtggctagggttcccaaccaacgcgcctccatcctgcacctacctagatcacctcctccacttgaagcattcgtgccggcgtgtggaaggacgccacgaaggcgactcgggggatagcggcctatgcggctcggtacagtcttcccatccccaacaaccagcttagaggttcggttcgagcagagatcgccgaagcgaagacctagagtcgaagcggcccaaatcgccgcttggcagattcatcttggtggaggatggactcaggattcgtcagggccagaggaggatgccagcaccagatccagcaagacctaactcagaggaagcagcgatcaagcgtagccgtcagatagacaatgacaaggacgagtccatgtcttcgcctactcccccgctggacgtaggtgctggcgcgctgtgggtggaggtgctacaggagtgcctgaggtccgctgtcgacctgagcttcgcccaggtcgtcgctaccactgataatcggcctccagcccactgctttagctttagtctttacttttggcgatgagttgacgactaggcaactgccaccgcccaaggtcaggtgctcgagtatccgttgaccccttcgctagtccattccccgttgacagcaagcattagttcaataattccaataaggatctcaagacctacagttagggaatgctatttgacaatgtaagtaacaattggttattttagttgtaggtgtccatcctgcgacctctggtttggtctgggatggagcacccatatgtatttgatagattcaactatggtgtgtgatttaaattgggtctttgagttgttttaataacaacctaaaatctttcagtttgtgaactgtaataaaatgtaacctgggcctgatgccatgtctctgtttgtctacatagtgtatggcgatgatgacaaagccaagacttgtttcttgacatttgcagtagccacccaagagctttctccctgctaggtttgagagctagtcctactaattccttcatgggatgtctgagccatacatatttctgtttttttagatttcaattgcaagtaatgttcaaatcagagcttgtttctctatattcgcagttgctgctgttgctattgttgtgtatcctgcaactagcagccctcaatctttatcacaggatatattcatcgtagtaatccagcaacactatttttatatagcaacttgtttgtctcttgccaaagaaagttattagtcaaagggagggtttactatgtgttgataatgggcatttggctgtgcgtcactattttcatatagttatctttgtagccaaagttttagacctactacatgtaccttttttgttgttcctacacttgaaagattaaatgtatgtttggttcgtgtctaactatgccacaatttgcttaaatgcctgtaatttttatttcctaaatatgtcttttcatgctaatttgaatacgctattacgcccaattactagatcacgcgtatgctccgctttgtaaacacgtagaccaccaatcctacattgttcttgttcttccttttgtgcttttacgatgatttgaattggtccttttcagaacaatgcacccccagtacctagtccactcttgagcagtatacgacagatacgtccagtacccccagatgatggacaaggtacaccatgacagtagaattttttacaccctcattatcttgttttaattcatcctttctacgctccaattattttggtgaatcttagcatagaacttgaccttctattattttgtatgtttggtttgcatgggatatatttatgaacattgatatcgtttttatgcttactcatatgggataatctgatcttctaactaaagagatttttcttttggtaatctgatcgtccaactcaagtttgcattcagtttagactttaggttatgttagccataacaagcttgaaaagacatattaacaaagaaagatcatattagcagttcatgttacgtttgcaggtatggacctcggtggttttctccacattaggaaagctggaagagccttttgaactcagtttttttgctaacagtggtgttatggtgaaacagagttttgtgtgtatgtaccaacaactaaaatgtaaacacgacattatcatagttgagtacaggaataattaccttagatcacttcttgttgtatcttacaccaatttacgaaatttcttgatgcgttttatgacaacctcgtgcgctgagagatacattcggtctatattcgttattatgaaaaagatggacgatttac

SEQ ID NO: 50673 - DNA, 2364 bp, Zea Mays
cattgacctagtacacgtacacgcagatccatcgctcctactccccttccctatcgtatcgcgtcgtcctcgtcgccgccctacgccccaactaccttggtggctagggttcccaaccaacgcgcctccatcctgcacctacctagatcacctcctccacttgaagcattcgtgccggcgtgtggaaggacgccacgaaggcgactcgggggatagcggcctatgcggctcggtacagtcttcccatccccaacaaccagcttagaggttcggttcgagcagagatcgccgaagcgaagacctagagtcgaagcggcccaaatcgccgcttggcagattcatcttggtggaggatggactcaggattcgtcagggccagaggaggatgccagcaccagatccagcaagacctaactcagaggaagcagcgatcaagcgtagccgtcagatagacaatgacaaggacgagtccatgtcttcgcctactcccccgctggacgtaggtgctggcgcgctgtgggtggaggtgctacaggagtgcctgaggtccgctgtcgacctgagcttcgcccaggtcgtcgctaccactgataatcggcctccagcccactgctttagctttagtctttacttttggcgatgagttgacgactaggcaactgccaccgcccaaggtcaggtgctcgagtatccgttgaccccttcgctagtccattccccgttgacagcaagcattaggtatgccagcctcttgactagatttttaaaaataatattaccatttatatgcttaaataagtttactgcaaaaatatattttttgattcatctactgctatttgtttagggatcataaacattaagttttatatataaagttggacaaacttaaaatttgtgatctgcacgcaagccaatgatgattagatattacatctggaattaccttcagattcgtttatgacgaggcatatgcattatacatctcctgttttggttatgtactctctcagtttaatctgattatgtggacgtcgttgtagttcaataattccaataaggatctcaagacctacagttagggaatgctatttgacaatgtaagtaacaattggttattttagttgtaggtgtccatcctgcgacctctggtttggtctgggatggagcacccatatgtatttgatagattcaactatggtgtgtgatttaaattgggtctttgagttgttttaataacaacctaaaatctttcagtttgtgaactgtaataaaatgtaacctgggcctgatgccatgtctctgtttgtctacatagtgtatggcgatgatgacaaagccaagacttgtttcttgacatttgcagtagccacccaagagctttctccctgctaggtttgagagctagtcctactaattccttcatgggatgtctgagccatacatatttctgtttttttagatttcaattgcaagtaatgttcaaatcagagcttgtttctctatattcgcagttgctgctgttgctattgttgtgtatcctgcaactagcagccctcaatctttatcacaggatatattcatcgtagtaatccagcaacactatttttatatagcaacttgtttgtctcttgccaaagaaagttattagtcaaagggagggtttactatgtgttgataatgggcatttggctgtgcgtcactattttcatatagttatctttgtagccaaagttttagacctactacatgtaccttttttgttgttcctacacttgaaagattaaatgtatgtttggttcgtgtctaactatgccacaatttgcttaaatgcctgtaatttttatttcctaaatatgtcttttcatgctaatttgaatacgctattacgcccaattactagatcacgcgtatgctccgctttgtaaacacgtagaccaccaatcctacattgttcttgttcttccttttgtgcttttacgatgatttgaattggtccttttcagaacaatgcacccccagtacctagtccactcttgagcagtatacgacagatacgtccagtacccccagtatggacctcggtggttttctccacattaggaaagctggaagagccttttgaactcagtttttttgctaacagtggtgttatggtgaaacagagttttgtgtgtatgtaccaacaactaaaatgtaaacacgacattatcatagttgagtacaggaataattaccttagatcacttcttgttgtatcttacaccaatttacgaaatttcttgatgcgttttatgacaacctcgtgcgctgagagatacattcggtctatattcgttattatgaaaaagatggacgatttac

SEQ ID NO: 50674 - DNA, 1446 bp, Zea Mays
cattgacctagtacacgtacacgcagatccatcgctcctactccccttccctatcgtatcgcgtcgtcctcgtcgccgccctacgccccaactaccttggtggctagggttcccaaccaacgcgcctccatcctgcacctacctagatcacctcctccacttgaagcattcgtgccggcgtgtggaaggacgccacgaaggcgactcgggggatagcggcctatgcggctcggtacagtcttcccatccccaacaaccagcttagaggttcggttcgagcagagatcgccgaagcgaagacctagagtcgaagcggcccaaatcgccgcttggcagattcatcttggtggaggatggactcaggattcgtcagggccagaggaggatgccagcaccagatccagcaagacctaactcagaggaagcagcgatcaagcgtagccgtcagatagacaatgacaaggacgagtccatgtcttcgcctactcccccgctggacgtaggtgctggcgcgctgtgggtggaggtgctacaggagtgcctgagttcaataattccaataaggatctcaagacctacagttagggaatgctatttgacaataacaatgcacccccagtacctagtccactcttgagcagtatacgacagatacgtccagtacccccagtaagtatatgatcttttgttttttgatccactgcccaaatatccagaagacaattagattttgatgtctgcatattaaaattgccgatatcaaataaatcgtccattaaatcagttttctatgttttcaggatgatggacaaggtacaccatgacagtagaattttttacaccctcattatcttgttttaattcatcctttctacgctccaattattttggtgaatcttagcatagaacttgaccttctattattttgtatgtttggtttgcatgggatatatttatgaacattgatatcgtttttatgcttactcatatgggataatctgatcttctaactaaagagatttttcttttggtaatctgatcgtccaactcaagtttgcattcagtttagactttaggttatgttagccataacaagcttgaaaagacatattaacaaagaaagatcatattagcagttcatgttacgtttgcaggtatggacctcggtggttttctccacattaggaaagctggaagagccttttgaactcagtttttttgctaacagtggtgttatggtgaaacagagttttgtgtgtatgtaccaacaactaaaatgtaaacacgacattatcatagttgagtacaggaataattaccttagatcacttcttgttgtatcttacaccaatttacgaaatttcttgatgcgttttatgacaacctcgtgcgctgagagatacattcggtctatattcgttattatgaaaaagatggacgatttac

SEQ ID NO: 50675 - DNA, 1867 bp, Zea Mays
cattgacctagtacacgtacacgcagatccatcgctcctactccccttccctatcgtatcgcgtcgtcctcgtcgccgccctacgccccaactaccttggtggctagggttcccaaccaacgcgcctccatcctgcacctacctagatcacctcctccacttgaagcattcgtgccggcgtgtggaaggacgccacgaaggcgactcgggggatagcggcctatgcggctcggtacagtcttcccatccccaacaaccagcttagaggttcggttcgagcagagatcgccgaagcgaagacctagagtcgaagcggcccaaatcgccgcttggcagattcatcttggtggaggatggactcaggattcgtcagggccagaggaggatgccagcaccagatccagcaagacctaactcagaggaagcagcgatcaagcgtagccgtcagatagacaatgacaaggacgagtccatgtcttcgcctactcccccgctggacgtaggtgctggcgcgctgtgggtggaggtgctacaggagtgcctgagttcaataattccaataaggatctcaagacctacagttagggaatgctatttgacaatgtaagtaacaattggttattttagttgtaggtgtccatcctgcgacctctggtttggtctgggatggagcacccatatgtatttgatagattcaactatggtgtgtgatttaaattgggtctttgagttgttttaataacaacctaaaatctttcagtttgtgaactgtaataaaatgtaacctgggcctgatgccatgtctctgtttgtctacatagtgtatggcgatgatgacaaagccaagacttgtttcttgacatttgcagtagccacccaagagctttctccctgctaggtttgagagctagtcctactaattccttcatgggatgtctgagccatacatatttctgtttttttagatttcaattgcaagtaatgttcaaatcagagcttgtttctctatattcgcagttgctgctgttgctattgttgtgtatcctgcaactagcagccctcaatctttatcacaggatatattcatcgtagtaatccagcaacactatttttatatagcaacttgtttgtctcttgccaaagaaagttattagtcaaagggagggtttactatgtgttgataatgggcatttggctgtgcgtcactattttcatatagttatctttgtagccaaagttttagacctactacatgtaccttttttgttgttcctacacttgaaagattaaatgtatgtttggttcgtgtctaactatgccacaatttgcttaaatgcctgtaatttttatttcctaaatatgtcttttcatgctaatttgaatacgctattacgcccaattactagatcacgcgtatgctccgctttgtaaacacgtagaccaccaatcctacattgttcttgttcttccttttgtgcttttacgatgatttgaattggtccttttcagaacaatgcacccccagtacctagtccactcttgagcagtatacgacagatacgtccagtacccccagtatggacctcggtggttttctccacattaggaaagctggaagagccttttgaactcagtttttttgctaacagtggtgttatggtgaaacagagttttgtgtgtatgtaccaacaactaaaatgtaaacacgacattatcatagttgagtacaggaataattaccttagatcacttcttgttgtatcttacaccaatttacgaaatttcttgatgcgttttatgacaacctcgtgcgctgagagatacattcggtctatattcgttattatgaaaaagatggacgatttac

SEQ ID NO: 50676 - DNA, 2291 bp, Zea Mays
ctcccggacgcgcgagcgcgatcgtcccgccgtccaggtgaggtacaagacatgctcctaatgtgggcataaagcgtggtcaaagagaaataaactgtccaactcaaacccgtgtaaacattttctttcatttgtcgagtatcaccgttgaaaggtggagaagtaaaagttgtggcagtttctgtggaaccaccatcccctcatactaggcaaagcaagacagcggtcggaggaccaaatcagtgttcatacaaagaaatcattatgtctagaaaacgtgccttttccgaagaaattggaggcgctactgcattgaagagcctaccaactccaatcggtttatttgaagatgaatgcgttttttgtcattcatttagaacgagccagtttcacgggccgatggtatgttacctgaagggaagagttgtgtccattgacgagtgcgactcatcagatgccatctacgtccataggaaatgtctcgagtgaaattacacgtgcttcaaaactgagatgcgcaagatgtggactcaagggagcagcccttggttgttattacggtccttgcctcacaagttttcacgttccatgtgcagttcagacaattggttgccgctgggatggtgatggttatatgctgtgccctcagcatgtttcaaatgctctaccatgtgataagcagggcacagatacaaaggagaattacaatgcttcttctttgcatcaaagccaacatacagataagaaaggaagtttcgacgatcataatagggaaaatgaacaagctgatcagctcaacatctcaaacgcttccttgctgcctcagactcggagcgattgtcacgaagcagaattttgtaccaatttctcaagggatggtgaacaaacggatcagcttaactctagtccatacatagaaagggaacaagtttttgacagtcgtcgtcgaaggaaaaatggacaaacagatcatcttgacatttcgactccttgtgtgccacacaaccaacattctcatccaaaagaagaaatatccaccgatagttcgagagatcatcaccagcaaatagatcagcttcagacttcaagatcatccttgccactgggggcctgccaaggggaggagatggaatcagatcagcctgacgcatcaagctgccctgctgatgagttagttttgcttggtctgtgtttaagtgtggacgagaaggacttcgtgcaaaagtttgcgtgttggaccaaggcgacgctggcggaggagtgggccgagaatgtgacccatgtcattgtgggcaaaggtgctggtagttcgtggtgcaggtcatttgaggtgcttatggcaatactgctcgggaaatgggttgttcgtttcgaatgggtcgcggactgcttgcagctgactccaggtccagaggcctcctatgaagtactactactagcagcatccagcatcgattcactcggcgcgaacgacgggccgaagcagagcagaatccgggcaactgaagggttgcaggaaccgaaactgttttctgggctgtgtttctgcctgagcgacctgatgagccctggcaacagaggccgcacgcggggcctcatagcggccggcggcgggcgggtgctggacaaacgcgacctgcgccttctgccgaagaaggatccggatcctgacggccgccgctctccgtctccggtgaacccgaggccctacttcgtgtacgacgtcgaagcgcccggaggtggtcggttcagcgcgaggctgctgcggcgggagatcgacgaggcgagggagcaggcggcggccggggcgcaggtgatcggccacctcagcgtgttcgacgccgtcgcggcctatgacgcggggatcctgctcgtgtgagcgatgcgggcattgggccggggatgtgtctggagcttggacttgcatgggccgattgttgggccgccagcacgttgggcctcgacgtcgctggagctaattattttggacggatatatctgacacctagaactaccaagcatgttcggttagctctcaattcatgtagattaaatggaattagaaaaaattaagaagtttggtttgtttaggatttaaccgaacaaagtctaacgtaacttgtggtggtagtgtgttattatttatgatgatgatatagatgagagaatttagaatatgggatatacagtttgaaagctggctggaaccaagaagaaacgggaaagcaacttgcaatgatggccacttgggctggtaatataagcatcattacaggtgctacgctaatgct

SEQ ID NO: 50677 - DNA, 419 bp, Zea Mays
gcgcccgcatcctgaggaacctgttgcattcgctccacgtcaaggaggttccaggaaccaagcaggtagcgtgctctcacctctcagtcactgtatatggctaaatgttatcatgagatttaagagaaaaaaaacttcgcagttcacaagtgattactcaatgcagctcaatgcttctagaattaaagtccttcaagctcaggatgatttggtaacagatatgttgaagtcagcaagcaaagagctactgcgcataagtagagatcacctcacttacaagaagcttctcaagacacttattgttcagagtttgctgcgcctgaaagaaccagctgtgcttctgcgctgcaggaaggaggatctccaacttgttgatttagttttggagtctgcaaggaatgagtatgcaaataaagcaa

SEQ ID NO: 50678 - DNA, 516 bp, Zea Mays
gcgcccgcatcctgaggaacctgttgcattcgctccacgtcaaggaggttccaggaaccaagcaggtagcgtgctctcacctctcagtcactgtatatggctaaatgttatcatgagatttaagagaaaaaaaacttcgcagttcacaaggtcacagaagccaattgcgtcatcatcatctgatttcatcacaaggcttgaccacggtggaatccagctagcaagttattggcatcaagaagaaaattgattactcaatgcagctcaatgcttctagaattaaagtccttcaagctcaggatgatttggtaacagatatgttgaagtcagcaagcaaagagctactgcgcataagtagagatcacctcacttacaagaagcttctcaagacacttattgttcagagtttgctgcgcctgaaagaaccagctgtgcttctgcgctgcaggaaggaggatctccaacttgttgatttagttttggagtctgcaaggaatgagtatgcaaataaagcaa

SEQ ID NO: 50679 - DNA, 280 bp, Zea Mays
gatatttccccactttagcatatgccgctcaatgcttctagaattaaagtccttcaagctcaggatgatttggtaacagatatgttgaagtcagcaagcaaagagctactgcgcataagtagagatcacctcacttacaagaagcttctcaagacacttattgttcagagtttgctgcgcctgaaagaaccagctgtgcttctgcgctgcaggaaggaggatctccaacttgttgatttagttttggagtctgcaaggaatgagtatgcaaataaagcaa

SEQ ID NO: 50680 - DNA, 2388 bp, Zea Mays
  misc_feature (2387)..(2388): n is a, c, g, or t
cacatatctgagctgagtcgagccaacgagctgcagcccagcagaacgcggaaacctggcggcctgttcttccccttgccctctcgaatctcgagttctgtccctgcccctggcatcctcgctaccgcggccttcctccccctccctccccctcccctgatcgcatccaccctgaaaccctagcggcctagcccccggtcatggcgcggcggtcgacccctctcctacgccgcctcctcgccccatcgccttccccctccgcctccactcccctcgccggcgccgtgtcccgccgcaccgtcacctacatgcctcgcccgggggacggcgccccgcgcggcgtcactctcatcccgggcgacggcatcgggcccctcgtcacgggcgccgtgcggcaggtgatggaggcgatgcacgcgccggtctacttcgagacatacgaggtccgcggcgacatgcccacggtccccgccgaggtcatcgagtccatccgccgcaacaaggtctgcctcaagggcggcctcgccacccccgtcggcggcggtgtctcctccctcaacatgcagctccggaaggagctcgacctctacgccgcgctcgtcaactgcttcaacctccctggtctgcctaccaggcacgacaacgtggacatcgtcgtcattcgggagaacactgagggcgagtactcagggctcgagcatgaggtagttcctggcgtagtcgagagtctcaaggtatggaaaattccatgtattgctctacctttgttgatgtaatgtgtgacacgctggcagctgatacgtgcatatggccagatgtgctaagcttatagatactgtgagtctgtgacaccgttactgattctactgctctagttactggtagaattatacacacccagtctccagatgagctggcgaacacatgcatgatgatagaattatatcaggaagttgaatctgcaatcttgtattgtatatatatatatttttgtaacaccccgtccaatccctggaccggcggtacttactcctggcagctctctaggatgatatattgtccccacagaccaacacgagtcttttgtgcgcactttgtcctcactcatgcgcacccgagaaaacttcccggtcggtcacccatcccaaattgctctaagccaagcacgcttaacttggaggttctttctagataggcttccgaaaaagaagatgcaccttgttggtatgattacactattaattctattaagccttggaccaggacatcccatcccaggggctaggatatcacaatccaccccccttagaagaccgacgtcctcgtcggtcaaccccaatccaggaacctcccctcttggccacgtctgtatgtctagtgccgtcatatgccatgccatgtgaccactccgggcccacatgcgccatgcgccatatacccgaaccccctagcccacacacgcccgtgaaaccgcgagggtcggttctgataccacttgtaacaccccgtccaatccctggaccggcggtacttactcctggcagctctctaggatgatatattgtccccacagaccaacacgagtcttttgtgcgcactttgtcctcactcatgcgcacccgagaaaactttccggtcggtcacccatcccaaattgctccaagccaagcatgcttaacttggaggttctttctagataggcttccgaaaaagaagatgcaccttgttggtatgattacactattaattctattaagccttgggccaggacatcccatcccaggggctaggatatcacaatttttcagaaaatcattttgcaatctttttgggtggcccttatatgatagatacaatggtaggtcgacatgcttactatacttatttagtgtttctgattggtatattgatggtttaatcttgaaatatactgactggtgcatgttagtatcagcttgtggacattcagttgagaaatgaatgcatttctgcatttttgtatggaaaagcctgatgcatttttggcagtttattatatttatgtgtccagcaagctgatctacttctgtgaatgtgaggctgtgatatcggcgccattggataattcatacaacatttcgtagtgacttgcttaagtgtagccccaaattaagtgagacggacttaatttattaggtgttttataaagctattggatgattgtgaatggtgtatgttatcctgtcattcttgatagtatgtaaacagatatattttgctcaaagaatattaaatatttattgctaatctttgattaatctgtacatacagaattatttgtattgaagattatgtagtcacgttactatagtaacaatagtatttgtgttcatttgtaactatcattnn

SEQ ID NO: 50681 - DNA, 2532 bp, Zea Mays
caccttcaaaggtcctcaaacattgttgcatcggacgtcgtgtatgtatcactgtttcaggttatggcagtgcatatgtcaaatatcagaacacaatggtgacttgctctcgcgtaaaggctcctgagagcgagcgatcaacgagtcgtcctgctgtcgctgctcgctcgagggaaagaagatcacacagatgtaaaatgagagctcgaaaagaagccgacgtctagcagtgaaagaagcagtagccactcccaccattctccttacgttattccgtatttctctttgtttatgatcgttcacacaaatacttactatatatatatatacacaattcgtataacaaataacattgacacagtctaattctctgaaatcactccattctacacactatcatttactccatgtgcacaattcatatgtaacagataatattagtacgatgagattgaagaaaattacaacaacatattgttccataacagattgtaacataaattattcttatcataaatgataacattcgttgttattaaatctaaactatcttctgcactatgttaaaattcgattgcccaacaaaatctattgcttccttttctagctatccatctttcgatacatataactaatagacacagttatagataatactacttcacactttcatttacatttaacaattaccattatcttcttgccagttctttatgaataatttttacatatacaacatgatgcaatacttgacgacaagggaaaaggttcaacaactacaattgattctccacccaaaatgttatactctgctacacaatatcttacatgtattttttctatctattataaaagcatcattccatttttctttggtaattattgctactacagaagtgaatttatccaaaactatatttctttcacacataatttttcctcatatttaacttatccaaaatttaataccacatattcatgcaaatagaaaatagatattaattgtggtaaccatttatgccgaacactttcatccctttctcttctacttccataaacgaagaaattaaaattctctgtttcccaactatacagattcaaacatggacccctgcacatcaaagaaaattcggacactagatcttccaagaattgaagattttctaagattatcaacagccttttaggttgtagaatgtcctctatataattatatataactgctcaactcttctgaagacatttcatgtaaatataacaagatagcttcaaatatcgcaacatatatatatatattacattctaccacaactcacttaactctattttattttatataaatctgatgtgctctataccgtctttcatgctctgtatcatcttaaaaaaactcactcgctttattcgtctggtaatatataaattacaacaagcattaaaaattaacttaaaaacaatattgcatactagtctatctatatacgctatctgttggagatgagctaagaagtgctaaccttcagaattcagatacaagagattctctatacagcccggcgcccaggcaaaattggctatcaggctgacaagtttgtattcgtcccagcccggcccatccatccagccaccatccgctgctgcctgctactacttatcacacaaaccctaatgaacctagcgccgcttcctccctcccaaacccatggcttcccaccttgacttccgctgcctggatgagggcctcggcggcgaacgcggcaagcgcaagcgccgcgaggatgcctcggcggcggccgcggactccatggacctcgatgctgacgccccccggccgtctaagctccgcgccatgccttccctctccgacccctcgaagccggcctccttcggccagcccacctacgacggcgtcatcgcagggcggttgtcggggcgccggtggaaggagccccgcacccggcggtcgtcggccgtggcggtgtcgcggaagccgatcccgctggaacagcgcgtccgggagaagtctctgaagcgcgcgtaccaggcccgcaaggcggagctcaaggaggagatccggcagaacaaggttgcgaagcggaaggcccgcgaggagcgggagaagcggaagcaggagaacgtgctccgcacgggcaccaagctgcagcgggtcaccaacccgaagacgatccagaagatcgccaagtccaagaagcgcaagcagctcaaggtcgtccccgacgagttcttcggcggcaagaagtcggaggccagccggcgcatgcaggtgcctggacttgagaattgaatctcaattctcaatctctgtttctggggtcgcgttgagttcatagtggttaattcgacgacgattttctacttgcttatggtagtttgaagtatgatcagattaagtgattacaatggtacgcaagttatcaagttctgatatgagatttttactgccgtgtacccaattttgcttgtattccgggctctccatataaagttttctatgcatctattattcagttg

SEQ ID NO: 50682 - DNA, 1244 bp, Zea Mays
caaaggtcctcaaacattgttgcatcggacgtcgtgtatgtatcactgtttcaggttatggcagtgcatatgtcaaatatcagaacacaatggtgacttgctctcgcgtaaaggctcctgagagcgagcgatcaacgagtcgtcctgctgtcgctgctcgctcgagggaaagaagatcacacagatgtaaaatgagagctcgaaaagaagccgacgtctagcagtgaaagaagcaaattcagatacaagagattctctatacagcccggcgcccaggcaaaattggctatcaggctgacaagtttgtattcgtcccagcccggcccatccatccagccaccatccgctgctgcctgctactacttatcacacaaaccctaatgaacctagcgccgcttcctccctcccaaacccatggcttcccaccttgacttccgctgcctggatgagggcctcggcggcgaacgcggcaagcgcaagcgccgcgaggatgcctcggcggcggccgcggactccatggacctcgatgctgacgccccccggccgtctaagctccgcgccatgccttccctctccgacccctcgaagccggcctccttcggccagcccacctacgacggcgtcatcgcagggcggttgtcggggcgccggtggaaggagccccgcacccggcggtcgtcggccgtggcggtgtcgcggaagccgatcccgctggaacagcgcgtccgggagaagtctctgaagcgcgcgtaccaggcccgcaaggcggagctcaaggaggagatccggcagaacaaggttgcgaagcggaaggcccgcgaggagcgggagaagcggaagcaggagaacgtgctccgcacgggcaccaagctgcagcgggtcaccaacccgaagacgatccagaagatcgccaagtccaagaagcgcaagcagctcaaggtcgtccccgacgagttcttcggcggcaagaagtcggaggccagccggcgcatgcaggtgcctggacttgagaattgaatctcaattctcaatctctgtttctggggtcgcgttgagttcatagtggttaattcgacgacgattttctacttgcttatggtagtttgaagtatgatcagattaagtgattacaatggtacgcaagttatcaagttctgatatgagatttttactgccgtgtacccaattttgcttgtattccgggctctccatataaagttttctatgcatctattattcagttg

SEQ ID NO: 50683 - DNA, 1757 bp, Zea Mays
aaacattgttgcatcggacgtcgtgtatgtatcactggtaagagtacttttgaaattctagatgctattagttttctgtaagccattttatgcttcctaagtatgatctatatctagccttttgattcctctttgggatccttttttccttcagcaatgtgctttcatgttccttaaaattggttttctggttttgaagactatgtatagtttcatacaaataaatacctattatgctttagatagttttagctaagagttcctccataactgtgcattcaaacattaagaagaacatttttgtatgtcacattttaaactatcatacactactttagtttactctttattctaatacatactaccaaatctaccaactatgaaccaacaatagctaaaagtaagagaaaaaggaatgtacgaatacctcacctccgtcccctaaaagggcctcctctcaaacggcctggcatctccagcgagggcgacagtgacgccggagaccagtagtcgtgcgtcctcaaacctcgtgcgttgcgttcgcctccacaacatctgcagtttcaggttatggcagtgcatatgtcaaatatcagaacacaatggtgacttgctctcgcgtaaaggctcctgagagcgagcgatcaacgagtcgtcctgctgtcgctgctcgctcgagggaaagaagatcacacagatgtaaaatgagagctcgaaaagaagccgacgtctagcagtgaaagaagcaaattcagatacaagagattctctatacagcccggcgcccaggcaaaattggctatcaggctgacaagtttgtattcgtcccagcccggcccatccatccagccaccatccgctgctgcctgctactacttatcacacaaaccctaatgaacctagcgccgcttcctccctcccaaacccatggcttcccaccttgacttccgctgcctggatgagggcctcggcggcgaacgcggcaagcgcaagcgccgcgaggatgcctcggcggcggccgcggactccatggacctcgatgctgacgccccccggccgtctaagctccgcgccatgccttccctctccgacccctcgaagccggcctccttcggccagcccacctacgacggcgtcatcgcagggcggttgtcggggcgccggtggaaggagccccgcacccggcggtcgtcggccgtggcggtgtcgcggaagccgatcccgctggaacagcgcgtccgggagaagtctctgaagcgcgcgtaccaggcccgcaaggcggagctcaaggaggagatccggcagaacaaggttgcgaagcggaaggcccgcgaggagcgggagaagcggaagcaggagaacgtgctccgcacgggcaccaagctgcagcgggtcaccaacccgaagacgatccagaagatcgccaagtccaagaagcgcaagcagctcaaggtcgtccccgacgagttcttcggcggcaagaagtcggaggccagccggcgcatgcaggtgcctggacttgagaattgaatctcaattctcaatctctgtttctggggtcgcgttgagttcatagtggttaattcgacgacgattttctacttgcttatggtagtttgaagtatgatcagattaagtgattacaatggtacgcaagttatcaagttctgatatgagatttttactgccgtgtacccaattttgcttgtattccgggctctccatataaagttttctatgcatctattattcagttg

SEQ ID NO: 50684 - DNA, 3039 bp, Zea Mays
aaacattgttgcatcggacgtcgtgtatgtatcactggtaagagtacttttgaaattctagatgctattagttttctgtaagccattttatgcttcctaagtatgatctatatctagccttttgattcctctttgggatccttttttccttcagcaatgtgctttcatgttccttaaaattggttttctggttttgaagactatgtatagtttcatacaaataaatacctattatgctttagatagttttagctaagagttcctccataactgtgcattcaaacattaagaagaacatttttgtatgtcacattttaaactatcatacactactttagtttactctttattctaatacatactaccaaatctaccaactatgaaccaacaatagctaaaagtaagagaaaaaggaatgtacgaatacctcacctccgtcccctaaaagggcctcctctcaaacggcctggcatctccagcgagggcgacagtgacgccggagaccagtagtcgtgcgtcctcaaacctcgtgcgttgcgttcgcctccacaacatctgcagtttcaggttatggcagtgcatatgtcaaatatcagaacacaatggtgacttgctctcgcgtaaaggctcctgagagcgagcgatcaacgagtcgtcctgctgtcgctgctcgctcgagggaaagaagatcacacagatgtaaaatgagagctcgaaaagaagccgacgtctagcagtgaaagaagcagtagccactcccaccattctccttacgttattccgtatttctctttgtttatgatcgttcacacaaatacttactatatatatatatacacaattcgtataacaaataacattgacacagtctaattctctgaaatcactccattctacacactatcatttactccatgtgcacaattcatatgtaacagataatattagtacgatgagattgaagaaaattacaacaacatattgttccataacagattgtaacataaattattcttatcataaatgataacattcgttgttattaaatctaaactatcttctgcactatgttaaaattcgattgcccaacaaaatctattgcttccttttctagctatccatctttcgatacatataactaatagacacagttatagataatactacttcacactttcatttacatttaacaattaccattatcttcttgccagttctttatgaataatttttacatatacaacatgatgcaatacttgacgacaagggaaaaggttcaacaactacaattgattctccacccaaaatgttatactctgctacacaatatcttacatgtattttttctatctattataaaagcatcattccatttttctttggtaattattgctactacagaagtgaatttatccaaaactatatttctttcacacataatttttcctcatatttaacttatccaaaatttaataccacatattcatgcaaatagaaaatagatattaattgtggtaaccatttatgccgaacactttcatccctttctcttctacttccataaacgaagaaattaaaattctctgtttcccaactatacagattcaaacatggacccctgcacatcaaagaaaattcggacactagatcttccaagaattgaagattttctaagattatcaacagccttttaggttgtagaatgtcctctatataattatatataactgctcaactcttctgaagacatttcatgtaaatataacaagatagcttcaaatatcgcaacatatatatatatattacattctaccacaactcacttaactctattttattttatataaatctgatgtgctctataccgtctttcatgctctgtatcatcttaaaaaaactcactcgctttattcgtctggtaatatataaattacaacaagcattaaaaattaacttaaaaacaatattgcatactagtctatctatatacgctatctgttggagatgagctaagaagtgctaaccttcagaattcagatacaagagattctctatacagcccggcgcccaggcaaaattggctatcaggctgacaagtttgtattcgtcccagcccggcccatccatccagccaccatccgctgctgcctgctactacttatcacacaaaccctaatgaacctagcgccgcttcctccctcccaaacccatggcttcccaccttgacttccgctgcctggatgagggcctcggcggcgaacgcggcaagcgcaagcgccgcgaggatgcctcggcggcggccgcggactccatggacctcgatgctgacgccccccggccgtctaagctccgcgccatgccttccctctccgacccctcgaagccggcctccttcggccagcccacctacgacggcgtcatcgcagggcggttgtcggggcgccggtggaaggagccccgcacccggcggtcgtcggccgtggcggtgtcgcggaagccgatcccgctggaacagcgcgtccgggagaagtctctgaagcgcgcgtaccaggcccgcaaggcggagctcaaggaggagatccggcagaacaaggttgcgaagcggaaggcccgcgaggagcgggagaagcggaagcaggagaacgtgctccgcacgggcaccaagctgcagcgggtcaccaacccgaagacgatccagaagatcgccaagtccaagaagcgcaagcagctcaaggtcgtccccgacgagttcttcggcggcaagaagtcggaggccagccggcgcatgcaggtgcctggacttgagaattgaatctcaattctcaatctctgtttctggggtcgcgttgagttcatagtggttaattcgacgacgattttctacttgcttatggtagtttgaagtatgatcagattaagtgattacaatggtacgcaagttatcaagttctgatatgagatttttactgccgtgtacccaattttgcttgtattccgggctctccatataaagttttctatgcatctattattcagttg

SEQ ID NO: 50685 - DNA, 1232 bp, Zea Mays
gtcgtgcgtcctcaaacctcgtgcgttgcgttcgcctccacaacatctgcagtgcatatgtcaaatatcagaacacaatggtgacttgctctcgcgtaaaggctcctgagagcgagcgatcaacgagtcgtcctgctgtcgctgctcgctcgagggaaagaagatcacacagatgtaaaatgagagctcgaaaagaagccgacgtctagcagtgaaagaagcaaattcagatacaagagattctctatacagcccggcgcccaggcaaaattggctatcaggctgacaagtttgtattcgtcccagcccggcccatccatccagccaccatccgctgctgcctgctactacttatcacacaaaccctaatgaacctagcgccgcttcctccctcccaaacccatggcttcccaccttgacttccgctgcctggatgagggcctcggcggcgaacgcggcaagcgcaagcgccgcgaggatgcctcggcggcggccgcggactccatggacctcgatgctgacgccccccggccgtctaagctccgcgccatgccttccctctccgacccctcgaagccggcctccttcggccagcccacctacgacggcgtcatcgcagggcggttgtcggggcgccggtggaaggagccccgcacccggcggtcgtcggccgtggcggtgtcgcggaagccgatcccgctggaacagcgcgtccgggagaagtctctgaagcgcgcgtaccaggcccgcaaggcggagctcaaggaggagatccggcagaacaaggttgcgaagcggaaggcccgcgaggagcgggagaagcggaagcaggagaacgtgctccgcacgggcaccaagctgcagcgggtcaccaacccgaagacgatccagaagatcgccaagtccaagaagcgcaagcagctcaaggtcgtccccgacgagttcttcggcggcaagaagtcggaggccagccggcgcatgcaggtgcctggacttgagaattgaatctcaattctcaatctctgtttctggggtcgcgttgagttcatagtggttaattcgacgacgattttctacttgcttatggtagtttgaagtatgatcagattaagtgattacaatggtacgcaagttatcaagttctgatatgagatttttactgccgtgtacccaattttgcttgtattccgggctctccatataaagttttctatgcatctattattcagttg

SEQ ID NO: 50686 - DNA, 978 bp, Zea Mays
gtcgtgcgtcctcaaacctcgtgcgttgcgttcgcctccacaacatctgcagcccggcccatccatccagccaccatccgctgctgcctgctactacttatcacacaaaccctaatgaacctagcgccgcttcctccctcccaaacccatggcttcccaccttgacttccgctgcctggatgagggcctcggcggcgaacgcggcaagcgcaagcgccgcgaggatgcctcggcggcggccgcggactccatggacctcgatgctgacgccccccggccgtctaagctccgcgccatgccttccctctccgacccctcgaagccggcctccttcggccagcccacctacgacggcgtcatcgcagggcggttgtcggggcgccggtggaaggagccccgcacccggcggtcgtcggccgtggcggtgtcgcggaagccgatcccgctggaacagcgcgtccgggagaagtctctgaagcgcgcgtaccaggcccgcaaggcggagctcaaggaggagatccggcagaacaaggttgcgaagcggaaggcccgcgaggagcgggagaagcggaagcaggagaacgtgctccgcacgggcaccaagctgcagcgggtcaccaacccgaagacgatccagaagatcgccaagtccaagaagcgcaagcagctcaaggtcgtccccgacgagttcttcggcggcaagaagtcggaggccagccggcgcatgcaggtgcctggacttgagaattgaatctcaattctcaatctctgtttctggggtcgcgttgagttcatagtggttaattcgacgacgattttctacttgcttatggtagtttgaagtatgatcagattaagtgattacaatggtacgcaagttatcaagttctgatatgagatttttactgccgtgtacccaattttgcttgtattccgggctctccatataaagttttctatgcatctattattcagttg

SEQ ID NO: 50687 - DNA, 1604 bp, Zea Mays
ggcccgaggcgcccacccatcgagcggctggcgattgcgcccgccggcttatcccccgccctctcctctcgctgcgcttcccttctagataagcagcgcaaacccctactctctcgcctctccctatccatccccaaataatccccacctcccgctcatcctccgcctccgccgcccgccatggcctccctcacctcggcctccacctcactcctcttcccgcaggcctcctcatccaggagccgcgtccggctctccacctccctgggcttctccgcgcagccggcgcggctgcggagccgggcggcggcaggagggcagcggcgcgggagcctgctggtggtgcgcgcggcgaggggaaagttcgagcgcaccaagccgcacgtaaacatcggcaccatcggtcacgtcgaccacggcaagaccaccctcaccgccgcgctcaccatggtgctcgcctccgtcggcggcagcgcgcccaagaagtacgacgagatcgatgccgcccccgaggagcgtgcccgcggtatcaccatcaacaccgccaccgtcgagtacgagaccgagacccgccactacgcgcacgtcgactgccccggccacgccgactatgtcaagaacatgatcaccggcgctgcgcagatggacggcgccatcctcgtcgtctctggcgccgacggtcccatgccgcagaccaaagagcacattctcctcgccaagcaggtcggcgttcccaagatcgttgtcttcctcaacaagaaggacatggtcgacgacgaggagctgctcgagctcgtcgagctggaagtccgcgagctgctcagcaactatgagtacgacggcgacgaggtgccaatcgtcgctggctccgccctcaaggcgctcgaggccctcatgggcaaccctaccctgaagcgcggcgacgatgagtgggtggactgcatcttcaagctggttgattctgtggattcctacattccagtgccacagcggcagaccgacctcccgttcttactcgctgttgaagatgtcttctccatcaccggtcgtggtacagttgccactggccgtatcgagcgtggcaccgtcaagattggtgacacagtcgatatcgttggaatccgggacacccggaactgcaccgtgactggcgttgagatgttccagaagaccatggacgatgccatggctggagacaatgtcggactgctgctccgtggtatgcagaaggatgacattgagagaggcatggtgctggcaaagcccggctctatcacaccgcacaccaagtttgaggctgttgtgtatgtgcttaagaaggaagagggtggccggcactcacctttcttccctggttaccgcccgcagttctacatgaggacaaccgatgtgacagggaatgtgactgtgattatgaatgacaaagatgaggaggcgaagatgtgcatgcctggtgaccgtatcaagatggttgttcagctcatccagcctgttgcttgtgagcagggagagctgtgtcattccgttaagatagagagtaaaaagtagaacggttcaagagcagaggctaaagacgagtacaaaaacccactcacactcaaaac

SEQ ID NO: 50688 - DNA, 1875 bp, Zea Mays
ggcccgaggcgcccacccatcgagcggctggcgattgcgcccgccggcttatcccccgccctctcctctcgctgcgcttcccttctagataagcagcgcaaacccctactctctcgcctctccctatccatccccaaataatccccacctcccgctcatcctccgcctccgccgcccgccatggcctccctcacctcggcctccacctcactcctcttcccgcaggcctcctcatccaggagccgcgtccggctctccacctccctgggcttctccgcgcagccggcgcggctgcggagccgggcggcggcaggagggcagcggcgcgggagcctgctggtggtgcgcgcggcgaggggaaagttcgagcgcaccaagccgcacgtaaacatcggcaccatcggtcacgtcgaccacggcaagaccaccctcaccgccgcgctcaccatggtgctcgcctccgtcggcggcagcgcgcccaagaagtacgacgagatcgatgccgcccccgaggagcgtgcccgcggtatcaccatcaacaccgccaccgtcgagtacgagaccgagacccgccactacgcgcacgtcgactgccccggccacgccgactatgtcaagaacatgatcaccggcgctgcgcagatggacggcgccatcctcgtcgtctctggcgccgacggtcccatgccgcagaccaaagagcacattctcctcgccaagcaggtcggcgttcccaagatcgttgtcttcctcaacaagaaggacatggtcgacgacgaggagctgctcgagctcgtcgagctggaagtccgcgagctgctcagcaactatgagtacgacggcgacgaggtgccaatcgtcgctggctccgccctcaaggcgctcgaggccctcatgggcaaccctaccctgaagcgcggcgacgatgagtgggtggactgcatcttcaagctggttgattctgtggattcctacattccagtgccacagcggcagaccgacctcccgttcttactcgctgttgaagatgtcttctccatcaccggtcgtggtacagttgccactggccgtatcgagcgtggcaccgtcaagattggtgacacagtcgatatcgttggaatccgggacacccggaactgcaccgtgactggcgttgagatgttccagaagaccatggacgatgccatggctggagacaatgtcggactgctgctccgtggtatgcagaaggatgacattgagagaggcatggtgctggcaaagcccggctctatcacaccgcacaccaagtttgaggctgttgtgtatgtgcttaagaaggaagagggtggccggcactcacctttcttccctggttaccgcccgcagttctacatgaggacaaccgatgtgacagggaatgtgactgtgattatgaatgacaaagatgaggaggcgaagatgtgcatgcctggtgaccgtatcaagatggttgttcagctcatccagcctgttgcttgtgagcagggtatgaggtttgctatccgtgagggtggtaagactgttggtgctggtgtcatcaacaaaatcattgagtaaactggatatatcacatccaccacgagaattttccttgtttactcaaagcgaaatgctctgtagttgttattatgtgttgagttttaggggttgttcatgtgaaattgtagtatgacactctttcgccaagtgaatttgcataatttatgacattcacgacaaagatacacttatctggttgcaactgatttggctaagaggagagctgtgtcattccgttaagatagagagtaaaaagtagaacggttcaagagcagaggctaaagacgagtacaaaaacccactcacactcaaaac

SEQ ID NO: 50689 - DNA, 792 bp, Zea Mays
atattaagcagtccttcaaagaactcagcctaaccaaagacaaatgaagagaacgtgttgaaagaagagattaacctacttaaggtggaactagacgaaagtgaaggcaagataagtgatgaggatgcaaaagccatgtctgagaaaataactcaaatggaagagcagctggaacttcttagaactgcgatggatgacaagatcagatttttgcaaagacctggttctggagcaggcagggttatagcatcgccacctactaattttgtagatgaaccccaaataaaagagtccatggaaaggccacgagcacacagcagcacagagcaatatacaaaaccaactgaagaaagatgggggtttcaggggagcagagatagaggctcttttggtggcaacagaatttcagagaggtcgtccgcaggacagaggtggtgagactataggggtcagatttttttttgccatcgtttcttcgaaactgcagaagaataagttatgttcctcttgctacttgactcccattttgtttggcttggaagaatggagagcatcgtgggcaatacagattacattgcacgaacctgttaattaccacctttatatggtgtttttcttccatttcctctttttttgtgtgtgcgtaatttttcttttgccctcctcttccatgtcaaaacaggtgctttgagcctttcatacataggctagctattgctattgattcctgcataactatgctttaacattctttgccaatgttttgtttaaaaaggcggtagattagaccgt

SEQ ID NO: 50690 - DNA, 1192 bp, Zea Mays
gaaggttttattggcatggtctaggagaaatggctagagttcagaagagtaaattagtccatggttactttctagataggtggcatggttgcctgcaagttttaaggaaatatctcaggggtcgggagtatgcagaaagagcagaagttacagctaaataggaggatagaggagctagacttagggggtgtttggtttaaagaatcaatcaattctagatgaggtgatgcatcatgagtccattccacaaatttagtggaatgaactcattcttcatattattattaattattagcctagaaggattgaaatggtgatggatcaactcattccattccacaaaccaaactataaagtgaggagtgacaagatgatacacttcctcaatcctcaaaccaaacacgctattaattgttgaaggggaaaatttattcccttctaatgctaaaggggggtcacgattctgtagtggggtacataaagtcaaacatctcttcaagtgggagcagtctttcatattcgtaatgggagaacttgtaagttttcggatgactgttggcttcatgaagttcctttaaagattctatatgaaggtctctacaggatggttagagattctagttgttctgttagaggttgttggaccactgatggctgggatgttgattttaggagatccctgtcaccccacgaatgacagaattggctgggcttagtcaatgatcttcagccaatatctttagcgaataggcctgattctatatcttcggtgctcgagctcgataggttcctgactgatatgggtctaaccagcaggatagttgggattttgtggaagtgcaaaattcctttgaaaagtaagttctttcttcggcaagtcttcaataacagcctccaagtggctcaatgtttagtcaagaggagctggaaggagaatggtaaatgttgattatgtgggaattttgaaacaattgatcatgttttatttcattgccatctagctatttgtcttggggaattctgagagaagtgttcaagagagatcacactccttttgcgctggacttcattgcaagttggcttcagggcaaggggcccttgcctagtagactttaaaagttttaatgttcttttttgcaggatttgtgtgggctatttgaaccacaaggaacaagatggctatagaaaaaaa

SEQ ID NO: 50691 - DNA, 5896 bp, Zea Mays
aacatccaaaagaaccttgtccgtcagtttgaacgtatagccagcttccctcggtgtaagggttttaattttctgctccctaatcttcaggcagagcatcccacagtttggcaaatgaccaaagaatcagactgttaagatcagggaaggggatcggattgttatagcatgtgcaaggggaagaacaagagggaatacggagggacacgagagccagacggcgtctcgtatattcagtagtattttcttccaaaagttcatcccacattacaatagagcagcatatataataggtcttagccaacgtctagcagcctatttggcccacattggcccagtaacaagcacatttggcctgcgtgtacgcttggaaagcctctgcttcacgttgtcttctcctgcttcttccgtttcaccattcccagtatctccattgctgacatccgccggggcttcaggacctgcttgtccccaagcaggtgctcgtggaaaacgatcacggagagcagtagcgtcttcccaagtcgccaacgctgcatccatcccagaccaaaccaccttgacctgtgccaccattgcgccacctctctgtaccagtcgtcgtttaaggatgcggacaggtatctgcaggtgatcagcttcatttgggagcgatggtataggaatctgggtggctccaattgctgctttgagttgtgagacatggaacacagggtggatggctgagtctgctggcagctggagcttgtaggcaacagggctgattttctcgatgattttgtagggtccaaaaaatttgaatgacaatttatgatgagcacgtgtagccactgacgtctgaacatacggttggagcttcaagaatacccaatcgttgacagcaaacactcgctccgagcgattcttatcagcctgcttcttcatgcggtcttgagcccggagtagatgctgtttgattagcttttgcatcaactcgcgctcctgaatccaagatgctagatcaggtactgagatagctgtttgagtggtgataccgaagtggcgtggtggatatccatacatgacttcaaacggtgatctgcccagggctgtgtgggtgcaagtgttgtaccaaaattcggcaactgagagccatagagaccatttctttggacacgcatggacaaaacatcgaaggaaggtctccaaacactgattcactcgctccgtttgaccatcggactgtgggtggtaagccgaggacatactcagcttggtgtcagttaactgaaagagttgctgccagaaggagctggtgaatatcttgtcacggtcggaaactatcactgatggaagaccatgtaacttgtaaatgttgtcgagaaaaagtttggccacttttgctgcggtgaaggggtgagccaggggcacaaaatgactatatttggaccatttatctacaatgaccataatgcagttgtaagtggtggacaatggcagtccctcgataaaatccatggagacagtgtgccaagcgtgcggtggaatgggaagtggcataaggagacctgggtatttggtcctctcaggttttgcctgctgacagatttggcatgctttgacatagttgtgcactgcttgtttgatgccaggccagtagaagagttgtttcagccggctgtaggttacaggtactccagagtgtccgcctatggctgaggcatgaagggcatcgatgactttattctgcatcactcgattatttcccagccacactcgacctttatatctgatcagaccatccttcaatgaataattggtggattggccagtttgaagagccaatttggacaacaactcttgagcagtggggtctgtagcatatccctgtataacctcttgaacccaagtaggtgtgcactgagacaaggttaaacattctgctgaatgagaccgacgggagagagcatctgcagcagcattatcagagcctttcttgtagatgattttgtattgtagaccagccaacttggagtaagccttctgttgccatagggtatgcagcctctgctcattaagttgagtcaaactcttatgatctgtgaaaataagaaattcagcgagttgcaaataggatctccaatgagctactgccaagacaattgccatgtattctttttcataaatggaaaggccttgtgtctttggtcccagtggtcgacttaaatatgccagtggatgaccattttgcatgagcactgcacctacaccgtttgtacaagcatctgtgcaaatcgcaaagggcaagttgaagtccggtagggctaaaactggggcagatatcagggcttgtttcagggtgtcaaaagcttgctggtggtcagttgtccatatgaacagtgtgtgttttttgagaagatcaaacaatggtcgactgataataccgaaatgtctaacgaattttctgtaaaacccagcgagtcccaagaaactgcgtagttctttaactgatgttggtgtttgccagttggaaatagccgtgattttagaagagtctgttgcaattccctcatggctaatgacatggcccagatatgaaatttcagttttggcaaattcacacttggaaagtttcaccttccactggtccttttgcagtagctggagagtttgtctcaggtgttgcaagtgttcatcaaaagtagaactatatataagtatgtcatcgaagaaaaccagtgctgatttccttagaactggggccaaggtctcgttcattgctcttaaaaatgtgttgggtgcgcccgagagaccaaatgccatgactcggaactcgaagtgtcctgtgtgggtctgaaaggctgttttatactcctcgccttgctgcaaaaggatttgatggtagccagctttgaggtccaatttgctaaaccaccgagcatgagttaactcatccatcaactgatcgaaaattggtactggatacttgcttttcagagttaaggcattaagatggcgatagtccacgcaaaaacgccatgtcccatctttcttcttaactagcagcaccggagaagcgaatgggctttggctcttctgtatcactccctgagacagcatatcagccacttgacgttcgatttcatctttcaaaactggtgggtaccgatatggtcttactgaaaatggctgagcaccttgaatgagcggaattgcatggtcacagtcacggctaggaggtaaacccaccggatcagcaaagactgcagtaaagtcttccaaaatttgaacaatggcaggtggcatagggtttgtagcaaccgaaggttgagtgtcgacagatggcgatgacaataacatgacttgaacagtagtgccagctggaactgcagatggtagcccatgtaatagaacagtagtgcccttgtacggaatggccatccatttactagcccaatcaactttcataggactaaaggtctccaaccaatccattcccactactaaatcatatttggataatggtaacaacacgatatccgagacaaaactataatcctggataaaccactccatttgcaataattggtgttgacaagagagaacctccccatttgccacttgaactgacattggtcgtggcatatctgaaattccttgcagagaggacaataatatggagctgaggaaagtatgggagctacctgagtccactaagatgagtagaggtatagactgaatcgagcctctgaacttcaatgtgtggtgtccagcagcacctgaccaggcagcctgggaaagagccatcatgatatgtggaggttcagtttcttgatgttctgagtcactgtggttactgattaattccagtacttcttcgagagcatgtaactgaaccgaagaagcacatttgtgtccatatgaccacttctcagcacacctatcacacaagccccttgctcttctataacttcgcagagatgccagtttatcaccttgagatgtgggtttactcatatggccagacttagcatctgaagaagctccctcatgcttgatgtcatcagaggatgattgataagtcctgtgagccgtccggtggaacgatggctcatgtcgtcgagggcgtgtagcatcagccgcttcctcctgcaccaaagcaagcgcacaggcagtgtctagatcggaaggacgctgaaccatgaccactggtttaatgtctgaacgtaacccatcaataaatcgcatggtgtaatacaagggatctgttctagattcataagcagccaactcatcaaccagagacgaaaattgttcgacatagtctgctaccgaaccaagttgcttgatatgaaataattggcgaattaaggactcgtgttgctcacgaccaaagcggtcatggacaagtgagcaaaattcgagccatgacagttgacgaatcctacgttccacagactgtaaccaacgggatgcgcgaccatcaaaatgcataatcgccacccgcacccagacactgtaatggacctcatacatatcaaaatagctttcacatttggatttccatagctgtggttggttaccgtcaaatcgaggaaaattaatcataggtaatcgaccaaaacccccccgatgctgctcatggaattcattggagtagaactgatctgagttaagtggtggggaatggttcgtacccttgaccgggtcacgcgtttgggatcggaacccaaactcgcgatcccggtgatgtttgttgtcgcggtggcctaacggcccgtcggcattgattccgtgaggtgggcgcccggcggccgactcatgttggccgaagagacccggctggtggaaagcgggagtccggtgctcgcgttcgaggaatcgcgtagcccgtgtcacctccaaggacagatcggcgacgcgcttctcaattgtgggagtccactgctcgaactctgcttgtgccatctcgacagtgatgaaacgcgcggtcgcacgttgttccgcgtcgtcgacgcggtgcgcgaggtcgtcgtagcattgctcgaggtggcgaccgagggcgacgcagcgatcgtcgaagttgcgctcgagaaggccacaacgcccttcgatggcgctcgtcagacggatttccatttgctgcaactcctccagcaccttggagacggaggtctcggctggtgccatggcggctgaacgtggtcgacgcggaatcggaaccgtgagatccagggtgtaggctctgataccagatgttaagatcagggaaggggatcggattgttatagcatgtgcaaggggaagaacaagagggaatacggagggacacgagagccagacggcgtctcgtatattcagtagtattttcttccaaaagttcatcccacattacaatagagcagcatatataataggtcttagccaacgtctagcagcctatttggcccacattggcccagtaacaagcacatttggcctgcgtgtacgcttggaaagcctctgcttcacgttgtcttctcctgcttcttccgtttcaccattcccagtatctccattgctgacacagacatcatataatataatgtgctggtgctaaattcaagcacacattgcatttacacgaaaaaaatagaaggaaaaaagcattccagcagtactgcagtttcgagctgagagtaacttgaggataaatttgcactgcaaataaaatgagcagggttacaaacgaggtgaaagaacctcaccagggcctcccaccgcctcctggcggcagcctgctccttggtctgtctcagctcctcgtcctcttccccctcctttcctcctccgaccaccgcccccatcctcaccaccccgctccatctctggacagtggacacacagggccatgaatgaacagagcacagccaacgag

SEQ ID NO: 50692 - DNA, 1341 bp, Zea Mays
atggacaccgcgctctgcgacgacctgctgcaggtggtgttcggccttctaccgccctccgctgcaccggccgtgtccctcgtctcccgccgctggctcgcactcctcagggccgcgacgtcgtccctcagcctccgcctgcctgcctcctcggcggcgaccctcgccgccctgctgtctcactaccccttcctcgccgccctgaccgtggtctccgctggtacgccggtccacgacgccgacgccgtgctgctcgctgtcgcggccgcgccggccgcttcccggctctccacgctgcggctcttgcccgattgggcggtctcccccgccgcgctgctcacggtctgccctgcactcgccggtctgacgtcgctccacctcaccgctgtccgccccctatctttccgctggctcaagctgttgccgcgcctcaagtcgttcgcccttgtcaactccgccgccaccgttgactccgcgggctcgagctcggatgacgccgacggcgaggccgaggacgtcgcagggacattgccgctggagaagctgtcactttgcggcatccgctccggcgaccgcgggcttgggtggctgtggcggcggtgcgggagcctcaagtggttgcagctgcgcgcctgcgacgccgaccattgccgcacgctaacgtccctcctggtctatgacggcggcggcagcgaggcccttcaccggttcatccagcagcgtgctgctggtctgcacaccttggaccttcgcctcccgcttgacctgcacaacgatcatctcctcgccattggagctgactcagttcacaatgctacacatggcctagcttcacttcgcctccagagctgcgtccttatcacaggggacggcctccggtccctggcacgcacagccgccggagccggcatagaagagctcgccttggtgagttgcgacgtggtggagcgggagcccgggttgctgacattcctcagtcagagcatgccgcggctccgtcgacttaacctgtcttacaatgagacactgaacgacaaggtgatcggcgccatgctttcatcctgccggaatctcatcgacatcaggctcagggggtgccggggcctgacgggaggctcgctcctctcgctgcttaggcactgtgggcagtcactggagatccttgacatctcccgctgtccgggcattgctgtaggtaacgttgagctctttgcccagcgcgccgctaggttgaatcatgtgatcatcgaggagagcgcgatgtcggaggaattgaaggcaatcgctcagaaaaaaggcatgaaggttggctcattgccgtgcgaaggaggaccattctga

SEQ ID NO: 50693 - DNA, 1272 bp, Zea Mays
accgtcccacgacccttgtgtgtgtgtgtgtgttttttggaccctcggcctccggccggtcttagaacccagttctttcatagtttcgttcttccgcgtttccacttattctttgaaggcagaggcagctatatcagtactcgagtgttctcgagtcctgctgcatcccagtttcccaacaagagcggcacggggatcctagagcagcagacattcgcgttgcaatggtgttctgcgcggatttcgctgccctccggccgtcgccggccgacgtccgtgtcgtcacgtccgacgggagcgccatccgtgcgcattgctccgttcttgccgcggcgtccccggtgctggagcggatgatcgagggcacgcgccgcgggtgggacgccggctgcaccgtccacgtcctcggcgcgcccgctgacgccgttgccgccttcctccgcttcctctactccagccccagggcggaggacgcggtgggcgcgcacggggcggcgctgctggcgctggcgcacgcgtaccgcgtcccgtggctgaagcggcgcgcggaggccgcggtggcggcgcgcctgaccgcggagcgcgcggtggacgcgctgaagctggccgcgctctgcgacgcgccgcggctgtacctggcgtgcgcgcgcctcgcgggcaaggacctggacgccgtggagcggtccgaggggtggcgtttcgcgggccgccacgacgccgcgctccagctgaacctgctccagctcgtccacgacgcccaccagcaacctcaaggccaagatgcaggaggaaggagtgggcaagacatggaagcttctggtgaagaaagtgaccagggctagggtgatgtccgccctggccagcagcagcagcagggaggtgccagaggttgtcaagaagtcttgggcgaaatatagcagcagtagagcttcaagaattagataaaataaaaaagggggaaacatgaagcaaatactagttgttctgtacgaggccaacgcaatcttggtttacagtttgtgtgtacccaaataagcctgatgcctgcatattatgtggcatccttgattcttagggcctgtttgtttacccccatggattatataatctggattatttttggaggagtagtcatgtttgtttacccagattatttgagttgttaataggattcttttgtatgagaaagacaagaatgccctctatatttgtactaggtcgaaccagacaatggcacctggagcctggcggctagggttaggaggaatcgag

SEQ ID NO: 50694 - DNA, 1815 bp, Zea Mays
cagcgctccccaaagcagaaagaccgcgacccaaagcaagctcaagccgctccgctcctccagtctccagtctccaccgcccgccaaccccgagatatacctcccttcctctcgaagcttcgtctgcagacgaagtcgccggctcttccctcggcgctggtgccggtgggttgcctgtggcggtgggtgggtggccgggtggtggtgttgctgggatgcccgccgcgacggcgaccgcagcccgcctccgcgtgccgctgccaaaagccgcccaccactcgccctgctcgagccggcgccaccccgactgccgccgccgctgacgagacgagcggccacacgcttggcgcgcgccatggatgccttgtcccgccctgctgtcgtcatcgacaacggcaccgggtacacgaagatggggttcgcggggaacgtggagccctgcttcatcacccccactgtcgtcgccgtcaacgattccttctccggctccgcccagccggcggtgaggggcacccccgccagggggaactggctcgctcagcacagcgccggcgtcatggctgacctcgacttctacatcggcgacgaagcgctggcccgatcccgcgccagcagctcgcatagtttgagctatcccatccgcaacggccaggtggagaattgggataccatggagaggttctggcaacagtgcatcttcaattacctccggtgcgacccagaagatcattattttcttctaactgagagccctctgactgcccccgagacccgggagtacaccggagagatcatgttcgagacgttcaatgtgcctggcctctatattgcagtccaacctgtccttgcgctggctgctgggtacactacaaccaagtgtgaaatgacaggtgttgtagttgatgtgggtgatggggctacccatatcgttccggttgctgatggttatgtcattgggagagccatcaaagtacattaaacactggacgggcaccaaaccgaagactggtgcaaaatacacatgtgacattggatatgagcgattcctagggcctgagatcttcttcaacccagagatatataacaacgacttcaccactcctttgcaagttgttattgacaagtgcatccaatcatctccaatcgacacaaggagggctctttataagaatattgtcctgtctggaggctcgactatgttcaaagatttccataggaggttacagcgggacctaaagaagatagtggatgcacgggtccgtgcatctaatagccggcttattagtggggatgctaaggcccagcctatagaagtgaacgtggtcagtcatccgatccagagatatgcggtatggtttggtggctctgtgcttgcttcaaccgccgaattctacgaggcttgccacacaaaggcagagtacgaggagtacggtgccagcatctgccgaacgaatcctgtcttcaaagggatgtactgactcagagcggttccctgtggctgacgtcgtggatgatatccactcaaagcttaaatggggagaagtgacagtggtcgtggagacaggactgtcgagagggatcctgatcgtggggaagcatagccgtacgagctgtacaaaagagaagcgcaaatagataggtttatgtttcaccatacaatttagatgctggtaggcctgacaggatgggtttgccacccctgctgaattgggtggcattgtaatttgtagcgtcaacacttctggcggtgcgagattgctccttgtatacatgttgattcggcagcgatgttttctctctctcggtggcttagta

SEQ ID NO: 50695 - DNA, 1182 bp, Zea Mays
cttttgcataggcatgcctgacactaaaatggatggcaattgcattcagcaggccatgtttcagttgtgaaatgacaggtgttgtagttgatgtgggtgatggggctacccatatcgttccggttgctgatggttatgtcattgggagcagtatcagatctattccaattacaggcaaggatgttacccagtttattcatcaacttctaaaggaaagaggtgagaacattccagcagaagaatcttttgatgtagcaagaaggattaaagaaatgtactgctatacttcttcggacattgtgaaggaattcaataaacatgacaaggagccatcaaagtacattaaacactggacgggcaccaaaccgaagactggtgcaaaatacacatgtgacattggatatgagcgattcctagggcctgagatcttcttcaacccagagatatataacaacgacttcaccactcctttgcaagttgttattgacaagtgcatccaatcatctccaatcgacacaaggagggctctttataagaatattgtcctgtctggaggctcgactatgttcaaagatttccataggaggttacagcgggacctaaagaagatagtggatgcacgggtccgtgcatctaatagccggcttattagtggggatgctaaggcccagcctatagaagtgaacgtggtcagtcatccgatccagagatatgcggtatggtttggtggctctgtgcttgcttcaaccgccgaattctacgaggcttgccacacaaaggcagagtacgaggagtacggtgccagcatctgccgaacgaatcctgtcttcaaagggatgtactgactcagagcggttccctgtggctgacgtcgtggatgatatccactcaaagcttaaatggggagaagtgacagtggtcgtggagacaggactgtcgagagggatcctgatcgtggggaagcatagccgtacgagctgtacaaaagagaagcgcaaatagataggtttatgtttcaccatacaatttagatgctggtaggcctgacaggatgggtttgccacccctgctgaattgggtggcattgtaatttgtagcgtcaacacttctggcggtgcgagattgctccttgtatacatgttgattcggcagcgatgttttctctctctcggtggcttagta

SEQ ID NO: 50696 - DNA, 2138 bp, Zea Mays
gccagcctgccaggaccagccttgtgcagttgtgccgcaactccctccagtcccctcgtcgccctcctcgtcctatatatattaacaccccagccttggcaccacacgtccacaccacagagcctgaaatcggctacacacacgcgaattgaaccagccgctagccccgcgccttttgcggccatgatcaagctgagctactccaagaggctcttcaagaggatctcctccacgtccaataagcagcaggcggccgcttccggcggcggcggtgacaatggcagcgcggccgcggccggcggaggaggcgcccgggagatcgagtgggaggtgcggccgggagggatgctggtgcagaagagggacgggaggggcggccgggagacggtcgccgtcagggtttccaccggcttctcctggcatgatgtgtccatcggagccacctccacttttggggagctgaaggtgatgctgtccatggtaacagggctagagccacgggagcagaggctgctgttcaggggcaaagagaggaacgacaccgaccacctccacatggttggggtgagggacaaggacaaggtcctcctactagaggacccggccctcaaggacatgaagctccgggctctgtcggctcgagtcgtgccgaggccgtgccagtcttttatccaagtgtaacttcccgctaccatgctaactgttaccactatacttgttagttgtgtaatatcctactgctgttttagtcccaccaccaaggtacttttagtttctggaaagcctttttaaatatccggaatccgaggggtttgctctctaaaccactctgtctttagtgccactccatggaagggtccctgaagacgagagtcagccatggtggctgtgatgtgatttggagcctagtgtttgggatgttttttatggtccctactactactaccgtggtcacttctcattcctacctactacatgcatgggtcatgagtaggcatgagtgataaaaattgtatgtacgtactccatcatgtgtttctgttcgcaatgggatttgtttggatactttagtactaactgtaatctatatatattgagatgtattatagtgtaaattagtttaagttataacacaatctaactcaataaatatggattgaggtcaatactaaagtatatgaactagcgctgaatggatgaaaccaaacttgggtccctttccatgatggaactcgcacccttttggggtggggtggggggaggggatagagcgaatcgtaagcgatgcttcaggctcaagaaaaggagcctaaagatgtgccgatgcaatgtgatgatccgttccttttttttgcgactccgccattgatgtgctatggcgcttgagatttgcaggtcaggtcctttggattggactgcagcgtaggtgagcccagggtacaggtcggtaattgctctgtttcccgttcatagacagcagggaagcttcacccgcatacttttatttgtcagcatcgatcgatcaatgcgttgtcctcgtagaaaaagaagagcgcttggcttgataaccaagggatcgtacaaagctcgccgctgatggagctaggtgctcccgtccatagttttcacaagatgggctgccaatccaagatggtaatgatatgttgagtttggcattccatcaacaaagaaactgtcgcgagatgcattggaggctctggaagtttcacaacaacacacaaaaaaagtcttcccaaaagaagtcccagtcgacctatagctatagtcctcattcttgacgcttcaggttcaagaaaaggaactttatgatggaaaaatggacttcagtctgctcaacccttcatgttactgtgccggccgagatgtgcttggtcgctggtggttgagatttcagatcaggagctctggagtctggactctggactgcagcgagccaaatcagtcaccggtttgcttcccacatcgcggacaacggcaacctgcagtcgcttgctttcgtccttgaattgccaccgtcattgccatcatcgcaaagtagtgtacaaagttttggagcttctttgtgcctaatccataaggttttggactgtgggttctataaaagaattgaagacaat

SEQ ID NO: 50697 - DNA, 1045 bp, Zea Mays
aacaccccagccttggcaccacacgtccacaccacagagcctgaaatcggctacacacacgcgaattgaaccagccgctagccccgcgccttttgcggccatgatcaagctgagctactccaagaggctcttcaagaggatctcctccacgtccaataagcagcaggcggccgcttccggcggcggcggtgacaatggcagcgcggccgcggccggcggaggaggcgcccgggagatcgagtgggaggtgcggccgggagggatgctggtgcagaagagggacgggaggggcggccgggagacggtcgccgtcagggtttccaccggcttctcctggcatgatgtgtccatcggagccacctccacttttgggctagagccacgggagcagaggctgctgttcaggggcaaagagaggaacgacaccgaccacctccacatggttggggtgagggacaaggacaaggtcctcctactagaggacccggccctcaaggacatgaagctccgggctctgtcggctcgagtcgtgccgaggccgtgccagtcttttatccaagtgtaacttcccgctaccatgctaactgttaccactatacttgttagttgtgtaatatcctactgctgttttagtcccaccaccaaggtacttttagtttctggaaagcctttttaaatatccggaatccgaggggtttgctctctaaaccactctgtctttagtgccactccatggaagggtccctgaagacgagagtcagccatggtggctgtgatgtgatttggagcctagtgtttgggatgttttttatggtccctactactactaccgtggtcacttctcattcctacctactacatgcatgggtcatgagtaggcatgagtgataaaaattgtatgtacgtactccatcatgtgtttctgttcgcaatgggatttgtttggatactttagtactaactgtaatctatatatattgagatgtattatagtgtaaattagtttaagttataacacaatctaactcaataaatatggattgag

SEQ ID NO: 50698 - DNA, 451 bp, Zea Mays
cgatgttctcgtcttgactgcgcccgtcgggtcctccgccgacgttttcaatcagccgcgccgacctccacttcaaacttagaccggcggtggacgcgtgccttcctgtcctcgcgttcggatcgacgtcgctcagtgtctcacgccatcgtgccgtctcagccatccccagctcttcctcgtttgtaccgtgtgtcgcagcaagctcgtcgtcggcccaggcgctcgcctcctcgccatcgctttacggattcggcgtcgtcgtgtttcacctcgctgttacaacatcttggtcttttggagcttcaacaaatcattgtcttgctgcgttaccgtgtggtgctccctacttcctatctagtgagctcccaaaataaagagtgaagattaaacatgaagtggtttctaagaggagtctacttgtcgggaccataattaggggtacctcaag

SEQ ID NO: 50699 - DNA, 2433 bp, Zea Mays
cctctgtcgccttcctactacaaaggacgcatctggccgacgccgaccaggcgactcctggtcagtgggcactgggcaggcactccggcactggctccttccttccctttccctgatccctcgtccagtcgtcctcctctgcccggtacagctgcgaagccggcactggctctgctctgctcgccagcagcaccgacctccactctacgtctccaccagaccaccagcaaggcgagctcctttttcactcccccaaatctctgaataaaaaatcgcgcaagcaacctcgctccaccggcctccgcaagttcgttcagtcaggtgctttgtttggcccatgggcatggcttgtcatgacaattggaatttctgcacttattctaggcttatggcctatgcatgtgatttggacatattactgcatcatcagaaccaagatggtaggaccggtcgtaaagttgctgcttcttattgttgcaactgcggttttggttatatggctaataattggcgtcgtgggaagcatccttgctggtttggcctatggctttctcgcaccagtaatggctacatttgatgcgattggggaaggaaaagaaaatccacttgttcactgttttttggatggaacatggagcactatcacaggaagctgtacagttgtcagggacatgaaagacatgttggtacactcatatttttcaatcatggatgaagttcgtcttcatgcaccacccgacggcaagccatatgagataagattgctacaaattcctggtgcaatatttgctgctgcttgtgggcttgtagtggatgcaataatgttcacactgattgccttgtacaagttccccgttatgctattcaaaggatggaagcggttgattgaagatcttattggcagagaaggaccttttcttgagacagcttgcatgccatttgctggtcttgcaattcttctctggccatttgcagttataggagcttttatagcctctgttatttgcagtgttccttttggtgtatatgctgctgtggtggtttatcaggaatcctcacttttcttgggactgtcttatgcaatatcatcagtatccatctttgatgaatatacaaatgacgtacttgacatggcaccaggatcttgctttcctaggtttaaatataggacaaatgaagcttcctcacatggtggctctctctcgagacccgcttcattcaaggacaagcatgatggaaagaaagcccctcagcgtgtaacatcatttaaaagtagctttgatgagttcaatccattcaagttgctagatcaccttttcatagagtgtaagcaccatggcaaggatctggtcgctgaaggagtgataaccccaaaagatatagaaggaacaaaggcaggcaaagccagcactggggtacttaatgttgggttaccagcatatgttatccttaaggcactcctccgatctgctaaagccaattctgatggtctcgttctaagtaatggatctgagataacatccgacaataggcctacgagtaaaatctttgagtggttttttgaccctctgatggtaatcaaagatcaaatcaaagctgaaaacttcacagaagaagaggaagcataccttgagaagcaagtgctcttgattagtgatccaaagcgcatcaaggagaatctcattcggcttccaccattgagtgagagaaaacaagcagaaatagaagcatttgctcgaaggttgcaagggatcacaaagtcgatatcaaggtaccccacatccaagcgtcgcttcgacgcccttgtgaaggctctttcagaagagcttgcaaggacaatgggtggtaatcaatctgccaatgggtctcaggtccggaagataagaagtggtatcgtccgaatgcttagtcagagatcactagggaaaacaacaggcatcccgggcgatgatcatgaggctcagctaacaagcgatggtttcacttcatgatgttctggaggtgttcaactgtaacctcagtttgaaaaggagatactacttttctgtgttattttgctaactggatacaaagaactgacacttctgtatgaagagtttaacctcaaccatctcgaggatgagttgtttgttttcaggactgtatctggacaacactgtagtaatacttcgtaacagaaagcaaaagatatgattcgccctagtgccaccagttacatgccctcgttcgttctagccgagttggatgcctttggattattttttttactccgactgtcttggtgtgcttgtcttcagttatttgtccatacaatatacaaatgatctaacactgctgaaaaacgatagcccaagacaaatggagaagcgagagtattaaattctccataaacaacattatcattaggtttaagtgtggcaaaggaaattccat

SEQ ID NO: 50700 - DNA, 2450 bp, Zea Mays
cctctgtcgccttcctactacaaaggacgcatctggccgacgccgaccaggcgactcctggtcagtgggcactgggcaggcactccggcactggctccttccttccctttccctgatccctcgtccagtcgtcctcctctgcccggtacagctgcgaagccggcactggctctgctctgctcgccagcagcaccgacctccactctacgtctccaccagaccaccagcaaggcgagctcctttttcactcccccaaatctctgaataaaaaatcgcgcaagcaacctcgctccaccggcctccgcaagttcgttcagtcaggtcaggtcccagcccacgcagcatttgacagcgcgaggcggttgcccagtcagctggggtggacggctttgatttgcttcgaagggagtgagattggttgaagccttcgaccaaggttgtcgatggattctgggatttgggcatctgtttggagcttcatcaagttcctgcctttcttctttgcgcttctcctcctgggcatcatcaaaggtgctttgtttggcccatgggcatggcttgtcatgacaattggaatttctgcacttattctaggcttatggcctatgcatgtgatttggacatattactgcatcatcaggatggaacatggagcactatcacaggaagctgtacagttgtcagggacatgaaagacatgttggtacactcatatttttcaatcatggatgaagttcgtcttcatgcaccacccgacggcaagccatatgagataagattgctacaaattcctggtgcaatatttgctgctgcttgtgggcttgtagtggatgcaataatgttcacactgattgccttgtacaagttccccgttatgctattcaaaggatggaagcggttgattgaagatcttattggcagagaaggaccttttcttgagacagcttgcatgccatttgctggtcttgcaattcttctctggccatttgcagttataggagcttttatagcctctgttatttgcagtgttccttttggtgtatatgctgctgtggtggtttatcaggaatcctcacttttcttgggactgtcttatgcaatatcatcagtatccatctttgatgaatatacaaatgacgtacttgacatggcaccaggatcttgctttcctaggtttaaatataggacaaatgaagcttcctcacatggtggctctctctcgagacccgcttcattcaaggacaagcatgatggaaagaaagcccctcagcgtgtaacatcatttaaaagtagctttgatgagttcaatccattcaagttgctagatcaccttttcatagagtgtaagcaccatggcaaggatctggtcgctgaaggagtgataaccccaaaagatatagaaggaacaaaggcaggcaaagccagcactggggtacttaatgttgggttaccagcatatgttatccttaaggcactcctccgatctgctaaagccaattctgatggtctcgttctaagtaatggatctgagataacatccgacaataggcctacgagtaaaatctttgagtggttttttgaccctctgatggtaatcaaagatcaaatcaaagctgaaaacttcacagaagaagaggaagcataccttgagaagcaagtgctcttgattagtgatccaaagcgcatcaaggagaatctcattcggcttccaccattgagtgagagaaaacaagcagaaatagaagcatttgctcgaaggttgcaagggatcacaaagtcgatatcaaggtaccccacatccaagcgtcgcttcgacgcccttgtgaaggctctttcagaagagcttgcaaggacaatgggtggtaatcaatctgccaatgggtctcaggtccggaagataagaagtggtatcgtccgaatgcttagtcagagatcactagggaaaacaacaggcatcccgggcgatgatcatgaggctcagctaacaagcgatggtttcacttcatgatgttctggaggtgttcaactgtaacctcagtttgaaaaggagatactacttttctgtgttattttgctaactggatacaaagaactgacacttctgtatgaagagtttaacctcaaccatctcgaggatgagttgtttgttttcaggactgtatctggacaacactgtagtaatacttcgtaacagaaagcaaaagatatgattcgccctagtgccaccagttacatgccctcgttcgttctagccgagttggatgcctttggattattttttttactccgactgtcttggtgtgcttgtcttcagttatttgtccatacaatatacaaatgatctaacactgctgaaaaacgatagcccaagacaaatggagaagcgagagtattaaattctccataaacaacattatcattaggtttaagtgtggcaaaggaaattccat

SEQ ID NO: 50701 - DNA, 2640 bp, Zea Mays
ctgtcgccttcctactacaaaggacgcatctggccgacgccgaccaggcgactcctggtcagtgggcactgggcaggcactccggcactggctccttccttccctttccctgatccctcgtccagtcgtcctcctctgcccggtacagctgcgaagccggcactggctctgctctgctcgccagcagcaccgacctccactctacgtctccaccagaccaccagcaaggcgagctcctttttcactcccccaaatctctgaataaaaaatcgcgcaagcaacctcgctccaccggcctccgcaagttcgttcagtcaggtcaggtcccagcccacgcagcatttgacagcgcgaggcggttgcccagtcagctggggtggacggctttgatttgcttcgaagggagtgagattggttgaagccttcgaccaaggttgtcgatggattctgggatttgggcatctgtttggagcttcatcaagttcctgcctttcttctttgcgcttctcctcctgggcatcatcaaaggtgctttgtttggcccatgggcatggcttgtcatgacaattggaatttctgcacttattctaggcttatggcctatgcatgtgatttggacatattactgcatcatcagaaccaagatggtaggaccggtcgtaaagttgctgcttcttattgttgcaactgcggttttggttatatggctaataattggcgtcgtgggaagcatccttgctggtttggcctatggctttctcgcaccagtaatggctacatttgatgcgattggggaaggaaaagaaaatccacttgttcactgttttttggatggaacatggagcactatcacaggaagctgtacagttgtcagggacatgaaagacatgttggtacactcatatttttcaatcatggatgaagttcgtcttcatgcaccacccgacggcaagccatatgagataagattgctacaaattcctggtgcaatatttgctgctgcttgtgggcttgtagtggatgcaataatgttcacactgattgccttgtacaagttccccgttatgctattcaaaggatggaagcggttgattgaagatcttattggcagagaaggaccttttcttgagacagcttgcatgccatttgctggtcttgcaattcttctctggccatttgcagttataggagcttttatagcctctgttatttgcagtgttccttttggtgtatatgctgctgtggtggtttatcaggaatcctcacttttcttgggactgtcttatgcaatatcatcagtatccatctttgatgaatatacaaatgacgtacttgacatggcaccaggatcttgctttcctaggtttaaatataggacaaatgaagcttcctcacatggtggctctctctcgagacccgcttcattcaaggacaagcatgatggaaagaaagcccctcagcgtgtaacatcatttaaaagtagctttgatgagttcaatccattcaagttgctagatcaccttttcatagagtgtaagcaccatggcaaggatctggtcgctgaaggagtgataaccccaaaagatatagaaggaacaaaggcaggcaaagccagcactggggtacttaatgttgggttaccagcatatgttatccttaaggcactcctccgatctgctaaagccaattctgatggtctcgttctaagtaatggatctgagataacatccgacaataggcctacgagtaaaatctttgagtggttttttgaccctctgatggtaatcaaagatcaaatcaaagctgaaaacttcacagaagaagaggaagcataccttgagaagcaagtgctcttgattagtgatccaaagcgcatcaaggagaatctcattcggcttccaccattgagtgagagaaaacaagcagaaatagaagcatttgctcgaaggttgcaagggatcacaaagtcgatatcaaggtaccccacatccaagcgtcgcttcgacgcccttgtgaaggctctttcagaagagcttgcaaggacaatgggtggtaatcaatctgccaatgggtctcaggtccggaagataagaagtggtatcgtccgaatgcttagtcagagatcactagggaaaacaacaggcatcccgggcgatgatcatgaggctcagctaacaagcgatggtttcacttcatgatgttctggaggtgttcaactgtaacctcagtttgaaaaggagatactacttttctgtgttattttgctaactggatacaaagaactgacacttctgtatgaagagtttaacctcaaccatctcgaggatgagttgtttgttttcaggactgtatctggacaacactgtagtaatacttcgtaacagaaagcaaaagatatgattcgccctagtgccaccagttacatgccctcgttcgttctagccgagttggatgcctttggattattttttttactccgactgtcttggtgtgcttgtcttcagttatttgtccatacaatatacaaatgatctaacactgctgaaaaacgatagcccaagacaaatggagaagcgagagtattaaattctccataaacaacattatcattaggtttaagtgtggcaaaggaaattccat

SEQ ID NO: 50702 - DNA, 2794 bp, Zea Mays
cgccttcctactacaaaggacgcatctggccgacgccgaccaggcgactcctggtcagtgggcactgggcaggcactccggcactggctccttccttccctttccctgatccctcgtccagtcgtcctcctctgcccggtacagctgcgaagccggcactggctctgctctgctcgccagcagcaccgacctccactctacgtctccaccagaccaccagcaaggcgagctcctttttcactcccccaaatctctgaataaaaaatcgcgcaagcaacctcgctccaccggcctccgcaagttcgttcagtcaggtcaggtcccagcccacgcagcatttgacagcgcgaggcggttgcccagtcagctggggtggacggctttgatttgcttcgaagggagtgagattggttgaagccttcgaccaaggttgtcgatggattctgggatttgggcatctgtttggagcttcatcaagttcctgcctttcttctttgcgcttctcctcctgggcatcatcaaaggtgctttgtttggcccatgggcatggcttgtcatgacaattggaatttctgcacttattctaggcttatggcctatgcatgtgatttggacatattactgcatcatcaggtagagtttgcagtcctgaaaggaaagtcatgcaatgtggtgtatttggatgtgcttatcacctttttatgaaagcagaaccaagatggtaggaccggtcgtaaagttgctgcttcttattgttgcaactgcggttttggttatatggctaataattggcgtcgtgggaagcatccttgctggtttggcctatggctttctcgcaccagtaatggctacatttgatgcgattggggaaggaaaagaaaatccacttgttcactgttttttggtacaatttacttgtaacagcttcattctgatatctgtcttgtgtgtacaatacctgtttcacatggttagctaactggaaatgcaggatggaacatggagcactatcacaggaagctgtacagttgtcagggacatgaaagacatgttggtacactcatatttttcaatcatggatgaagttcgtcttcatgcaccacccgacggcaagccatatgagataagattgctacaaattcctggtgcaatatttgctgctgcttgtgggcttgtagtggatgcaataatgttcacactgattgccttgtacaagttccccgttatgctattcaaaggatggaagcggttgattgaagatcttattggcagagaaggaccttttcttgagacagcttgcatgccatttgctggtcttgcaattcttctctggccatttgcagttataggagcttttatagcctctgttatttgcagtgttccttttggtgtatatgctgctgtggtggtttatcaggaatcctcacttttcttgggactgtcttatgcaatatcatcagtatccatctttgatgaatatacaaatgacgtacttgacatggcaccaggatcttgctttcctaggtttaaatataggacaaatgaagcttcctcacatggtggctctctctcgagacccgcttcattcaaggacaagcatgatggaaagaaagcccctcagcgtgtaacatcatttaaaagtagctttgatgagttcaatccattcaagatcaccttttcatagagtgtaagcaccatggcaaggatctggtcgctgaaggagtgataaccccaaaagatatagaaggaacaaaggcaggcaaagccagcactggggtacttaatgttgggttaccagcatatgttatccttaaggcactcctccgatctgctaaagccaattctgatggtctcgttctaagtaatggatctgagataacatccgacaataggcctacgagtaaaatctttgagtggttttttgaccctctgatggtaatcaaagatcaaatcaaagctgaaaacttcacagaagaagaggaagcataccttgagaagcaagtgctcttgattagtgatccaaagcgcatcaaggagaatctcattcggcttccaccattgagtgagagaaaacaagcagaaatagaagcatttgctcgaaggttgcaagggatcacaaagtcgatatcaaggtaccccacatccaagcgtcgcttcgacgcccttgtgaaggctctttcagaagagcttgcaaggacaatgggtggtaatcaatctgccaatgggtctcaggtccggaagataagaagtggtatcgtccgaatgcttagtcagagatcactagggaaaacaacaggcatcccgggcgatgatcatgaggctcagctaacaagcgatggtttcacttcatgatgttctggaggtgttcaactgtaacctcagtttgaaaaggagatactacttttctgtgttattttgctaactggatacaaagaactgacacttctgtatgaagagtttaacctcaaccatctcgaggatgagttgtttgttttcaggactgtatctggacaacactgtagtaatacttcgtaacagaaagcaaaagatatgattcgccctagtgccaccagttacatgccctcgttcgttctagccgagttggatgcctttggattattttttttactccgactgtcttggtgtgcttgtcttcagttatttgtccatacaatatacaaatgatctaacactgctgaaaaacgatagcccaagacaaatggagaagcgagagtattaaattctccataaacaacattatcattaggtttaagtgtggcaaaggaaattccat

SEQ ID NO: 50703 - DNA, 2355 bp, Zea Mays
cgccttcctactacaaaggacgcatctggccgacgccgaccaggcgactcctggtcagtgggcactgggcaggcactccggcactggctccttccttccctttccctgatccctcgtccagtcgtcctcctctgcccggtacagctgcgaagccggcactggctctgctctgctcgccagcagcaccgacctccactctacgtctccaccagaccaccagcaaggcgagctcctttttcactcccccaaatctctgaataaaaaatcgcgcaagcaacctcgctccaccggcctccgcaagttcgttcagtcaggtcaggtcccagcccacgcagcatttgacagcgcgaggcggttgcccagtcagctggggtggacggctttgatttgcttcgaagggagtgagattggttgaagccttcgaccaaggttgtcgatggattctgggatttgggcatctgtttggagcttcatcaagttcctgcctttcttctttgcgcttctcctcctgggcatcatcaaaggtgctttgtttggcccatgggcatggcttgtcatgacaattggaatttctgcacttattctaggcttatggcctatgcatgtgatttggacatattactgcatcatcaggatggaacatggagcactatcacaggaagctgtacagttgtcagggacatgaaagacatgttggtacactcatatttttcaatcatggatgaagttcgtcttcatgcaccacccgacggcaagccatatgagataagttccccgttatgctattcaaaggatggaagcggttgattgaagatcttattggcagagaaggaccttttcttgagacagcttgcatgccatttgctggtcttgcaattcttctctggccatttgcagttataggagcttttatagcctctgttatttgcagtgttccttttggtgtatatgctgctgtggtggtttatcaggaatcctcacttttcttgggactgtcttatgcaatatcatcagtatccatctttgatgaatatacaaatgacgtacttgacatggcaccaggatcttgctttcctaggtttaaatataggacaaatgaagcttcctcacatggtggctctctctcgagacccgcttcattcaaggacaagcatgatggaaagaaagcccctcagcgtgtaacatcatttaaaagtagctttgatgagttcaatccattcaagttgctagatcaccttttcatagagtgtaagcaccatggcaaggatctggtcgctgaaggagtgataaccccaaaagatatagaaggaacaaaggcaggcaaagccagcactggggtacttaatgttgggttaccagcatatgttatccttaaggcactcctccgatctgctaaagccaattctgatggtctcgttctaagtaatggatctgagataacatccgacaataggcctacgagtaaaatctttgagtggttttttgaccctctgatggtaatcaaagatcaaatcaaagctgaaaacttcacagaagaagaggaagcataccttgagaagcaagtgctcttgattagtgatccaaagcgcatcaaggagaatctcattcggcttccaccattgagtgagagaaaacaagcagaaatagaagcatttgctcgaaggttgcaagggatcacaaagtcgatatcaaggtaccccacatccaagcgtcgcttcgacgcccttgtgaaggctctttcagaagagcttgcaaggacaatgggtggtaatcaatctgccaatgggtctcaggtccggaagataagaagtggtatcgtccgaatgcttagtcagagatcactagggaaaacaacaggcatcccgggcgatgatcatgaggctcagctaacaagcgatggtttcacttcatgatgttctggaggtgttcaactgtaacctcagtttgaaaaggagatactacttttctgtgttattttgctaactggatacaaagaactgacacttctgtatgaagagtttaacctcaaccatctcgaggatgagttgtttgttttcaggactgtatctggacaacactgtagtaatacttcgtaacagaaagcaaaagatatgattcgccctagtgccaccagttacatgccctcgttcgttctagccgagttggatgcctttggattattttttttactccgactgtcttggtgtgcttgtcttcagttatttgtccatacaatatacaaatgatctaacactgctgaaaaacgatagcccaagacaaatggagaagcgagagtattaaattctccataaacaacattatcattaggtttaagtgtggcaaaggaaattccat

SEQ ID NO: 50704 - DNA, 3209 bp, Zea Mays
cgccttcctactacaaaggacgcatctggccgacgccgaccaggcgactcctggtcagtgggcactgggcaggcactccggcactggctccttccttccctttccctgatccctcgtccagtcgtcctcctctgcccggtacagctgcgaagccggcactggctctgctctgctcgccagcagcaccgacctccactctacgtctccaccagaccaccagcaaggcgagctcctttttcactcccccaaatctctgaataaaaaatcgcgcaagcaacctcgctccaccggcctccgcaagttcgttcagtcaggtcaggtcccagcccacgcagcatttgacagcgcgaggcggttgcccagtcagctggggtggacggctttgatttgcttcgaagggagtgagattggttgaagccttcgaccaaggttgtcgatggattctgggatttgggcatctgtttggagcttcatcaagttcctgcctttcttctttgcgcttctcctcctgggcatcatcaaaggtgctttgtttggcccatgggcatggcttgtcatgacaattggaatttctgcacttattctaggcttatggcctatgcatgtgatttggacatattactgcatcatcaggtagagtttgcagtcctgaaaggaaagtcatgcaatgtggtgtatttggatgtgcttatcacctttttatgaaagcagaaccaagatggtaggaccggtcgtaaagttgctgcttcttattgttgcaactgcggttttggttatatggctaataattggcgtcgtgggaagcatccttgctggtttggcctatggctttctcgcaccagtaatggctacatttgatgcgattggggaaggaaaagaaaatccacttgttcactgttttttggatggaacatggagcactatcacaggaagctgtacagttgtcagggacatgaaagacatgttggtacactcatatttttcaatcatggatgaagttcgtcttcatgcaccacccgacggcaagccatatgagataaggtcttagttctactttctatttgttattgttttcggccttttcattcttccttataactatatgtgttaacaagtgagtagcaattgtactaaatgagacattactttcatccggtactctacttaaaatattttgtctgtttgttatcttggttagcttttgttacacatcataaacagttcatgttaacaataaaatacactgtatgtggtcacaagaaagacaagaaatacacaattaattaatacttgagaactcactttaaaaagaaatgatatgggggagtgtcccatgtaaattgaagttcagtattcttttaaattttgatctgattgctaatatttaaaaaccattgtagtgattttcttttaattgaggaattccgtatggcataaaataattaatttccccagattgctacaaattcctggtgcaatatttgctgctgcttgtgggcttgtagtggatgcaataatgttcacactgattgccttgtacaagttccccgttatgctattcaaaggatggaagcggttgattgaagatcttattggcagagaaggaccttttcttgagacagcttgcatgccatttgctggtcttgcaattcttctctggccatttgcagttataggagcttttatagcctctgttatttgcagtgttccttttggtgtatatgctgctgtggtggtttatcaggaatcctcacttttcttgggactgtcttatgcaatatcatcagtatccatctttgatgaatatacaaatgacgtacttgacatggcaccaggatcttgctttcctaggtttaaatataggacaaatgaagcttcctcacatggtggctctctctcgagacccgcttcattcaaggacaagcatgatggaaagaaagcccctcagcgtgtaacatcatttaaaagtagctttgatgagttcaatccattcaagttgctagatcaccttttcatagagtgtaagcaccatggcaaggatctggtcgctgaaggagtgataaccccaaaagatatagaaggaacaaaggcaggcaaagccagcactggggtacttaatgttgggttaccagcatatgttatccttaaggcactcctccgatctgctaaagccaattctgatggtctcgttctaagtaagggtgcctttttttcaccgctaaagaggtttgttgtaccttttattgacctgccagactttcctgtgaaatatgcaggtaatggatctgagataacatccgacaataggcctacgagtaaaatctttgagtggttttttgaccctctgatggtaatcaaagatcaaatcaaagctgaaaacttcacagaagaagaggaagcataccttgagaagcaagtgctcttgattagtgatccaaagcgcatcaaggagaatctcattcggcttccaccattgagtgagagaaaacaagcagaaatagaagcatttgctcgaaggttgcaagggatcacaaagtcgatatcaaggtaccccacatccaagcgtcgcttcgacgcccttgtgaaggctctttcagaagagcttgcaaggacaatgggtggtaatcaatctgccaatgggtctcaggtccggaagataagaagtggtatcgtccgaatgcttagtcagagatcactagggaaaacaacaggcatcccgggcgatgatcatgaggctcagctaacaagcgatggtttcacttcatgatgttctggaggtgttcaactgtaacctcagtttgaaaaggagatactacttttctgtgttattttgctaactggatacaaagaactgacacttctgtatgaagagtttaacctcaaccatctcgaggatgagttgtttgttttcaggactgtatctggacaacactgtagtaatacttcgtaacagaaagcaaaagatatgattcgccctagtgccaccagttacatgccctcgttcgttctagccgagttggatgcctttggattattttttttactccgactgtcttggtgtgcttgtcttcagttatttgtccatacaatatacaaatgatctaacactgctgaaaaacgatagcccaagacaaatggagaagcgagagtattaaattctccataaacaacattatcattaggtttaagtgtggcaaaggaaattccat

SEQ ID NO: 50705 - DNA, 2586 bp, Zea Mays
cgccttcctactacaaaggacgcatctggccgacgccgaccaggcgactcctggtcagtgggcactgggcaggcactccggcactggctccttccttccctttccctgatccctcgtccagtcgtcctcctctgcccggtacagctgcgaagccggcactggctctgctctgctcgccagcagcaccgacctccactctacgtctccaccagaccaccagcaaggcgagctcctttttcactcccccaaatctctgaataaaaaatcgcgcaagcaacctcgctccaccggcctccgcaagttcgttcagtcaggtcaggtcccagcccacgcagcatttgacagcgcgaggcggttgcccagtcagctggggtggacggctttgatttgcttcgaagggagtgagattggttgaagccttcgaccaaggttgtcgatggattctgggatttgggcatctgtttggagcttcatcaagttcctgcctttcttctttgcgcttctcctcctgggcatcatcaaaggtgctttgtttggcccatgggcatggcttgtcatgacaattggaatttctgcacttattctaggcttatggcctatgcatgtgatttggacatattactgcatcatcagaaccaagatggtaggaccggtcgtaaagttgctgcttcttattgttgcaactgcggttttggttatatggctaataattggcgtcgtgggaagcatccttgctggtttggcctatggctttctcgcaccagtaatggctacatttgatgcgattggggaaggaaaagaaaatccacttgttcactgttttttggatggaacatggagcactatcacaggaagctgtacagttgtcagggacatgaaagacatgttggtacactcatatttttcaatcatggatgaagttcgtcttcatgcaccacccgacggcaagccatatgagataagtggatgcaataatgttcacactgattgccttgtacaagttccccgttatgctattcaaaggatggaagcggttgattgaagatcttattggcagagaaggaccttttcttgagacagcttgcatgccatttgctggtcttgcaattcttctctggccatttgcagttataggagcttttatagcctctgttatttgcagtgttccttttggtgtatatgctgctgtggtggtttatcaggaatcctcacttttcttgggactgtcttatgcaatatcatcagtatccatctttgatgaatatacaaatgacgtacttgacatggcaccaggatcttgctttcctaggtttaaatataggacaaatgaagcttcctcacatggtggctctctctcgagacccgcttcattcaaggacaagcatgatggaaagaaagcccctcagcgtgtaacatcatttaaaagtagctttgatgagttcaatccattcaagttgctagatcaccttttcatagagtgtaagcaccatggcaaggatctggtcgctgaaggagtgataaccccaaaagatatagaaggaacaaaggcaggcaaagccagcactggggtacttaatgttgggttaccagcatatgttatccttaaggcactcctccgatctgctaaagccaattctgatggtctcgttctaagtaatggatctgagataacatccgacaataggcctacgagtaaaatctttgagtggttttttgaccctctgatggtaatcaaagatcaaatcaaagctgaaaacttcacagaagaagaggaagcataccttgagaagcaagtgctcttgattagtgatccaaagcgcatcaaggagaatctcattcggcttccaccattgagtgagagaaaacaagcagaaatagaagcatttgctcgaaggttgcaagggatcacaaagtcgatatcaaggtaccccacatccaagcgtcgcttcgacgcccttgtgaaggctctttcagaagagcttgcaaggacaatgggtggtaatcaatctgccaatgggtctcaggtccggaagataagaagtggtatcgtccgaatgcttagtcagagatcactagggaaaacaacaggcatcccgggcgatgatcatgaggctcagctaacaagcgatggtttcacttcatgatgttctggaggtgttcaactgtaacctcagtttgaaaaggagatactacttttctgtgttattttgctaactggatacaaagaactgacacttctgtatgaagagtttaacctcaaccatctcgaggatgagttgtttgttttcaggactgtatctggacaacactgtagtaatacttcgtaacagaaagcaaaagatatgattcgccctagtgccaccagttacatgccctcgttcgttctagccgagttggatgcctttggattattttttttactccgactgtcttggtgtgcttgtcttcagttatttgtccatacaatatacaaatgatctaacactgctgaaaaacgatagcccaagacaaatggagaagcgagagtattaaattctccataaacaacattatcattaggtttaagtgtggcaaaggaaattccat

SEQ ID NO: 50706 - DNA, 6852 bp, Zea Mays
cctgtggagatgatcgataaagtccgatacgacattcagacatgtcgccgatcagatcgcctgcctgatgagacgacaacaaaatgcaacttctctgattgactcgattgatcaaagaagacttcgacctagggctaggaagcagaaactgcagaaggtgccggtgggttcacgtggaccccgatcctcgagcacctcggatggtcgacgcgtggagatccttgtgatggaaggcgcgcgagatggagcacctcccagtctcccaccgtcccgctcggttgctcttgctcggatcgctcgcgcacggcactggctttcccgtcgcagtcatgaatgcggcaccgagcacgtactcggtcaccgacaggtgggccctaggtcgccgagtcgctgacaatagcgcaatggccagcaccaatttgacaaatcaccacccgccaactctcccactgccacctggggcccatgtgtaagctcgctctccacgatcctccgctgcagctgcaggcggaacgcatcctgggcgccgggactggcgtgggcgcgtggcccacaacccatcgtctccaccgaataggagtacaggacacaccggactcgctgctctcccccgcgttaccgcgtagccgatgcccgatggcttgatcagatcccccacccggacccggcccagatctgtcgtcgccgccgcagtcgccatgggtgaccactctgactccgattcctcccccaagtcctcctcgtcctcgtcctccccctccgcccgccgccgttcctcgccgcagcgcagccgggcccacactgacgagaccggcagcagcgacggcgtcctcgtcgagcttcctactcaggaagcgcggagccccggggccgaccctgacagcggcgtcctcgtcaacatgcccgctgacgacgccaccagcggcgagaccttcgacgacgcccccgaagatctcgcggccgccggctcgctctccgcacgctcgctggacgagtccatagccgtcatcgacttccctgaggtttccagcaccagcgccgagctccgcaagtaccaggaagagaaggctgtatttgctcgggaggcagtggcactccggaggttgctacaggagatgttggggcaggaagcttcagttgcgttgcatggagaggacgctgacgagacactgttgcattcaatgctggacgactgctcgaggcttgtgcttgaacttaactcgatggcacgggccagggagcaagagattgagagcctacatgccagggctgcagaggcagaggtatcaagtgaggttgctcatgtatacctgggttcgtggagagaagggtctgagcaagctgttgggcggatgcttgcatcaattgatgctgtggttaggcaagatgatgccagctttgagggtgctgaccaggatgggatttctattctggaaaggaagacttcattgcttgtggagaggtacaggcaggcctcgatgggtattgaacagcttgagcaaattttagctgaggtgaagcctggtttcgcggccacagggcacggtgaccttgctaccactttaagtgttctttcagatgaattggttggtagcaagagaaatgaggtggatttactgcagaagatgaatgcttttgctgaagagaagaaggctattgctgatgaacttgaggaagtgaaagctgctaggaatgcagtgaatgctgaggcaagcaaagcaaaggcagagtttgagcagatggagcaaaagttatcaacgactaaggagaagctcagcatggctgttacgaagggcaagtcactggtgcaacaccgtgattccttgaagcaggccttggctgaaaagacgggtgagcttcagagttgcatgacagaattgcaaaagaagtctgatgccctgcaagcagctgagagcagggttgatgagctacagatttttttagatgaaaagacaagtgagcatgaaaagtgcttggatgagcttcgagacacatatagtgcatgggaagctgctaagaccagcatggagcaattaaatgaatcaaaaagtgccctgcatgcttccctttcactaaaggatggggtttttgaacgcattgaagatatcatgtcagaggcaacatttccagaagatcttctttccttggagatgacagataggttgggatggttagttgagcagaagaaaattgcagatatgatcttctcagagcatcagaaagttaaagaaatcttgagctctgttgacattccacattctgtcttaacctctgaacttgattcccagatcagttggcttgccagctcactgaaccaggccaaagatgatgcggtccggttgcgtgatgagtctgctgaaatgttggctaaaatggctgcacatgaatcaaagctggtgtcaatgcatgaggaaattgaccgtttgacaattattctactggaagagaaacaggaaaaggatattcttttaaatgaacattctgaattgatgtccctatacaaagctgctgttaataagttgtcccttgtctcatcacaaaataatgagttgctaaaggcatttgcggaattttttgatgtcacattggagggtagtcagtctatggatattgccaaattggtacagcagggcctcagaaatatccaacaaagaccaaaatcttctcctattgagagtggcagctttgagaagctacaagcactactgtataccctagaccaggaatcaacactatgtaagatgattcttgaagaagacatgattaacagatctgagaggactggtgaacttcaaagaatggctgaggagattattgttctgaaaaatgagaaggtatcactgcagaaggaggttgaacgggtggaggagagatcagcattgcttagagagaagctgtcaatggctgtaaagaagggcaagggtctggtacatgagcgtgaaggactcaagcaagctctcgacgagaagagatctcaaatagagaatttgaaacaagttttggaagggaagagctctgagatagagaagttaaaacatgctctggatgaaaataagtctgtaacagagaatgtgaagcaagttttggacgggaaaaacactgagattgaaaggcttaaacatgctctgggtgatagttgcgtggaaacagaaaacttaaaacaagcttttgctgagaaaacctctgaagcatataaaataaaacaagaactggatgcaaagaacatggatattgagaatctaagaggtgcgatagagtcaagagaatctgccatgacagatctcagagagcatgttgaacatctattgtcgtcgcaggttgcacgtttggaaaagttgcaagtagatattgttacccttaatgatgaaaaggtgaaattagaaagcatgttggaagaagccagagcttcctgggacactcttgctgattcaatatcaagccttactcttcctattgatcagccttttgaggggcctatggaaaagtttagccagattgcccaatacatccaggaatctcaagttgctaagagttctcttgaaaatgagctacagaaagcaaatgagcaaattaccttacatgctagcaggcattctgatgccctttccacaataaacatgttagaacatgagttgagtaaactaaaagatcatatttcttccatttctgaagaaaaacgtcaaatgcagttaaatacttctgctgtacaggaggagttggagaaaacaaacgaggaactggcaatcaatttcaggaaccttgaaagtgccaacaccaccattaattcactacaagatgcactatcacaggctagatcaaatatttttattcttgctgctgaaaagaatgaagctgaagctaaatatgaaacagaaataaatgctcttaatgctgagctaaccaaatgtttggaggagttggataaaactcatgggcacttacaaagtcattcaacagaatatcatggttaccttgagaagcttggcatgtttatgatggatgatagtctcttgtctctgatagctgaagaatatggaaagacattcaacagcttgagagatatgtgtcttatagtcaagagtatgcatgagcagctttctgtgaagagttttcagaatgattcaattgtggaggattcagaactctcatcacttttatctcttccggactatgagagctttgttagagaaagattggtcaagaacataaatagaaaagggaatattgatgacacttcatccttctctactattgttgaacagttgagcaaccaaactgaatacctttctagttttttaaaagatttgtcaacctacatgaatagcaatattattgtggtgcttcgttctctgcaactagtgagcaacacctttgcccatactctagaagagcatgacatgttgaaggttgaattggggaacaaggatgctcataacagagctcaagaatctgaagtgctttctctacaaaaagatctgagagcaatgtcatcaaaatgtatttattgcgtccaacaaattgaaattgtttttgacgatatggttgatcttggatatgcaatagacttggctacaggcagctcaagcatagggtctgaactagaggtaactgtgtctgatctgaagaatgaggataccagtgattatagtaaggtggctgatactttgcttgctacaattgacacacttaagtccaagtctgaaaaattatctaccattaaggggcttgtgataacttcattggatgacttcaaaatgaagctgaaacaagctgaagcagctgctgaaactgcttcacatgagcatcagttgtctgttgaaagggtatgcatgctggagaaagaactcaaaatattacaggatgagtgcaacaaaatggaactaaatattcaagagtataaggaaagggagggtgcattgaaggcaagggagttagagttgctatcagttgagcacactcaaatttcagcagacagaggtttaactgacaatgcaatttcaaaagatcaaacggaagctcttgttgagaagataagtaagttaaatatgctgtcaggcgagtcaaatgtgcagagggaagaggctacaagtccgcttgacaaactttttgttgtcattgatgaattcagtgcacttcaacacgaggttgagaccttaagatatgaaaatgaagatttacagttaaatattgaatcctatacccgtgaaattgaacagctaagagaggtctccagaaatagtgatctaactaatagggagttggaatccaaaggaagtgagcttcttgaggtagctgttagtatggagcgaatgattcagcggttaggatatcttggaggaaaagatgtactagaagataacaaacctgctagcacacaagctctcttatcgaagctggaaaagctaataatagcttcaagtactgaatctgggaattctaaatccataatacaggagctgggagcaaagctgcagtcaagggaaaaggcagttgatgagctatcaacaaaagtaaagatgctcgaggatttgtgccatgcacaactttctcagccagaacctagtaaagacagatcatttgaagcatcttcctcaacaattgggtcagatatgtctgatattgaagatgcgggaccagtgggcaagacaacatcagtttcatctgtttctacagctgcacatgctagaacaatgcggaaggggtcagcggatcatcttgttgtcaacattggttcagagtcagaacgattgattgctgcacaagattcagatgacaaggggcgtataaaatcgctccatacatctggcttcattccagctcagggaaagcacatcgctgatagggtcgatgccttctgggtctcggggagccaaattctgatgaaccggccacgagcaaggctagggcttatgttgtactggctggctgtgcacctatggttgatgggcagcatcttgtgacaccgcttctcaataccgagacccatctcataattgtacaatagcacgtattagcagtttcttcttccattcatacaatacatggtagatgttagaaataccatttttttcattgtcttcctcctgctgagatttgcacttgagcagtatgtgttgaatttttgcacacaagatgtaacgcgcagaaaaaataacgttgtcattctttggtatagtgaagaggtggtaattgtatttgtagatgtggtggccctgatcacctggtgggccccatcatcgtaaattcgttgtttgaaattgcgtgcgtttgaggtctgacaatgtagaggccttatgggtcgacctttgacgtatgaatagaaacgtatatagttggttacacttttcgctcctccatgaataattttcgattggaggtgactggttatacagtcacaaatctttcctccaaaaaacataaataaaggagtgaatatgtatttgttatcatgaatctgtgtagtttcataagggataaggcataaatcttcatggcatcatttgtgtttttccacacaatttgtaatgcaaaagaatgtagggtgtttcaaccaaacaacaagaaacaaaaaagatttaaatacatccttaacatactaacatttttacggtggggctgctcatttaaactggactggaaacaaaataacaccgtaaaaatgttggcttttgacaaatctgacactgaatacgccaaagaccacagttgttaccaaaagaaatgcagagttccaatctctcactctcacctttcagacaaccacaggaaccagctggtacaacttgacggtccaccttctaaataaccagaatttgctacgtaagttctgtacaacagcaggacacatccctg

SEQ ID NO: 50707 - DNA, 5885 bp, Zea Mays
ccggacccggcccagatctgtcgtcgccgccgcagtcgccatgggtgaccactctgactccgattcctcccccaagtcctcctcgtcctcgtcctccccctccgcccgccgccgttcctcgccgcagcgcagccgggcccacactgacgagaccggcagcagcgacggcgtcctcgtcgagcttcctactcaggaagcgcggagccccggggccgaccctgacagcggcgtcctcgtcaacatgcccgctgacgacgccaccagcggcgagaccttcgacgacgcccccgaagatctcgcggccgccggctcgctctccgcacgctcgctggacgagtccatagccgtcatcgacttccctgaggtttccagcaccagcgccgagctccgcaagtaccaggaagagaaggctgtatttgctcgggaggcagtggcactccggaggttgctacaggagatgttggggcaggaagcttcagttgcgttgcatggagaggacgctgacgagacactgttgcattcaatgctggacgactgctcgaggcttgtgcttgaacttaactcgatggcacgggccagggagcaagagattgagagcctacatgccagggctgcagaggcagaggtatcaagtgaggttgctcatgtatacctgggttcgtggagagaagggtctgagcaagctgttgggcggatgcttgcatcaattgatgctgtggttaggcaagatgatgccagctttgagggtgctgaccaggatgggatttctattctggaaaggaagacttcattgcttgtggagaggtacaggcaggcctcgatgggtattgaacagcttgagcaaattttagctgaggtgaagcctggtttcgcggccacagggcacggtgaccttgctaccactttaagtgttctttcagatgaattggttggtagcaagagaaatgaggtggatttactgcagaagatgaatgcttttgctgaagagaagaaggctattgctgatgaacttgaggaagtgaaagctgctaggaatgcagtgaatgctgaggcaagcaaagcaaaggcagagtttgagcagatggagcaaaagttatcaacgactaaggagaagctcagcatggctgttacgaagggcaagtcactggtgcaacaccgtgattccttgaagcaggccttggctgaaaagacgggtgagcttcagagttgcatgacagaattgcaaaagaagtctgatgccctgcaagcagctgagagcagggttgatgagctacagatttttttagatgaaaagacaagtgagcatgaaaagtgcttggatgagcttcgagacacatatagtgcatgggaagctgctaagaccagcatggagcaattaaatgaatcaaaaagtgccctgcatgcttccctttcactaaaggatggggtttttgaacgcattgaagatatcatgtcagaggcaacatttccagaagatcttctttccttggagatgacagataggttgggatggttagttgagcagaagaaaattgcagatatgatcttctcagagcatcagaaagttaaagaaatcttgagctctgttgacattccacattctgtcttaacctctgaacttgattcccagatcagttggcttgccagctcactgaaccaggccaaagatgatgcggtccggttgcgtgatgagtctgctgaaatgttggctaaaatggctgcacatgaatcaaagctggtgtcaatgcatgaggaaattgaccgtttgacaattattctactggaagagaaacaggaaaaggatattcttttaaatgaacattctgaattgatgtccctatacaaagctgctgttaataagttgtcccttgtctcatcacaaaataatgagttgctaaaggcatttgcggaattttttgatgtcacattggagggtagtcagtctatggatattgccaaattggtacagcagggcctcagaaatatccaacaaagaccaaaatcttctcctattgagagtggcagctttgagaagctacaagcactactgtataccctagaccaggaatcaacactatgtaagatgattcttgaagaagacatgattaacagatctgagaggactggtgaacttcaaagaatggctgaggagattattgttctgaaaaatgagaaggtatcactgcagaaggaggttgaacgggtggaggagagatcagcattgcttagagagaagctgtcaatggctgtaaagaagggcaagggtctggtacatgagcgtgaaggactcaagcaagctctcgacgagaagagatctcaaatagagaatttgaaacaagttttggaagggaagagctctgagatagagaagttaaaacatgctctggatgaaaataagtctgtaacagagaatgtgaagcaagttttggacgggaaaaacactgagattgaaaggcttaaacatgctctgggtgatagttgcgtggaaacagaaaacttaaaacaagcttttgctgagaaaacctctgaagcatataaaataaaacaagaactggatgcaaagaacatggatattgagaatctaagaggtgcgatagagtcaagagaatctgccatgacagatctcagagagcatgttgaacatctattgtcgtcgcaggttgcacgtttggaaaagttgcaagtagatattgttacccttaatgatgaaaaggtgaaattagaaagcatgttggaagaagccagagcttcctgggacactcttgctgattcaatatcaagccttactcttcctattgatcagccttttgaggggcctatggaaaagtttagccagattgcccaatacatccaggaatctcaagttgctaagagttctcttgaaaatgagctacagaaagcaaatgagcaaattaccttacatgctagcaggcattctgatgccctttccacaataaacatgttagaacatgagttgagtaaactaaaagatcatatttcttccatttctgaagaaaaacgtcaaatgcagttaaatacttctgctgtacaggaggagttggagaaaacaaacgaggaactggcaatcaatttcaggaaccttgaaagtgccaacaccaccattaattcactacaagatgcactatcacaggctagatcaaatatttttattcttgctgctgaaaagaatgaagctgaagctaaatatgaaacagaaataaatgctcttaatgctgagctaaccaaatgtttggaggagttggataaaactcatgggcacttacaaagtcattcaacagaatatcatggttaccttgagaagcttggcatgtttatgatggatgatagtctcttgtctctgatagctgaagaatatggaaagacattcaacagcttgagagatatgtgtcttatagtcaagagtatgcatgagcagctttctgtgaagagttttcagaatgattcaattgtggaggattcagaactctcatcacttttatctcttccggactatgagagctttgttagagaaagattggtcaagaacataaatagaaaagggaatattgatgacacttcatccttctctactattgttgaacagttgagcaaccaaactgaatacctttctagttttttaaaagatttgtcaacctacatgaatagcaatattattgtggtgcttcgttctctgcaactagtgagcaacacctttgcccatactctagaagagcatgacatgttgaaggttgaattggggaacaaggatgctcataacagagctcaagaatctgaagtgctttctctacaaaaagatctgagagcaatgtcatcaaaatgtatttattgcgtccaacaaattgaaattgtttttgacgatatggttgatcttggatatgcaatagacttggctacaggcagctcaagcatagggtctgaactagaggtaactgtgtctgatctgaagaatgaggataccagtgattatagtaaggtggctgatactttgcttgctacaattgacacacttaagtccaagtctgaaaaattatctaccattaaggggcttgtgataacttcattggatgacttcaaaatgaagctgaaacaagctgaagcagctgctgaaactgcttcacatgagcatcagttgtctgttgaaagggtatgcatgctggagaaagaactcaaaatattacaggatgagtgcaacaaaatggaactaaatattcaagagtataaggaaagggagggtgcattgaaggcaagggagttagagttgctatcagttgagcacactcaaatttcagcagacagaggtttaactgacaatgcaatttcaaaagatcaaacggaagctcttgttgagaagataagtaagttaaatatgctgtcaggcgagtcaaatgtgcagagggaagaggctacaagtccgcttgacaaactttttgttgtcattgatgaattcagtgcacttcaacacgaggagctgggagcaaagctgcagtcaagggaaaaggcagttgatgagctatcaacaaaagtaaagatgctcgaggatttgtgccatgcacaactttctcagccagaacctagtaaagacagatcatttgaagcatcttcctcaacaattgggtcagatatgtctgatattgaagatgcgggaccagtgggcaagacaacatcagtttcatctgtttctacagctgcacatgctagaacaatgcggaaggggtcagcggatcatcttgttgtcaacattggttcagagtcagaacgattgattgctgcacaagattcagatgacaaggggcgtataaaatcgctccatacatctggcttcattccagctcagggaaagcacatcgctgatagggtcgatgccttctgggtctcggggagccaaattctgatgaaccggccacgagcaaggctagggcttatgttgtactggctggctgtgcacctatggttgatgggcagcatcttgtgacaccgcttctcaataccgagacccatctcataattgtacaatagcacgtattagcagtttcttcttccattcatacaatacatggtagatgttagaaataccatttttttcattgtcttcctcctgctgagatttgcacttgagcagtatgtgttgaatttttgcacacaagatgtaacgcgcagaaaaaataacgttgtcattctttggtatagtgaagaggtggtaattgtatttgtagatgtggtggccctgatcacctggtgggccccatcatcgtaaattcgttgtttgaaattgcgtgcgtttgaggtctgacaatgtagaggccttatgggtcgacctttgacgtatgaatagaaacgtatatagttggttacacttttcgctcctccatgaataattttcgattggaggtgactggttatacagtcacaaatctttcctccaaaaaacataaataaaggagtgaatatgtatttgttatcatgaatctgtgtagtttcataagggataaggcataaatcttcatggcatcatttgtgtttttccacacaatttgtaatgcaaaagaatgtagggtgtttcaaccaaacaacaagaaacaaaaaagatttaaatacatccttaacatactaacatttttacggtggggctgctcatttaaactggactggaaacaaaataacaccgtaaaaatgttggcttttgacaaatctgacactgaatacgccaaagaccacagttgttaccaaaagaaatgcagagttccaatctctcactctcacctttcagacaaccacaggaaccagctggtacaacttgacggtccaccttctaaataaccagaatttgctacgtaagttctgtacaacagcaggacacatccctg

SEQ ID NO: 50708 - DNA, 2518 bp, Zea Mays
tttggaaatacgattgactgcaggttatcttctattcgatatggcactgcacggtctggttcttgttcctgagcagttgagctgcgcacaccgacttcttttgcacaaggtacagcagcgcaggcgcggcggcagcccgccgctggatctctcccgaggctccggcgatggagcggtcctgctacttcccgctgcggtgggagagcacgggcgaccagtggtggtacgcgtcgccgatagactgggcggcggccgacggccactacgacatcgtccgccagctgctgcacctcgaccccaacctgctcatcaagctcacctccctccgccggatccgccgcctcgaggcgctgtgggacgacgacgcccgcttcgccgacgcggcccggaaccgcgcgtccgtcgcccgcagcctgctgctggagtgcgagtgcaggaaccaccgccccggcgccggggagaacacgctgctccgggccgggtacggcggctgggtgctctacgcggcggcgtcggccggggacgccgcgttcgtgcgggagctgctggagagggacccgctgctcgtgttcggcgagggcgagtacggcgtcacggacatgttctacgcggcggccaggggcgggagcgcggacgtgttcaggctgctgctcgaccacgccatgtcgccgaggtgctcgacgagttgccggaacggcgaagccagcgccaggcgcagctccgtgttccggcttgagatgatgagccgggccgtccacgccgcggcgaggggcgggagcgtggagatgctcagggagctgctcgacgagtccagcgtgtcgacgtatctcgacatccgtggatccaccgtgctgcatgccgccgctgggagagggcagctgcaggttgtcaagtaccttgtggcctctttcgacataatcaattcgactgataatcacgggaacacagcgctgcatgtagcggcctaccgagggcaccaacctgtcgtggaagccttggttgctgcgtctccatcaaccttgtcagttgtcaacaacgccggtgacacgtttctccactcggcagttacaggattcaggaccccaggattccgacggctcgaccgccagttggagctgatgaggtacctcatacgcgagagaaccgcggatatccagaagatcatcaacctgagaaacgacgcgggccttacagctcttcacctggctgtggttggctgcgcacacccggatctcgtcgagctactgatggccaccccgtccatcgacctgaacgctgaagacgctaatggcatgaccgcgctggcgctgctgaagcagcagctgcgctcagcgacgtccgaccggctcatcaagcagatcgtctctgccggaggggtcttgaactccagcatcctgagaacccggtcagccatcgcttctcagatcaagatgcagggcgggatcgcgagcagccccggcaccactttcaaggtatcggatgcggagatattcctgttctccggcatgggagcggcggagtctctgaggccaagctcctgctccagcaacgggaaggatgatgaccctactcacgcagacgcagactgcgccgagaaccgtggatcgtcggagaagaggctgagctccgcgagccgggccaaagaccgcctcaagatgatgctgagatggcctcgccacaaggacaagacgcccaagaagtcagaggacagcagcccgctggggtcgatcagcaggctgaacgagcacggggccgagacccctgctccgctgaggcagaagtttaccaagacgacggcgctcaacggcaagcggaccctagcggtgaagagctccaccccgagctcctcatccaccaagaagaagctcaacacgaagctcatccacggcatcatggaggccatgccacagctggcgccatctacggcgcggtccgcgtccccgacggacactttcctgaggtcctcggtatcgtccacgccgcagccgctggcgaagctgaaggacatctgcctcgacgacgagatctccatggtgacgccgcccgccggcaggctgaaggatagtgacgacgccatggaggacccctcgtgctccaacaactcgtccatggacgacggctgtggcgccgggacggcagagagcgcggcccggaagcacgggtgcggcaacgggaggctcatcaacatctgctttggcgcgcagggcctcaccgtggaggactcggcgagcgggcagcagacgagcaagatgttcaagcagcagtgcctcagggtgtcctgattgacggcgtggtgtctcgactacaacagcgtggtgtgattggtttggtgtctcgcgtgcagctatgtgtgcttgtttgctttgctccttgcacagccagcggtgaactggtgatccaatgaacttgtgcttgtgttaactgtgacgttgacgaatccacagctctttaacttcctcagtgtcaggtcgtgcattcttcaaacaaatcaccgttgatcaatcacttcctcgaattt

SEQ ID NO: 50709 - DNA, 2762 bp, Zea Mays
cactgatacagattcatcatgcaggcaggcagggactccccccgctcgatcactgtctgttccgctctcttttttccagataggaccactgggctgcagctggagctggactggacggcggcactgcacggtctggttcttgttcctgagcagttgagctgcgcacaccgacttcttttgcacaagtctgcagtttacaaatgctttgagtcctgcgctcctgtcctgctgttcttgtctagcagtaaacaagtcatttcctttgttgtcacatggtggctcgccgagtgctggtgcacacattctctcctcgttccaccttgctgctgctgctgcagttcttggcacggccttgtattcagcgcaggcgcggcggcagcccgccgctggatctctcccgaggctccggcgatggagcggtcctgctacttcccgctgcggtgggagagcacgggcgaccagtggtggtacgcgtcgccgatagactgggcggcggccgacggccactacgacatcgtccgccagctgctgcacctcgaccccaacctgctcatcaagctcacctccctccgccggatccgccgcctcgaggcgctgtgggacgacgacgcccgcttcgccgacgcggcccggaaccgcgcgtccgtcgcccgcagcctgctgctggagtgcgagtgcaggaaccaccgccccggcgccggggagaacacgctgctccgggccgggtacggcggctgggtgctctacgcggcggcgtcggccggggacgccgcgttcgtgcgggagctgctggagagggacccgctgctcgtgttcggcgagggcgagtacggcgtcacggacatgttctacgcggcggccaggggcgggagcgcggacgtgttcaggctgctgctcgaccacgccatgtcgccgaggtgctcgacgagttgccggaacggcgaagccagcgccaggcgcagctccgtgttccggcttgagatgatgagccgggccgtccacgccgcggcgaggggcgggagcgtggagatgctcagggagctgctcgacgagtccagcgtgtcgacgtatctcgacatccgtggatccaccgtgctgcatgccgccgctgggagagggcagctgcaggttgtcaagtaccttgtggcctctttcgacataatcaattcgactgataatcacgggaacacagcgctgcatgtagcggcctaccgagggcaccaacctgtcgtggaagccttggttgctgcgtctccatcaaccttgtcagttgtcaacaacgccggtgacacgtttctccactcggcagttacaggattcaggaccccaggattccgacggctcgaccgccagttggagctgatgaggtacctcatacgcgagagaaccgcggatatccagaagatcatcaacctgagaaacgacgcgggccttacagctcttcacctggctgtggttggctgcgcacacccggatctcgtcgagctactgatggccaccccgtccatcgacctgaacgctgaagacgctaatggcatgaccgcgctggcgctgctgaagcagcagctgcgctcagcgacgtccgaccggctcatcaagcagatcgtctctgccggaggggtcttgaactccagcatcctgagaacccggtcagccatcgcttctcagatcaagatgcagggcgggatcgcgagcagccccggcaccactttcaaggtatcggatgcggagatattcctgttctccggcatgggagcggcggagtctctgaggccaagctcctgctccagcaacgggaaggatgatgaccctactcacgcagacgcagactgcgccgagaaccgtggatcgtcggagaagaggctgagctccgcgagccgggccaaagaccgcctcaagatgatgctgagatggcctcgccacaaggacaagacgcccaagaagtcagaggacagcagcccgctggggtcgatcagcaggctgaacgagcacggggccgagacccctgctccgctgaggcagaagtttaccaagacgacggcgctcaacggcaagcggaccctagcggtgaagagctccaccccgagctcctcatccaccaagaagaagctcaacacgaagctcatccacggcatcatggaggccatgccacagctggcgccatctacggcgcggtccgcgtccccgacggacactttcctgaggtcctcggtatcgtccacgccgcagccgctggcgaagctgaaggacatctgcctcgacgacgagatctccatggtgacgccgcccgccggcaggctgaaggatagtgacgacgccatggaggacccctcgtgctccaacaactcgtccatggacgacggctgtggcgccgggacggcagagagcgcggcccggaagcacgggtgcggcaacgggaggctcatcaacatctgctttggcgcgcagggcctcaccgtggaggactcggcgagcgggcagcagacgagcaagatgttcaagcagcagtgcctcagggtgtcctgattgacggcgtggtgtctcgactacaacagcgtggtgtgattggtttggtgtctcgcgtgcagctatgtgtgcttgtttgctttgctccttgcacagccagcggtgaactggtgatccaatgaacttgtgcttgtgttaactgtgacgttgacgaatccacagctctttaacttcctcagtgtcaggtcgtgcattcttcaaacaaatcaccgttgatcaatcacttcctcgaattt

SEQ ID NO: 50710 - DNA, 2560 bp, Zea Mays
ctctgatcctctctcgctctccctctctctctcatccataacgacatggcacctttgcaccacgctactgccctgcctactactagcactgcacggtctggttcttgttcctgagcagttgagctgcgcacaccgacttcttttgcacaaggtacagcagcgcaggcgcggcggcagcccgccgctggatctctcccgaggctccggcgatggagcggtcctgctacttcccgctgcggtgggagagcacgggcgaccagtggtggtacgcgtcgccgatagactgggcggcggccgacggccactacgacatcgtccgccagctgctgcacctcgaccccaacctgctcatcaagctcacctccctccgccggatccgccgcctcgaggcgctgtgggacgacgacgcccgcttcgccgacgcggcccggaaccgcgcgtccgtcgcccgcagcctgctgctggagtgcgagtgcaggaaccaccgccccggcgccggggagaacacgctgctccgggccgggtacggcggctgggtgctctacgcggcggcgtcggccggggacgccgcgttcgtgcgggagctgctggagagggacccgctgctcgtgttcggcgagggcgagtacggcgtcacggacatgttctacgcggcggccaggggcgggagcgcggacgtgttcaggctgctgctcgaccacgccatgtcgccgaggtgctcgacgagttgccggaacggcgaagccagcgccaggcgcagctccgtgttccggcttgagatgatgagccgggccgtccacgccgcggcgaggggcgggagcgtggagatgctcagggagctgctcgacgagtccagcgtgtcgacgtatctcgacatccgtggatccaccgtgctgcatgccgccgctgggagagggcagctgcaggttgtcaagtaccttgtggcctctttcgacataatcaattcgactgataatcacgggaacacagcgctgcatgtagcggcctaccgagggcaccaacctgtcgtggaagccttggttgctgcgtctccatcaaccttgtcagttgtcaacaacgccggtgacacgtttctccactcggcagttacaggattcaggaccccaggattccgacggctcgaccgccagttggagctgatgaggtacctcatacgcgagagaaccgcggatatccagaagatcatcaacctgagaaacgacgcgggccttacagctcttcacctggctgtggttggctgcgcacacccggatctcgtcgagctactgatggccaccccgtccatcgacctgaacgctgaagacgctaatggcatgaccgcgctggcgctgctgaagcagcagctgcgctcagcgacgtccgaccggctcatcaagcagatcgtctctgccggaggggtcttgaactccagcatcctgagaacccggtcagccatcgcttctcagatcaagatgcagggcgggatcgcgagcagccccggcaccactttcaaggtatcggatgcggagatattcctgttctccggcatgggagcggcggagtctctgaggccaagctcctgctccagcaacgggaaggatgatgaccctactcacgcagacgcagactgcgccgagaaccgtggatcgtcggagaagaggctgagctccgcgagccgggccaaagaccgcctcaagatgatgctgagatggcctcgccacaaggacaagacgcccaagaagtcagaggacagcagcccgctggggtcgatcagcaggctgaacgagcacggggccgagacccctgctccgctgaggcagaagtttaccaagacgacggcgctcaacggcaagcggaccctagcggtgaagagctccaccccgagctcctcatccaccaagaagaagctcaacacgaagctcatccacggcatcatggaggccatgccacagctggcgccatctacggcgcggtccgcgtccccgacggacactttcctgaggtcctcggtatcgtccacgccgcagccgctggcgaagctgaaggacatctgcctcgacgacgagatctccatggtgacgccgcccgccggcaggctgaaggatagtgacgacgccatggaggacccctcgtgctccaacaactcgtccatggacgacggctgtggcgccgggacggcagagagcgcggcccggaagcacgggtgcggcaacgggaggctcatcaacatctgctttggcgcgcagggcctcaccgtggaggactcggcgagcgggcagcagacgagcaagatgttcaagcagcagtgcctcagggtgtcctgattgacggcgtggtgtctcgactacaacagcgtggtgtgattggtttggtgtctcgcgtgcagctatgtgtgcttgtttgctttgctccttgcacagccagcggtgaactggtgatccaatgaacttgtgcttgtgttaactgtgacgttgacgaatccacagctctttaacttcctcagtgtcaggtcgtgcattcttcaaacaaatcaccgttgatcaatcacttcctcgaattt

SEQ ID NO: 50711 - DNA, 2851 bp, Zea Mays
cataacgacatggcacctttgcaccacgctactgccctgcctactactagtactgtctctttgaaccactttggtggcctaatcccgggcccctctgatgatggcttatgagccccagctttgcgcttgcaggcactgcacggtctggttcttgttcctgagcagttgagctgcgcacaccgacttcttttgcacaaggtattgtatttgtcttcggtgttgcagacgtgttcttcccacgcatgcttttaatctttttaaaatctccatttgcgtaagctcagtctgcagtttacaaatgctttgagtcctgcgctcctgtcctgctgttcttgtctagcagtaaacaagtcatttcctttgttgtcacatggtggctcgccgagtgctggtgcacacattctctcctcgttccaccttgctgctgctgctgcagttcttggtacagcagcgcaggcgcggcggcagcccgccgctggatctctcccgaggctccggcgatggagcggtcctgctacttcccgctgcggtgggagagcacgggcgaccagtggtggtacgcgtcgccgatagactgggcggcggccgacggccactacgacatcgtccgccagctgctgcacctcgaccccaacctgctcatcaagctcacctccctccgccggatccgccgcctcgaggcgctgtgggacgacgacgcccgcttcgccgacgcggcccggaaccgcgcgtccgtcgcccgcagcctgctgctggagtgcgagtgcaggaaccaccgccccggcgccggggagaacacgctgctccgggccgggtacggcggctgggtgctctacgcggcggcgtcggccggggacgccgcgttcgtgcgggagctgctggagagggacccgctgctcgtgttcggcgagggcgagtacggcgtcacggacatgttctacgcggcggccaggggcgggagcgcggacgtgttcaggctgctgctcgaccacgccatgtcgccgaggtgctcgacgagttgccggaacggcgaagccagcgccaggcgcagctccgtgttccggcttgagatgatgagccgggccgtccacgccgcggcgaggggcgggagcgtggagatgctcagggagctgctcgacgagtccagcgtgtcgacgtatctcgacatccgtggatccaccgtgctgcatgccgccgctgggagagggcagctgcaggttgtcaagtaccttgtggcctctttcgacataatcaattcgactgataatcacgggaacacagcgctgcatgtagcggcctaccgagggcaccaacctgtcgtggaagccttggttgctgcgtctccatcaaccttgtcagttgtcaacaacgccggtgacacgtttctccactcggcagttacaggattcaggaccccaggattccgacggctcgaccgccagttggagctgatgaggtacctcatacgcgagagaaccgcggatatccagaagatcatcaacctgagaaacgacgcgggccttacagctcttcacctggctgtggttggctgcgcacacccggatctcgtcgagctactgatggccaccccgtccatcgacctgaacgctgaagacgctaatggcatgaccgcgctggcgctgctgaagcagcagctgcgctcagcgacgtccgaccggctcatcaagcagatcgtctctgccggaggggtcttgaactccagcatcctgagaacccggtcagccatcgcttctcagatcaagatgcagggcgggatcgcgagcagccccggcaccactttcaaggtatcggatgcggagatattcctgttctccggcatgggagcggcggagtctctgaggccaagctcctgctccagcaacgggaaggatgatgaccctactcacgcagacgcagactgcgccgagaaccgtggatcgtcggagaagaggctgagctccgcgagccgggccaaagaccgcctcaagatgatgctgagatggcctcgccacaaggacaagacgcccaagaagtcagaggacagcagcccgctggggtcgatcagcaggctgaacgagcacggggccgagacccctgctccgctgaggcagaagtttaccaagacgacggcgctcaacggcaagcggaccctagcggtgaagagctccaccccgagctcctcatccaccaagaagaagctcaacacgaagctcatccacggcatcatggaggccatgccacagctggcgccatctacggcgcggtccgcgtccccgacggacactttcctgaggtcctcggtatcgtccacgccgcagccgctggcgaagctgaaggacatctgcctcgacgacgagatctccatggtgacgccgcccgccggcaggctgaaggatagtgacgacgccatggaggacccctcgtgctccaacaactcgtccatggacgacggctgtggcgccgggacggcagagagcgcggcccggaagcacgggtgcggcaacgggaggctcatcaacatctgctttggcgcgcagggcctcaccgtggaggactcggcgagcgggcagcagacgagcaagatgttcaagcagcagtgcctcagggtgtcctgattgacggcgtggtgtctcgactacaacagcgtggtgtgattggtttggtgtctcgcgtgcagctatgtgtgcttgtttgctttgctccttgcacagccagcggtgaactggtgatccaatgaacttgtgcttgtgttaactgtgacgttgacgaatccacagctctttaacttcctcagtgtcaggtcgtgcattcttcaaacaaatcaccgttgatcaatcacttcctcgaattt

SEQ ID NO: 50712 - DNA, 4254 bp, Zea Mays
cggttctgtctgcctttatttattcgcgttccctgcctgtttcgagcctccagccttaataacccggcattctctccgccgctcgcccgctccgcgtccggcggcccgcgtcgcctccactcccaattagcctatcgtgttcgacgcgagcgaactcgctcagatcagagtgttccctgatccggtcccaatcttttattggattttgtgttttggtaggggatctagggtttgtcgtcgaattccgcctcgaattttagggtttgcttcggatcgattccgttccgtgggattcttgcttgcagcactccatggctgcggcgcggcacgggggttataggagcttcgacgtggccaggaggcgggagttcgacctggagcgttctaggaggagcaaggagtaccgccactcgagccgccaccgcgactcggatcgccaccgtgatggcagcaggggccgtgaagtgcccaacgggtacatccgccaccgctcgccgtatgcgccaccgaagagccgaccttcaaaaaggaaggacgataaggagcctggtgaggtctcaagcgatagcggctcggagtctggtgggcgcccaccagtgctgagggaggatgggggtcttggggtctgcagggatggaggtgcgttgccagcaagcaagaagaggaagcactcacctggattccacgatacgaatgtttcaaagctgcgggcaagagatgaggtgtggagcaggagaggacctgatgccatagctgcggagctccctcttccttcgccgccccctatgtctgcggttggtgggtgctcaccaatggatccagaagttttggtagttccaaatgatgctgaaaggatggacgcgattactgagggggaagaggattgtgcaacgagaaacatttttacttcaaggtgggcggatgctgctgaagaggaggaagtggtgattgtgcctaagaagaagaaaagtgtgccacctgctcatttgcctgaacagaaatccacaaagaaaatcatgggctcagagctgggagaagcgatgggcagtaaaacatcaagaagttcctcaagttcgtctaactcaatgggtagtgaaaactggaatatcgaggtagacgagggtgatggcattgattcttctgttggttgttcgctggatactcattccaggagcaatatgcgtaggtctggatcacctgaggttgtgcgaacaccacgtaggtgctttaacatgcttcagggctgtaggagtattgatgactttgagaggatcaacacaatcaatgagggtacatatggagtcgtatttagggtgagagacaagaaaactggtgagatagttgctttgaagaaggtcaaggtagataaggaaaatggacgggaagggtttccattgacttctctcagagaaatcaatatccttctatcctttgaccatccttcaattgtggatgtcaaggaagtagttgttggtggtcatgacgatgatacttttatggtgatggaatacatggagcatgaccttaagggtgtcatggaggcgatgaagcaaccatatagccaaagtgaggtcaaatgtttgatgcttcagctgctagagggcgtgaagtatcttcatgacaattgggtacttcacagggatctcaagacatcaaatctcctcttgaataaccgcggtgagttgaaaatatgtgactttggactctctcgtcaatatggcagcctgctaaagccttacacccaaccagttgtgactttgtggtacagggctccggaactactattaggagcaaaggagtattcgactgctatcgatatgtggtcattaggttgcataatggcagaactcttgtcaaaagagccactcttcactgggaagtctgagatagatcaacttgataagatatttagaatactcggcacacccaatgaggagcggtggcatggttgttccaaattgcctggcttcaaaggcaacttcgtaaagcgaccgtacaatagattaagggacaaatttccagctgtatccttcacgggaggcttgaccttgtcagaagctgggtttgacctgctaaataggttgctggcatatgaccctgagaagcgcatatctgctgctgatgccttgaaccatgagtggttccgtgaagttcctctgcccaagatgaaggaattcatgccaacttttcctgctctgaatgaacaggacaggaggatcaagagatacatgaagagccctgaccccctggtggagcaacagatgaaagaacaagggagcataggagatcatggcctttttgactgatctgaaagcagacaagtcttgctgcaaatgacagtttttgagtgagtaaacatgttgcaaggtgaggtgtacaactggacagagaagtatcccgtctacttggtgtgcggtgacagcttattgtgttctataacaggctaagagatcaaaggggaacataaattttacttaagttccatgcagctagtgttcaaatggcagggttagctctctacgagaactgtcatattctaacctatcatcattataagttgcagatgtaatgcagttcgtctaaaagttgaatgaagtgaaggaaccggtgcatttttattttcgcaaggaaatcgatactctcttaatgggaattgtaagcttaaagctgtggctgtatcaagagatgaagggttcacggatgccagattacatacctaactgactttttttgtggtcggtcctccaaaggtctcatctgtaattgtgaatccaagtgagttgagctcagctcttttgaatactttggtaatccctgccctcttcatcttcccactccagttctgtttcatcagctcatcatgatttatttatcattcctgtgattcattgcacgatcattatcaatttgtttctttatttgcatggacattaactgttacaaaatgccgccttcgccctcctgtgcccaccatagttgccacgtgttctgggatctatgcttattatttcttggatagttattgaggcaggtaaaagaataaggttaagaatatgttaaattactccttgtgctttggttagatgatattaccaaaaatatatgttgaggtgtaagacaattctgggtttaagtgtttattctcaaacggttgatcaatcatggttttccacttccaagcttgatcctaaccaatccttatgtgatttaattgtcatattttgccactccttcctatcataaaaacatgccgtttaggacaagatttgatcaaaccttaaaacttaaaagctacaaacatttataacttctaatttatttagtttatgattgctgtgtcttgctttgtcagctaccatttttttcatgccataaaatggtggaattgcctgtagagttacataaatgctttctactaacctaagttgagatgtgtgccaatgtatcactgtatcaggtcccaattccacttgttataccatcttttttcttcactggggattgtttttgaataatctgctgataataccgctccgttcttttgagcttttataatctgccagagcttgaaatgtccgcactggtagcagacatggcagattgttagggcacctatggagacgacgtcaaacacatttgaagttaggtgaacttgaatatcgacggagggcagctgataatttatgttggttctttatcttcagaatccagacatcaatcatcccttggtccggcgttctttggggtagggaatcttaaaagaatgtataaacagcctctcgaggtagtgcttgggacaggaaattgcgagttacctccatgacctcttcaatgcaccattgactgcattattgagaaggcagaagacatcattgatcggttggcacgtgcgaacttgcaatcgctttgacctaaaacaatatgccatcattattgagaattcgctatgcgccattcaaaaacaatatgtatatcattatatgccatcaaaatgtttgctgcggcttctatactggtttttctctctcctggtaccacacccgtcaaatggttaactcttatcagaaaagtattaggcgaagaaaattttgaaagctggtatagaaggtagtggcaccactggcatagatgcagaataaatacatccacaatgttttcatatgtgtcagatgacaaaatttatatgttacctatagagattgacatggcctaaaacgtttacttggttacttttcatttatttaagaactttag

SEQ ID NO: 50713 - DNA, 5127 bp, Zea Mays
cggttctgtctgcctttatttattcgcgttccctgcctgtttcgagcctccagccttaataacccggcattctctccgccgctcgcccgctccgcgtccggcggcccgcgtcgcctccactcccaattagcctatcgtgttcgacgcgagcgaactcgctcagatcagagtgttccctgatccggtcccaatcttttattggattttgtgttttggtaggggatctagggtttgtcgtcgaattccgcctcgaattttagggtttgcttcggatcgattccgttccgtgggattcttgcttgcagcactccatggctgcggcgcggcacgggggttataggagcttcgacgtggccaggaggcgggagttcgacctggagcgttctaggaggagcaaggagtaccgccactcgagccgccaccgcgactcggatcgccaccgtgatggcagcaggggccgtgaagtgcccaacgggtacatccgccaccgctcgccgtatgcgccaccgaagagccgaccttcaaaaaggaaggacgataaggagcctggtgaggtctcaagcgatagcggctcggagtctggtgggcgcccaccagtgctgagggaggatgggggtcttggggtctgcagggatggaggtgcgttgccagcaagcaagaagaggaagcactcacctggattccacgatacgaatgtttcaaagctgcgggcaagagatgaggtgtggagcaggagaggacctgatgccatagctgcggagctccctcttccttcgccgccccctatgtctgcggttggtgggtgctcaccaatggatccagaagttttggtagttccaaatgatgctgaaaggatggacgcgattactgagggggaagaggattgtgcaacgagaaacatttttacttcaaggtgggcggatgctgctgaagaggaggaagtggtgattgtgcctaagaagaagaaaagtgtgccacctgctcatttgcctgaacagaaatccacaaagaaaatcatgggctcagagctgggagaagcgatgggcagtaaaacatcaagaagttcctcaagttcgtctaactcaatgggtagtgaaaactggaatatcgaggtagacgagggtgatggcattgattcttctgttggttgttcgctggatactcattccaggagcaatatgcgtaggtctggatcacctgaggttgtgcgaacaccacgtaggtgctttaacatgcttcagggctgtaggagtattgatgactttgagaggatcaacacaatcaatgagggtacatatggagtcgtatttagggtgagagacaagaaaactggtgagatagttgctttgaagaaggtcaaggtagataaggaaaatggacgggaagggtttccattgacttctctcagagaaatcaatatccttctatcctttgaccatccttcaattgtggatgtcaaggaagtagttgttggtggtcatgacgatgatacttttatggtgatggaatacatggagcatgaccttaagggtgtcatggaggcgatgaagcaaccatatagccaaagtgaggtcaaatgtttgatgcttcagctgctagagggcgtgaagtatcttcatgacaattgggtacttcacagggatctcaagacatcaaatctcctcttgaataaccgcggtgagttgaaaatatgtgactttggactctctcgtcaatatggcagcctgctaaagccttacacccaaccagttgtgactttgtggtacagggctccggaactactattaggagcaaaggagtattcgactgctatcgatatgtggtcattaggttgcataatggcagaactcttgtcaaaagagccactcttcactgggaagtctgagatagatcaacttgataagatatttagaatactcggcacacccaatgaggagcggtggcatggttgttccaaattgcctggcttcaaaggcaacttcgtaaagcgaccgtacaatagattaagggacaaatttccagctgtatccttcacgggaggcttgaccttgtcagaagctgggtttgacctgctaaataggttgctggcatatgaccctgagaagcgcatatctgctgctgatgccttgaaccatgagtggttccgtgaagttcctctgcccaagatgaaggaattcatgccaacttttcctgctctgaatgaacaggacaggaggatcaagagatacatgaagagccctgaccccctggtggagcaacagatgaaagaacaagggagcataggagatcatggcctttttgactgatctgaaagcagacaagtcttgctgcaaatgacagtttttgagtgagtaaacatgttgcaaggctaagagatcaaaggggaacataaattttacttaagttccatgcagctagtgttcaaatggcagggttagctctctacgagaactgtcatattctaacctatcatcattataagttgcagatgtaatgcagttcgtctaaaagttgaatgaagtgaaggaaccggtgcatttttattttcgcaaggaaatcgatactctcttaatgggaattgtaagcttaaagctgtggctgtatcaagagatgaagggttcacggatgccagattacatacctaactgactttttttgtggtcggtcctccaaaggtctcatctgtaattgtgaatccaagtgagttgagctcagctcttttgaatactttgttgccacgtgttctgggatctatgcttattatttcttggatagttattgaggcaggtaaaagaataaggttaagaatatgttaaattactccttgtgctttggttagatgatattaccaaaaatatatgttgaggtgtaagacaattctgggtttaagtgtttattctcaaacggttgatcaatcatggttttccacttccaagcttgatcctaaccaatccttatgtgatttaattgtcatattttgccactccttcctatcataaaaacatgccgtttaggacaagatttgatcaaaccttaaaacttaaaagctacaaacatttataacttctaatttatttagtttatgattgctgtgtcttgctttgtcagctaccatttttttcatgccataaaatggtggaattgcctgtagagttacataaatgctttctactaacctaagttgagatgtgtgccaatgtatcactgtatcaggtcccaattccacttgttataccatcttttttcttcactggggattgtttttgaataatctgctgataataccgctccgttcttttgagcttttataatctgccagaggtaactagttgactataaaatctgggaggatgctaccatgtgaattatgtctttctttttacctagttgggtaaaatgcgctaatggtttgctatgcctaaatatgaattcgagttgactatgttcctcattgcaatgtttgtggcacacaggtatagcacttctaattactcctgtgagatggctaatatttccgtgttttttattgggttgatgtgttcatatgattttgttaagaacaacagtaaaatacaatgaatcctggaaagcaagttgtgctaagttatataattttagtaaaacgtattcatgtctttgatactgatgtaattctgaatttctgatgtgagattccaacttaagtacctaactgctttcccagttgcctgaacttgtagggtatttaccattcttatgtcacttctctgaacttgcatgatattcaccattcgtatgtcattataatagcatcttactgtcccttgcatttgtagttgcttggaattatgacgtctttagcacgatctgaagtagggagtatatgtaccacagaacgtctaggaattttgttgtagcagttcatctgagtatatccacttactcttaccatgtgcgattaaagtgcacttgagtttgtttacagcttgaaatgtccgcactggtagcagacatggcagattgttagggcacctatggagacgacgtcaaacacatttgaagttaggtgaacttgaatatcgacggagggcagctgataatttatgttggtcagtgaattgaataactatcttgacttatacctccgaactaggaaagcgcaattctagttctcctgagtgaaaccatctaaaggtagatcaaattcatggaaaaaatatcaatatttatgacatgtaacaggtatattatgagagtattttttaattaagaatctaatatttttattttgtattgtcaatgttgatactttatataaatttggtcaaacttaatagctttgactctatacttatgggtggtattggactctagattttacactatataaaataaaataaaatgtaaggaccaaattggattaagattgggctttattcacattcatttttaaactaaaattaattgatagcctaacttattgtgagaaacatttgatttattaccacccctaactatactataattgcattttttttctgatttgatggagtataatctcattcatttgattgtttggaaaggttctttatcttcagaatccagacatcaatcatcccttggtccggcgttctttggggtagggaatcttaaaagaatgtataaacagcctctcgaggtagtgcttgggacaggaaattgcgagttacctccatgacctcttcaatgcaccattgactgcattattgagaaggcagaagacatcattgatcggttggcacgtgcgaacttgcaatcgctttgacctaaaacaatatgccatcattattgagaattcgctatgcgccattcaaaaacaatatgtatatcattatatgccatcaaaatgtttgctgcggcttctatactggtttttctctctcctggtaccacacccgtcaaatggttaactcttatcagaaaagtattaggcgaagaaaattttgaaagctggtatagaaggtagtggcaccactggcatagatgcagaataaatacatccacaatgttttcatatgtgtcagatgacaaaatttatatgttacctatagagattgacatggcctaaaacgtttacttggttacttttcatttatttaagaactttag

SEQ ID NO: 50714 - DNA, 4982 bp, Zea Mays
cggttctgtctgcctttatttattcgcgttccctgcctgtttcgagcctccagccttaataacccggcattctctccgccgctcgcccgctccgcgtccggcggcccgcgtcgcctccactcccaattagcctatcgtgttcgacgcgagcgaactcgctcagatcagagtgttccctgatccggtcccaatcttttattggattttgtgttttggtaggggatctagggtttgtcgtcgaattccgcctcgaattttagggtttgcttcggatcgattccgttccgtgggattcttgcttgcagcactccatggctgcggcgcggcacgggggttataggagcttcgacgtggccaggaggcgggagttcgacctggagcgttctaggaggagcaaggagtaccgccactcgagccgccaccgcgactcggatcgccaccgtgatggcagcaggggccgtgaagtgcccaacgggtacatccgccaccgctcgccgtatgcgccaccgaagagccgaccttcaaaaaggaaggacgataaggagcctggtgaggtctcaagcgatagcggctcggagtctggtgggcgcccaccagtgctgagggaggatgggggtcttggggtctgcagggatggaggtgcgttgccagcaagcaagaagaggaagcactcacctggattccacgatacgaatgtttcaaagctgcgggcaagagatgaggtgtggagcaggagaggacctgatgccatagctgcggagctccctcttccttcgccgccccctatgtctgcggttggtgggtgctcaccaatggatccagaagttttggtagttccaaatgatgctgaaaggatggacgcgattactgagggggaagaggattgtgcaacgagaaacatttttacttcaaggtgggcggatgctgctgaagaggaggaagtggtgattgtgcctaagaagaagaaaagtgtgccacctgctcatttgcctgaacagaaatccacaaagaaaatcatgggctcagagctgggagaagcgatgggcagtaaaacatcaagaagttcctcaagttcgtctaactcaatgggtagtgaaaactggaatatcgaggtagacgagggtgatggcattgattcttctgttggttgttcgctggatactcattccaggagcaatatgcgtaggtctggatcacctgaggttgtgcgaacaccacgtaggtgctttaacatgcttcagggctgtaggagtattgatgactttgagaggatcaacacaatcaatgagggtacatatggagtcgtatttagggtgagagacaagaaaactggtgagatagttgctttgaagaaggtcaaggtagataaggaaaatggacgggaagggtttccattgacttctctcagagaaatcaatatccttctatcctttgaccatccttcaattgtggatgtcaaggaagtagttgttggtggtcatgacgatgatacttttatggtgatggaatacatggagcatgaccttaagggtgtcatggaggcgatgaagcaaccatatagccaaagtgaggtcaaatgtttgatgcttcagctgctagagggcgtgaagtatcttcatgacaattgggtacttcacagggatctcaagacatcaaatctcctcttgaataaccgcggtgagttgaaaatatgtgactttggactctctcgtcaatatggcagcctgctaaagccttacacccaaccagttgtgactttgtggtacagggctccggaactactattaggagcaaaggagtattcgactgctatcgatatgtggtcattaggttgcataatggcagaactcttgtcaaaagagccactcttcactgggaagtctgagatagatcaacttgataagatatttagaatactcggcacacccaatgaggagcggtggcatggttgttccaaattgcctggcttcaaaggcaacttcgtaaagcgaccgtacaatagattaagggacaaatttccagctgtatccttcacgggaggcttgaccttgtcagaagctgggtttgacctgctaaataggttgctggcatatgaccctgagaagcgcatatctgctgctgatgccttgaaccatgagtggttccgtgaagttcctctgcccaagatgaaggaattcatgccaacttttcctgctctgaatgaacaggacaggaggatcaagagatacatgaagagccctgaccccctggtggagcaacagatgaaagaacaagggagcataggagatcatggcctttttgactgatctgaaagcagacaagtcttgctgcaaatgacagtttttgagtgagtaaacatgttgcaaggtgaggtgtacaactggacagagaagtatcccgtctacttggtgtgcggtgacagcttattgtgttctataacaggctaagagatcaaaggggaacataaattttacttaagttccatgcagctagtgttcaaatggcagggttagctctctacgagaactgtcatattctaacctatcatcattataagttgcagatgtaatgcagttcgtctaaaagttgaatgaagtgaaggaaccggtgcatttttattttcgcaaggaaatcgatactctcttaatgggaattgtaagcttaaagctgtggctgtatcaagagatgaagggttcacggatgccagattacatacctaactgactttttttgtggtcggtcctccaaaggtctcatctgtaattgtgaatccaagtgagttgagctcagctcttttgaatactttggtaatccctgccctcttcatcttcccactccagttctgtttcatcagctcatcatgatttatttatcattcctgtgattcattgcacgatcattatcaatttgtttctttatttgcatggacattaactgttacaaaatgccgccttcgccctcctgtgcccaccatagttgccacgtgttctgggatctatgcttattatttcttggatagttattgaggcaggtaaaagaataaggttaagaatatgttaaattactccttgtgctttggttagatgatattaccaaaaatatatgttgaggtgtaagacaattctgggtttaagtgtttattctcaaacggttgatcaatcatggttttccacttccaagcttgatcctaaccaatccttatgtgatttaattgtcatattttgccactccttcctatcataaaaacatgccgtttaggacaagatttgatcaaaccttaaaacttaaaagctacaaacatttataacttctaatttatttagtttatgattgctgtgtcttgctttgtcagctaccatttttttcatgccataaaatggtggaattgcctgtagagttacataaatgctttctactaacctaagttgagatgtgtgccaatgtatcactgtatcaggtcccaattccacttgttataccatcttttttcttcactggggattgtttttgaataatctgctgataataccgctccgttcttttgagcttttataatctgccagaggtaactagttgactataaaatctgggaggatgctaccatgtgaattatgtctttctttttacctagttgggtaaaatgcgctaatggtttgctatgcctaaatatgaattcgagttgactatgttcctcattgcaatgtttgtggcacacaggtatagcacttctaattactcctgtgagatggctaatatttccgtgttttttattgggttgatgtgttcatatgattttgttaagaacaacagtaaaatacaatgaatcctggaaagcaagttgtgctaagttatataattttagtaaaacgtattcatgtctttgatactgatgtaattctgaatttctgatgtgagattccaacttaagtacctaactgctttcccagttgcctgaacttgtagggtatttaccattcttatgtcacttctctgaacttgcatgatattcaccattcgtatgtcattataatagcatcttactgtcccttgcatttgtagttgcttggaattatgacgtctttagcacgatctgaagtagggagtatatgtaccacagaacgtctaggaattttgttgtagcagttcatctgagtatatccacttactcttaccatgtgcgattaaagtgcacttgagtttgtttacagcttgaaatgtccgcactggtagcagacatggcagattgttagggcacctatggagacgacgtcaaacacatttgaagttaggtgaacttgaatatcgacggagggcagctgataatttatgttggtcagtgaattgaataactatcttgacttatacctccgaactaggaaagcgcaattctagttctcctgagtgaaaccatctaaaggttctttatcttcagaatccagacatcaatcatcccttggtccggcgttctttggggtagggaatcttaaaagaatgtataaacagcctctcgaggtagtgcttgggacaggaaattgcgagttacctccatgacctcttcaatgcaccattgactgcattattgagaaggcagaagacatcattgatcggttggcacgtgcgaacttgcaatcgctttgacctaaaacaatatgccatcattattgagaattcgctatgcgccattcaaaaacaatatgtatatcattatatgccatcaaaatgtttgctgcggcttctatactggtttttctctctcctggtaccacacccgtcaaatggttaactcttatcagaaaagtattaggcgaagaaaattttgaaagctggtatagaaggtagtggcaccactggcatagatgcagaataaatacatccacaatgttttcatatgtgtcagatgacaaaatttatatgttacctatagagattgacatggcctaaaacgtttacttggttacttttcatttatttaagaactttag

SEQ ID NO: 50715 - DNA, 3116 bp, Zea Mays
ggagcggtggcatggttgttccaaattgcctggcttcaaaggcaacttcgtaaagcgaccattaagggacaaatttccagctgtatccttcacgggaggcttgaccttgtcagaagctgggtttgacctgctaaataggttgctggcatatgaccctgagaagcgcatatctgctgctgatgccttgaaccatgagtggttccgtgaagttcctctgcccaagatgaaggaattcatgccaacttttcctgctctgaatgaacaggacaggaggatcaagagatacatgaagagccctgaccccctggtggagcaacagatgaaagaacaagggagcataggagatcatggcctttttgactgatctgaaagcagacaagtcttgctgcaaatgacagtttttgagtgagtaaacatgttgcaaggtgaggtgtacaactggacagagaagtatcccgtctacttggtgtgcggtgacagcttattgtgttctataacaggctaagagatcaaaggggaacataaattttacttaagttccatgcagctagtgttcaaatggcagggttagctctctacgagaactgtcatattctaacctatcatcattataagttgcagatgtaatgcagttcgtctaaaaggtttggccttgcgtacaccaagtttcacctctgatacttgtaaagtattataaactgttgacttgtaatcagtaatcaatgagatattagtgacatcgtattttattttctcttttcaagtagtgcatcttcttttgatcttttgattgtctttgcaagagttgaatgaagtgaaggaaccggtgcatttttattttcgcaaggaaatcgatactctcttaatgggaattgtaagcttaaagctgtggctgtatcaagagatgaagggttcacggatgccagattacatacctaactgactttttttgtggtcggtcctccaaaggtctcatctgtaattgtgaatccaagtgagttgagctcagctcttttgaatactttggtaatccctgccctcttcatcttcccactccagttctgtttcatcagctcatcatgatttatttatcattcctgtgattcattgcacgatcattatcaatttgtttctttatttgcatggacattaactgttacaaaatgccgccttcgccctcctgtgcccaccatagttgccacgtgttctgggatctatgcttattatttcttggatagttattgaggcaggtaaaagaataaggttaagaatatgttaaattactccttgtgctttggttagatgatattaccaaaaatatatgttgaggtgtaagacaattctgggtttaagtgtttattctcaaacggttgatcaatcatggttttccacttccaagcttgatcctaaccaatccttatgtgatttaattgtcatattttgccactccttcctatcataaaaacatgccgtttaggacaagatttgatcaaaccttaaaacttaaaagctacaaacatttataacttctaatttatttagtttatgattgctgtgtcttgctttgtcagctaccatttttttcatgccataaaatggtggaattgcctgtagagttacataaatgctttctactaacctaagttgagatgtgtgccaatgtatcactgtatcaggtcccaattccacttgttataccatcttttttcttcactggggattgtttttgaataatctgctgataataccgctccgttcttttgagcttttataatctgccagaggtaactagttgactataaaatctgggaggatgctaccatgtgaattatgtctttctttttacctagttgggtaaaatgcgctaatggtttgctatgcctaaatatgaattcgagttgactatgttcctcattgcaatgtttgtggcacacaggtatagcacttctaattactcctgtgagatggctaatatttccgtgttttttattgggttgatgtgttcatatgattttgttaagaacaacagtaaaatacaatgaatcctggaaagcaagttgtgctaagttatataattttagtaaaacgtattcatgtctttgatactgatgtaattctgaatttctgatgtgagattccaacttaagtacctaactgctttcccagttgcctgaacttgtagggtatttaccattcttatgtcacttctctgaacttgcatgatattcaccattcgtatgtcattataatagcatcttactgtcccttgcatttgtagttgcttggaattatgacgtctttagcacgatctgaagtagggagtatatgtaccacagaacgtctaggaattttgttgtagcagttcatctgagtatatccacttactcttaccatgtgcgattaaagtgcacttgagtttgtttacagcttgaaatgtccgcactggtagcagacatggcagattgttagggcacctatggagacgacgtcaaacacatttgaagttaggtgaacttgaatatcgacggagggcagctgataatttatgttggttctttatcttcagaatccagacatcaatcatcccttggtccggcgttctttggggtagggaatcttaaaagaatgtataaacagcctctcgaggtagtgcttgggacaggaaattgcgagttacctccatgacctcttcaatgcaccattgactgcattattgagaaggcagaagacatcattgatcggttggcacgtgcgaacttgcaatcgctttgacctaaaacaatatgccatcattattgagaattcgctatgcgccattcaaaaacaatatgtatatcattatatgccatcaaaatgtttgctgcggcttctatactggtttttctctctcctggtaccacacccgtcaaatggttaactcttatcagaaaagtattaggcgaagaaaattttgaaagctggtatagaaggtagtggcaccactggcatagatgcagaataaatacatccacaatgttttcatatgtgtcagatgacaaaatttatatgttacctatagagattgacatggcctaaaacgtttacttggttacttttcatttatttaagaactttag

SEQ ID NO: 50716 - DNA, 1806 bp, Zea Mays
gacgtgtctatctagttagttctcgatagcctctctctccctgcctccccgctgttgtggttgcggtgcttctgctgatctgctccgtcttctcctcccggcaatggcctgcttggaggcgcccccgcgcgtcgagctctgcccggtctcgtgccagccccgcggcctgcagcttccgccatggcggctcagcctgtcgaggtcctcctcttcatgcagatcttgcacccttgtgtctcgccagcttccaatttgcaatgcacagtcatcggaaagagaggaagcaaaggctgtcctgtccctgtttctgaggcagaaaggtctgcgaagcacgctggccgcacggatcgtcaacaaatcggatggcttcatcgagcacctggtctcgaagctccagattgcttacagatctcgatatgctgaaggaagggagctgagcacgcctgaaatcagagacgctctccttccctatctcgaagctctctccaaagaacatggcgacagtttggtcgaggtggtggagaatttccccgacccttttgctatggaaagggaagccttatcttcatcaatggcgtttacacccacgagctcaaacaagcagaaggcgattgctcgaataagcacggcagcctcaggcgccgccctccctgagctggtcccctacctactagaccttggcatggaccacgaggagataaaggacatcgtgcgcaagttcccagcgttcgcgtactacagcgtggatcgcaagatcaagcccctggtggagctcctgcttgagcttggggtgaaaaattccagcataccaggaatcatcaagaagcggccccagctgtgcgggatcagcatgtcagacaatctcaagccgatgatggcttatctggagagcatcggcgtcgacaaggctcagtggagcaaggtgatcacccgcttcccggcgctcctcacgtacagccggaacaaggtgcagacgaccgtgagcttcctcgccgagctaggtgtctccgagaagagcatcggcaagatcctgacgcggtgcccccacatcatgagctacagcgtggacgacaacctcaggccgaccgccgcctacttccggtcgatcggcgcggacgccgcgtcccttatccagaagagcccgcaggccttcggtctgaacgtcgaggccaagctgaggccgaccacggagttcttcctggcgagggggttcagcgtcgaggaggtcggcgtcatggcgaacaggttcgggatcgttcacacgctgagcctggaggagaacctgctccccaagtacgagttcttcctggcgatggagtacccgaggtgcgagctcgtcaagttcccgcagtactttgggtacagcttggaccggcggataaagccacggtacgcgaggatgactgggtgtggggtgaggttgattttgaaccagatgctttcggtctccgatgccaggtttgagaagattctagagaagaagacggctaggctttgataagacagcagtttcagattaggcacagtgttggagttcatttgagaagaactgtcaatgataaaaccatcagttttcagagcacgtagcttattatcgtggccttcatggacgtgcaacgtccagaggcgaactgtttgatgtgctaatctgtagttagcttctgcgaggtattgaaatgcatgcaactttggcaatcagaaatgccagttgcagtgggcgagattgcttggtgctcatttatgcagtactcggcgacaatctttgtttgaaaatgaaaatggaatcagatgacaccgattacaaac

SEQ ID NO: 50717 - DNA, 1511 bp, Zea Mays
atgaatcgtgacaaaattcaaggacacatggcttgcactcctgctcgtcagtcatcacatcctggcaaaggcaacgtgcttttgcacttcaggtcttaccagtgaaggtactctctttttgttggattgcttggacttggtgagtcaggatccaccattacctagtggataaaagaggcagcaaggctgtgatagataaggtctacaatgatatcgttttgtgtgaactgtatccttctaacattgcaagtacatttatttgcttacttgcgcaaaagatcttcatgctactctgtcaagtttggaacatggaagaactcaaaagggtttactgaacatcatggtgcgttgaatatgaacgccagagttagtggaagtgactggaacgtatggagctcttggttcattgcacattcttgatctcgaccgacgaataaagcacatcttctcttcacgtgagcatatcccattggtccagtccagccactccaagggtgaacgcaacttggaggaaggacgcaggagtacttcacatgggctgtcaaaagtttcgaaacggacacatatgcatatacagcagaatttcaattaagcaggctttagtacagactactgaacaataccgagacacataaaccccccaaaatcaagcgacatgcattatttgaccgagaagtgagaactggatttgcaatactactgagcagtagctagccgttttcagagcgacaactgctggaccgatcaagctagatcgcaatctcggaatctggtggagaacgagaatccttctggagaagacgggcagcagctagtctactgctccatcatatatgctcctgtcgatccccttgctgactgtgctacacacggaggctggcggcgcgtacgtgcgtcgttggtgcatgtgctatatgcctacacatgcaagttgcaggcgtatacgacagcctctcaggcactcgtcatcagctgtccgttagtggaatggcgtggagatggagccagtgtttcgagccgagtgccaggcgccatggatggatatgatatgcttagcttggcggatcgatcggccggatgctacgaccttcttccacggtgctaccgcctccggatatgatcatgcatgcatggcgtgggcattgcgagcttatcgcattcctataggcctggaggcgagtcagcgctcagcggtggacaagatactggtacggtggcgtcatggatgtgcatgcgcgcacgcggtctgagcccggtgcccgagcccattcacatggcatgcctgatgtggtaccggccggatggaaaaggctgttgcaccaccgccggaaatcggcgcgggactgcggggcggctgttctctggagcgttctcttgtgtagccgacttgctagccatgtcggcattgtcgcgtatccaggattttattatagagtatgctaaccaaaatttacatatacattatccaaaccatttgatcatccgcggtgacagtgatacaatttgaacat

SEQ ID NO: 50718 - DNA, 1817 bp, Zea Mays
gtcatgttgcacaagccaaaggcagttattcaaatatttatcttcaacaaagtttgtaaatatgtcagtataaactgcttagtttgatgttgttctagtctttggcaactaatatatgaacctttttcatcagctatagcttggattatttgggttctaaaaaaaggcacagcatattttgttttgtcaatttaggttgaaacaaagattcaagtagggaatacaaaatgtaagaggaccgcggaaactcaccaaagctcacatctgttgattctggaatatctgtcaccaacctgtttgcatgactttctccgtcttaccagtgaaggtactctctttttgttggattgcttggacttggtgagtcaggatccaccattacctagtggataaaagaggcagcaaggctgtgatagataaggtctacaatgatatcgttttgtgtgaactgtatccttctaacattgcaagtacatttatttgcttacttgcgcaaaagatcttcatgctactctgtcaagtttggaacatggaagaactcaaaagggtttactgaacatcatggtgcgttgaatatgaacgccagagttagtggaagtgactggaacgtatggagctcttggttcattgcacattcttgatctcgaccgacgaataaagcacatcttctcttcacgtgagcatatcccattggtccagtccagccactccaagggtgaacgcaacttggaggaaggacgcaggagtacttcacatgggctgtcaaaagtttcgaaacggacacatatgcatatacagcagaatttcaattaagcaggctttagtacagactactgaacaataccgagacacataaaccccccaaaatcaagcgacatgcattatttgaccgagaagtgagaactggatttgcaatactactgagcagtagctagccgttttcaggtattgctggtatatctatcctctgtacctaccatacacttgctactacctagcatttgctttgcttttgtcactgcctgtgcagagcgacaactgctggaccgatcaagctagatcgcaatctcggaatctggtggagaacgagaatccttctggagaagacgggcagcagctagtctactgctccatcatatatgctcctgtcgatccccttgctgactgtgctacacacggaggctggcggcgcgtacgtgcgtcgttggtgcatgtgctatatgcctacacatgcaagttgcaggcgtatacgacagcctctcaggcactcgtcatcagctgtccgttagtggaatggcgtggagatggagccagtgtttcgagccgagtgccaggcgccatggatggatatgatatgcttagcttggcggatcgatcggccggatgctacgaccttcttccacggtgctaccgcctccggatatgatcatgcatgcatggcgtgggcattgcgagcttatcgcattcctataggcctggaggcgagtcagcgctcagcggtggacaagatactggtacggtggcgtcatggatgtgcatgcgcgcacgcggtctgagcccggtgcccgagcccattcacatggcatgcctgatgtggtaccggccggatggaaaaggctgttgcaccaccgccggaaatcggcgcgggactgcggggcggctgttctctggagcgttctcttgtgtagccgacttgctagccatgtcggcattgtcgcgtatccaggattttattatagagtatgctaaccaaaatttacatatacattatccaaaccatttgatcatccgcggtgacagtgatacaatttgaacat

SEQ ID NO: 50719 - DNA, 1499 bp, Zea Mays
tgaagtctgaacttgggtgaagtgaagggtgcaggctggtagtctatatatactcccagtccccaatgaggataaaagaggcagcaaggctgtgatagataaggtctacaatgatatcgttttgtgtgaactgtatccttctaacattgcaagtacatttatttgcttacttgcgcaaaagatcttcatgctactctgtcaagtttggaacatggaagaactcaaaagggtttactgaacatcatggtgcgttgaatatgaacgccagagttagtggaagtgactggaacgtatggagctcttggttcattgcacattcttgatctcgaccgacgaataaagcacatcttctcttcacgtgagcatatcccattggtccagtccagccactccaagggtgaacgcaacttggaggaaggacgcaggagtacttcacatgggctgtcaaaagtttcgaaacggacacatatgcatatacagcagaatttcaattaagcaggctttagtacagactactgaacaataccgagacacataaaccccccaaaatcaagcgacatgcattatttgaccgagaagtgagaactggatttgcaatactactgagcagtagctagccgttttcaggtattgctggtatatctatcctctgtacctaccatacacttgctactacctagcatttgctttgcttttgtcactgcctgtgcagagcgacaactgctggaccgatcaagctagatcgcaatctcggaatctggtggagaacgagaatccttctggagaagacgggcagcagctagtctactgctccatcatatatgctcctgtcgatccccttgctgactgtgctacacacggaggctggcggcgcgtacgtgcgtcgttggtgcatgtgctatatgcctacacatgcaagttgcaggcgtatacgacagcctctcaggcactcgtcatcagctgtccgttagtggaatggcgtggagatggagccagtgtttcgagccgagtgccaggcgccatggatggatatgatatgcttagcttggcggatcgatcggccggatgctacgaccttcttccacggtgctaccgcctccggatatgatcatgcatgcatggcgtgggcattgcgagcttatcgcattcctataggcctggaggcgagtcagcgctcagcggtggacaagatactggtacggtggcgtcatggatgtgcatgcgcgcacgcggtctgagcccggtgcccgagcccattcacatggcatgcctgatgtggtaccggccggatggaaaaggctgttgcaccaccgccggaaatcggcgcgggactgcggggcggctgttctctggagcgttctcttgtgtagccgacttgctagccatgtcggcattgtcgcgtatccaggattttattatagagtatgctaaccaaaatttacatatacattatccaaaccatttgatcatccgcggtgacagtgatacaatttgaacat

SEQ ID NO: 50720 - DNA, 2142 bp, Zea Mays
cccaggcttaggctgccaatccacgctcctgcctgggccaaaagaagcccagcgccccgcccgttcgatcgaacagtcagaaaacctttgtatcgaaatacgttgattataaaagacaaaaaaaaccatcaagacgcgaaaaacccgtcatttgtttctcctccgtgcacagctctcttcctctgtcctcttctacgtcagtgacagtgaaatcacggctgagtggcgccaccgcccgtggggcccatcaccggtgcgcgcgctcaataacgagtgagcgcgccaccgtcgagcggcctttcggcggtgcgcacaaggccagcggtcgaggcgccatttccttagtcgactagggtctccgtctctccgactgctaggtaacactaataaccctttcaccttcctctgtgtgctcgggagtcgggagtcgggactaccagttagggttacgatttctaggatttgagaaaaactgggtaagggttgaatcttcccttcttatttatgctattctaatggacgggaacacgaattcgagtcttgtagggggttttgctcaaattcgtcgctaaaatgaaggttatgttagcatctagggttagggtcagagcttaaaaccatgtattcgctaccattgtaagtttctactaacgtagctcataaactgtagccactagatacgctagaacagagagctataccttcgagtttttgggacgaccggacgaggccattagggcgatgactgtacacgaattccttgattgtgaatgcaagcacatgtgatatgatggtataaatatagtgaaaatttagcttattaccactatatttttatttttgcatgagtgtgaccacagcatgtagttccacccctaacaagaacacaccttatgaggatgtatttatttagtgaccaaaaattgctgaggtgtggttatgttccctccatggcaattagtagccttgtgttcaaagctgcttgtggttgttatttttgtaatggacacgtgtgtgttaagtcggtcttaagcctacaccaactcgcttggtactaggggggcatgtggctaaagttgagccctgtgcaattccaggagacgaggacatacatcatacatgatataatattgcagaatgcatactctgtgccagcaattcccatctagcaaatccaagtgcattggcattaaaacgtctcttgattggtcttagctaatattatagtttctcttttgaacgctgacctcagttgtttgtctcgtatttggaagagataatgttgttcttgttccgcagggatcagtacctttcttcattggtttgtttcttcattggtttatttcttctgtttgtctgttggcctgctgctggtataatcatggaactatatggatcgtgtttatttttccttttccttttctttttgggcttgtctttcttgctgaaccccatttgggccccattggggcaaggggtgggtatgttgtatgctgttttggcctatctcctttcttaatgagttaatgcaatgatatgcagttttcctgcatattcgagaaatatatggatcttttctgctcttcaggtccttctcttggttataggcctcctatagtcctatccaggccttcctgtatcaaataccaatcataggttggattatgcagtaccgattcgagattcagaaaaggagaaatttcaaaattttcggtttctcatcattctggtgttgaacatctgaagcagcgaatcttgtgacgccatttcaggtgcctgtcatcgttgacaagtagcaaaagtgcaggcttgttcaatgcacctaatgaaatcactgccaactagtagaaattttatttttaatcacaaactaatgttttatgacagcatatcctcggctataagtttctatgaataagtcaagcgtcaaagatcacggcacaactcgctacgccatatgtattagtgtgactaggtgaatatgttttaaaatcacggtacatacataggcagacgctcatgcatgcatatgctcacctctactctaggtagtactccttctatttctttttagttatcgttggatagtttaattttgcactatccagcgacaactaaaaataaaacagaggaagtatgtag

SEQ ID NO: 50721 - DNA, 2931 bp, Zea Mays
gaaaaacccgtcatttgtttctcctccgtgcacagctctcttcctctgtcctcttctacgtcagtgacagtgaaatcacggctgagtggcgccaccgcccgtggggcccatcaccggtgcgcgcgctcaataacgagtgagcgcgccaccgtcgagcggcctttcggcggtgcgcacaaggccagcggtcgaggcgccatttccttagtcgactagggtctccgtctctccgactgctaggtaacactaataaccctttcaccttcctctgtgtgctcgggagtcgggagtcgggactaccagttagggttacgatttctaggatttgagaaaaactgggtaagggttgaatcttcccttcttatttatgctattctaatggacgggaacacgaattcgagtcttgtagggggttttgctcaaattcgtcgctaaaatgaaggttatgttagcatctagggttagggtcagagcttaaaaccatgtattcgctaccattgtaagtttctactaacgtagctcataaactgtagccactagatacgctagaacagagagctataccttcgagtttttgggacgaccggacgaggccattagggcgatgactgtacacgaattccttgattgtgaatgcaagcacatgtgatatgatggtataaatatagtgaaaatttagcttattaccactatatttttatttttgcatgagtgtgaccacagcatgtagttccacccctaacaagaacacaccttatgaggatgtatttatttagtgaccaaaaattgctgaggtgtggttatgttccctccatggcaattagtagccttgtgttcaaagctgcttgtggttgttatttttgtaatggacacgtgtgtgttaagtcggtcttaagcctacaccaactcgcttggtactaggggggcatgtggctaaagttgagccctgtgcaattccaggagacgaggacatacatcatacatgatataatattgcagaatgcatactctgtgccagcaattcccatctagcaaatccaagtgcattggcattaaaacgtctcttgattggtcttagctaatattatagtttctcttttgaacgctgacctcagttgtttgtctcgtatttggaagagataatgttgttcttgttccgcagggatcagtacctttcttcattggtttgtttcttcattggtttatttcttctgtttgtctgttggcctgctgctggtataatcatggaactatatggatcgtgtttatttttccttttccttttctttttgggcttgtctttcttgctgaaccccatttgggccccattggggcaaggggtgggtatgttgtatgctgttttggcctatctcctttcttaatgagttaatgcaatgatatgcagttttcctgcatattcgagaaatatatggatcttttctgctcttcaggtccttctcttggttataggcctcctatagtcctatccaggccttcctgtatcaaataccaatcataggttggattatgcagtaccgattcgaggtaagtttatagtttttaaaactgcaacggacttttatgacagaatttcttatacctcaacgtcaattctctacgaaccttttttttggggggcggggggagccccacacgagccttacacgagccttaaattctataatagtcaatctagattataagggctagtttgaaaacttaaatcctcttggaatacctctcttttcctaggatgagcaatctttaggaatgtcatttcaataagatatttagggcctgtttaggagcaaggagattggaggggttgaaggagctaaagtccccttattattcaattagggctgatttggagaccagggatcacgaggggatccatgaggaggaatcctcttgcctcccccatggatcctctcgtgattcatgatcatcaaaccagcccttacaggttttagtcccttcagtccccttactctcaaacaagctgttatgaggttttttctccctgaggcctgggtttggctccccttagtgctaactgatgcatcagaactctgatcagtacagctgtttggtcagttgaggcgtaagcgcacctgaaaacttctgcaacagattgtgtaaaatagcggatttatgctgtagattacactgtttacagaatgaagtttgaaataaagaataatatataatagttgctgcagacagccttacagtggagcttggtaactcactgactaacatgcatacggtgaggtgccattggtatttgaatttcgttgcggatggtgacaatcggctgaagggtgatgccttttccctttgtgcctttgtgtttgtctcgttcagattaggataatagttgattaggataatgataagcagtggcaatcatttccaccgttgaacctagtttcgtgggcatgacatgctgcgccattaacgtctaggagtatttagggcggttttgatttgtcgatccttatccttatctacagtaatgatgcactactggcatgtccccgtcgtattttactaactgacattgatttgttgctggctggccagattcagaaaaggagaaatttcaaaattttcggtttctcatcattctggtgttgaacatctgaagcagcgaatcttgtgacgccatttcagcatatcctcggctataagtttctatgaataagtcaagcgtcaaagatcacggcacaactcgctacgccatatgtattagtgtgactaggtgaatatgttttaaaatcacggtacatacataggcagacgctcatgcatgcatatgctcacctctactctaggtagtactccttctatttctttttagttatcgttggatagtttaattttgcactatccagcgacaactaaaaataaaacagaggaagtatgtag

SEQ ID NO: 50722 - DNA, 2027 bp, Zea Mays
accgtgttccccatatcgtccagttgccgtagttttacgcgagaacgcacgcgcgcatctgccaaaacaaacaaacccacgtcccggccaccgcgcgcgcgcgtgcctcgtcgtcgtcctagctagctagctcgatcgatcctccctcgctcagctgccgtcgacctctctctcgcggagagagagatagagagaggttggggtttgtcggcactcggcaatcgacatcatgaggcgcttcctgcctgctggaggcggcggcggcggcggggagccgtcgtcctcctcgtcgtcgggcgggcaccagcaccaccagcacggcgggctcgcatcgggcgagagggcggcggcgggcctgcggtaccgaggaggcgccgacatatcgctggggcacgggcacgacgatggtggacatggtcgtagcatcgacgcggcggacaggcggaacgacgggtccatggacatgctggcgcggcacagcagctcgccggtcggcttcttctccaacctcgtggtggacaacgggtatccacgctcaaataaagccggaggcggtggtggcgtcgaaggtcagcagcatgatccatcaacggccgccaatgccagtggcagcagtgcccggaagatgaagacgcccgagttcaacttcaccggtgcgcagcagggccagcagctgggcgcggccgcgggccacctctcgcggatctccgaggacggcgccttcccgggcggcatgatgggcgaccgcgcgggccgcggctctgctggcgagagcagcggtgccgccgcggcggcgcgctcgtactcggccggcgggttctccatcgttgggccgtgggaggagtccagggacatcattaccaccctcggcgcatacgaccctcagtttagcggcgccatggcgggtacggcgctagagatggcgggcatggacaggtacgtgcagctgcagcaagaccaggtgccgttcaaagtgcgcgccaagcgcgggtgcgccacgcaccccaggagcatcgccgagagggagaggaggacgaggatcagcgagaagctcaggaagctccaggacctcgtgcccaacatggacaagcaaacgagcaccgcggacatgttggaccttgcagttgagcacatcaggggcctgcagagcgagctgcaggctctgaaacacgaacaggagaagtgtacctgctgccgaaagcgatagcgattcacgacggccgggggatcggaccaagagagcagaaacacgtacgtcgtctatcatatctgtagcggttcatagttgatacgtgcccttaccttcagtgtccttgatgagaggaatgtacatggatgaagacatgacagacagccatctaattttagttacaacaacatgtcggattacctactgctccaccttttccgaagaccgaagcaacgaagacccatgtgagcaactagctagccagtagccagtgcagtgcagtgctaaaatgggcggccctcctagtctgatccgatgatccttggatttcttctgttcctgcttgatgttcaactccaattttagatctcttttaggatctgaaaacagttttgctatttatttaaacaagctgcttaattttattttgatatttagtataattaatatttgttgactgacgtcagaagaagaggctccttttttttttcttttgtataaggtaaaagaaagggcttttaggcttttatacagatataaaggctttggtgatgtttttgtatatatttcttaaacttataattgtttcaataggcattataatagatctgtattatttcagaagagggtatttgcatatagactcagcacaatacttctttataagataggggaagttttgccgtgaaatttaataaactttttttttgaatgtgtcatgtgtttcattaaggatggctctaatgcacaggggttgtatctaataacgtcatatcactattgaccagccggtctgtatctaccactgtcaacatttatctaccagaacttttcagtg

SEQ ID NO: 50723 - DNA, 1845 bp, Zea Mays
attagttcgacaagagctagcgtcagatttcttcttcgtcatcaggaagagctaccaaatggacagtcaagtttgtaaattagctagttgcccactggttcagtccatgcattaaccatcttgggtatccacgctcaaataaagccggaggcggtggtggcgtcgaaggtcagcagcatgatccatcaacggccgccaatgccagtggcagcagtgcccggaagatgaagacgcccgagttcaacttcaccggtgcgcagcagggccagcagctgggcgcggccgcgggccacctctcgcggatctccgaggacggcgccttcccgggcggcatgatgggcgaccgcgcgggccgcggctctgctggcgagagcagcggtgccgccgcggcggcgcgctcgtactcggccggcgggttctccatcgttgggccgtgggaggagtccagggacatcattaccaccctcggcgcatacgaccctcagtttagcggcgccatggcgggtacggcgctagagatggcgggcatggacaggtacgtgcagctgcagcaagaccaggtgccgttcaaagtgcgcgccaagcgcgggtgcgccacgcaccccaggagcatcgccgagagggagaggaggacgaggatcagcgagaagctcaggaagctccaggacctcgtgcccaacatggacaagcaaacgagcaccgcggacatgttggaccttgcagttgagcacatcaggggcctgcagagcgagctgcaggtaataataatctacgtacgtacgtacgtgcgtgcgtgtgcatgtatatgtatgtaggaatatacgtacgttaatgccttttctagagagagtacactgatctgaagacgaatgcgtttcagtttcgactgatcacaagctggtattatattataattatattcttgccagcagcacacaagaggccatctaacttgatgccttttccttgatccgcaggctctgaaacacgaacaggagaagtgtacctgctgccgaaagcgatagcgattcacgacggccgggggatcggaccaagagagcagaaacacgtacgtcgtctatcatatctgtagcggttcatagttgatacgtgcccttaccttcagtgtccttgatgagaggaatgtacatggatgaagacatgacagacagccatctaattttagttacaacaacatgtcggattacctactgctccaccttttccgaagaccgaagcaacgaagacccatgtgagcaactagctagccagtagccagtgcagtgcagtgctaaaatgggcggccctcctagtctgatccgatgatccttggatttcttctgttcctgcttgatgttcaactccaattttagatctcttttaggatctgaaaacagttttgctatttatttaaacaagctgcttaattttattttgatatttagtataattaatatttgttgactgacgtcagaagaagaggctccttttttttttcttttgtataaggtaaaagaaagggcttttaggcttttatacagatataaaggctttggtgatgtttttgtatatatttcttaaacttataattgtttcaataggcattataatagatctgtattatttcagaagagggtatttgcatatagactcagcacaatacttctttataagataggggaagttttgccgtgaaatttaataaactttttttttgaatgtgtcatgtgtttcattaaggatggctctaatgcacaggggttgtatctaataacgtcatatcactattgaccagccggtctgtatctaccactgtcaacatttatctaccagaacttttcagtg

SEQ ID NO: 50724 - DNA, 1268 bp, Zea Mays
attaatgttttgtatatcaatgtattttatcatattgatttcgtgataacgcaccgacatatacctagtagatggaataaggatggaagaatcaataaaacattgaacacaattcacgggtacaaacttaactcattccacacaagtcattaaaatagtatgagctttcttccagttgccacactgaataaatttatttcctgaaacttacatgacagaaacatagaatgaccagcagaagctatcatatttgttgttgcaatagtggattgaggttgcactgctcctgtggagactgcataggctgttgaaggtgtaggaattgctgcttcagataaccaccagactggaaggaagcagcgacagtaaccactgcttgatactgaattattgattgagagcaggatatatctggttttgctaacatggatcatggtcattgctaaggatggatggagtctctgttgtccttaggatcctataccaggtggctagaagttcaaagaatgaaagatcccttcgatagtaactcctctcagccacatcaaacaattacaataaataaagacataataatgagtattgtccatataaacaattcgatttagatagagtatattctcattctcggatggagtgggtaggagcagtgcagcaacaacacaagtgatactgaaggaagatgccttaataaaagttgattggatccgtcctgatgtcttaatatctcaaatttaacaacaagttactcagatagtgttagttctatgaaaatagaaaaattaaatgtgaaacatgcacctgtcaattatcagtatagctagtaagtctatcagatattgtgtcaatgccattaagctccagaatagtatatttattccttccatgttaaagaggaatattgcttcagcatattaatggattatgcagtaaggtattcatcatagtaagttctaaatatttcacaagaagcatgtatgttgacaaccttaaggtgaacacgacattattgcaagttaatttgttgtcatggtacacgaatgaatgaaccagaatcacaaatgctattggggacaacacaagagcttggtgatgatgcaacagagtcttaaacaaataattgaaaaaaatgcaacaaacatgcaaatggatatttgagagcagctttatttgttgaaatgagtttttttttccaaatttatttgctccttaaagctgggcacaactttagcagccaaagcaagcaaaaaaggtagacctggtgctag

SEQ ID NO: 50725 - DNA, 2685 bp, Zea Mays
aagcttagtgacttagtcccacctgtcagctgcagcagcaagcaaattgacagcaccccgcatctcttctcctggacgcgacgccgtccccaacctctccgtcccgcgccgccgccgcgcgtcactgtgctcgcgatctcgccggcggccccagaggacttgtcgcgtgctcggccatggcatcgccaccgccggccctcgagatcctagttcgcgagcccgacggagtcacggtgtggtccggacccccctacccgccgggcaccaccagcccgccgcagagactccccaagacggcgtgcagcgccacctctttctccaccgacggtgcccgcctgctcgcgacggtggcatcggcctcggccaccgtctacgactgccgcacactcgctgtagtcaagtgcttcgagctcccgggtctcctcgccgctgcgctatcgcccacgggggcgtatctgcagaccttccagaagtcatcctcgccgcaggagaagaatgtcacggtctggcacgtcgacacagctgccgctctttaccaacactatcagaagagcatgtctaaaaccacctggccaatggttcagttttctgcggatgaatcggtcgcttgccggatgatgcctaatgagatacaattctttgatccaaaagattttgcaaaaggaattttgtataggataagaatgcctggcatagctacgatgaagctagcaactgcaccaggatctcatgttgctggattcgtcccagaggctaagggtgttccagctagcgttcagatattttcttgcaacaaggatgcacaaaatcaagttgttgctcgcaggagcttttttcgctgttccaccgttcaattacagtggaacaaagggtccactggccttctaattcttgctcaagctgacgtggataaaaccaatcagagttactatggtgaaaccaagttgaactacttgacaactgacagggccttcgaaggaattgttccactcaaaaaggacgggccagtccacgatgtgcagtggtcttcctctggctctgaatttgctgtggtttatggtgttatgccgcccaaggcaacaatattcaacaagaagtgcaaccctcttgttgagtttggtgaaggaccctacaatacgataagatggaaccccaaaggacgatttgttgtattagcaggttttggcaatttgcctggtgatatggcattctgggattattcagaaaaaaaattggtagcgaaaacaaaggcagaatgttctgtcacaagtgaatggtcccctgatggtcgtcattttatgactgctacaacagctccgaggcttcaaatagacaattgtataaaaatatttgaccacaacggatctctgcagtttaagaagatgtttgaaaggctgtatcaggctgattggaaacctgaagcagctgaaagattcactgacattgctgacctgacaacatccttgagtaccttaaagattgaagaaacaaaaaaacaagtttcagcacaaggttccaagtcagcacaaacatcaagcaaggcccctgcaattacagcgccaaaacctacagcataccgcccacctcatgctaagggttctgcagaacttcaggacaaggtacaagcttctatccaataaccccactatggttctgttccagaactagggtgttcggtctttggttcagaggaatggaatgtgaaactggatgatttggtctattaccatgcaatcgctccttgtcattgtgccacaacaaaaacaacaacaaagcatgttactccaagcaagttgagctagatggttggatttttacgttgatgtggcagacctatcaccaccctccttttaccagggattgtgactggctatgctgaaagtgaaagttgaaacaacacgtgctagatcttgtcagtatgaataaaataaaagaataatgtttctcatacttaataaatcatatgctggcatttacccgggattgtagtttgctgtgctcagcttattctattagttattgttccatctggtcggagaaaattctcattgtttgacagtatagagttgacttatcatgtctgttggtgcattgcagctctttggtggactagctcctgctgggggggagatgagcaaaaatgcattgcgaaacaagaagcgcagagagaaacagaaggaaaagaaagctgctgaagcgtcaggctctcctgctgatgaaagttgatctgtgccggattactttcagcattgccaaccaccgagtataacagcgacaaatgatttctttcaatctggggaaacggccatgcaccgattcacgtttacaatatgaaactttttggtagtttggtgcagacactcggttattttttcagaactatactgagtttgtataaccatagcgaagaaacataaaaagtgagctatttcatattttcatgaactctcttgttctgtcgatggattggtgtttactgtgctagcaatatcgctattgaaaggacaatagtttcatggcctcatgggcatgataggtcgtgcaaaaatttcctacaaaacataatactacattgttacatttgcacggctagtgtaactttgaagtcctaatatcctaacaacaaaaatgtatggcagggcaacttgctagctagctgagggctgaggcttgtggtggtggcaa

SEQ ID NO: 50726 - DNA, 2201 bp, Zea Mays
aagcttagtgacttagtcccacctgtcagctgcagcagcaagcaaattgacagcaccccgcatctcttctcctggacgcgacgccgtccccaacctctccgtcccgcgccgccgccgcgcgtcactgtgctcgcgatctcgccggcggccccagaggacttgtcgcgtgctcggccatggcatcgccaccgccggccctcgagatcctagttcgcgagcccgacggagtcacggtgtggtccggacccccctacccgccgggcaccaccagcccgccgcagagactccccaagacggcgtgcagcgccacctctttctccaccgacggtgcccgcctgctcgcgacggtggcatcggcctcggccaccgtctacgactgccgcacactcgctgtagtcaagtgcttcgagctcccgggtctcctcgccgctgcgctatcgcccacgggggcgtatctgcagaccttccagaagtcatcctcgccgcaggagaagaatgtcacggtctggcacgtcgacacagctgccgctctttaccaacactatcagaagagcatgtctaaaaccacctggccaatggttcagttttctgcggatgaatcggtcgcttgccggatgatgcctaatgagatacaattctttgatccaaaagattttgcaaaaggaattttgtataggataagaatgcctggcatagctacgatgaagctagcaactgcaccaggatctcatgttgctggattcgtcccagaggctaagggtgttccagctagcgttcagatattttcttgcaacaaggatgcacaaaatcaagttgttgctcgcaggagcttttttcgctgttccaccgttcaattacagtggaacaaagggtccactggccttctaattcttgctcaagctgacgtggataaaaccaatcagagttactatggtgaaaccaagttgaactacttgacaactgacagggccttcgaaggaattgttccactcaaaaaggacgggccagtccacgatgtgcagtggtcttcctctggctctgaatttgctgtggtttatggtgttatgccgcccaaggcaacaatattcaacaagaagtgcaaccctcttgttgagtttggtgaaggaccctacaatacgataagatggaaccccaaaggacgatttgttgtattagcaggttttggcaatttgcctggtgatatggcattctgggattattcagaaaaaaaattggtagcgaaaacaaaggcagaatgttctgtcacaagtgaatggtcccctgatggtcgtcattttatgactgctacaacagctccgaggcttcaaatagacaattgtataaaaatatttgaccacaacggatctctgcagtttaagaagatgtttgaaaggctgtatcaggctgattggaaacctgaagcagctgaaagattcactgacattgctgacctgacaacatccttgagtaccttaaagattgaagaaacaaaaaaacaagcacaaggttccaagtcagcacaaacatcaagcaaggcccctgcaattacagcgccaaaacctacagcataccgcccacctcatgctaagggttctgcagaacttcaggacaagctctttggtggactagctcctgctgggggggagatgagcaaaaatgcattgcgaaacaagaagcgcagagagaaacagaaggaaaagaaagctgctgaagcgtcaggctctcctgctgatgaaagttgatctgtgccggattactttcagcattgccaaccaccgagtataacagcgacaaatgatttctttcaatctggggaaacggccatgcaccgattcacgtttacaatatgaaactttttggtagtttggtgcagacactcggttattttttcagaactatactgagtttgtataaccatagcgaagaaacataaaaagtgagctatttcatattttcatgaactctcttgttctgtcgatggattggtgtttactgtgctagcaatatcgctattgaaaggacaatagtttcatggcctcatgggcatgataggtcgtgcaaaaatttcctacaaaacataatactacattgttacatttgcacggctagtgtaactttgaagtcctaatatcctaacaacaaaaatgtatggcagggcaacttgctagctagctgagggctgaggcttgtggtggtggcaa

SEQ ID NO: 50727 - DNA, 1418 bp, Zea Mays
cgccactacgccggccccaacggcccaagccaagcggtccaggccacgggctcgtcggtcgtcgcctcgcgggtctcaactgcgctgcctccggccctccgggtgatcacgtcgcgacgccgcaaccaagcttccgagtcccgacgacgacctgccttgtccagtgagttatgagtgcagtggaggaagatggatgtagtttacggtgtgatctatgcgacactgagattgtacacagcatggcagaactcctgcttcgtggattggccacagcttcagtggacagcaccacgggcgatatattcaagagcgcatcttctgtagctgctgctgtgaagactgagctagaaaattatatgcttgtgagaactgaatcgcttatccgtgagtttgtcgatggagcccaggatcattcagatcaattgatgaaagcctccacaaggccaaccgagttcctatcagacttgattggcgacttcgtggcatccaaaaggaacttgctgagccatgtgtctgggtttttgtccagtgaaagccgcttgaacagaattaaagattttatgcagaagatggagatggagaatgtgtggacactggacgtaaggcaggctacctcagagactattcttgaaagcatagacatgaagtgcattttccactgccccgaaaaatttgttgagcaagacaagctggtagaccatagaagtcggtgcaaatttagagtcgtgggctgcgaaaatgatggatgctcagtttcactttctgccattcatagtgaggagcatgactccatctgtccatttaaggccctgccatgtgagcagctgtgcgagcaacatgttatgcgcagcgagatggataaacattgtgcaacagtttgtgctatgaagcttattaactgtcctttctaccatgttggatgtgaaacagcctttccacaaggtaatcttgagaaccactgttcgaagctacttcaaacgcatatgttgtatgttctccaagcaagtacaagacaaaatgctgctgttaatgatatgaatcaacgattacaacttcttgagaagatgttaggtcgctcactctgataataaaggagcaagaagcaaagatcaaggatcttgagagcggtatcaaagcacaagaagcaaaggtgaagaaacttgagaacgagcttaggtcgaagaatgcacgataacttcctacacaaaccagagtggcatactttaggacctgtaaataatcagtagcactgacatatatttggaaattatgtttttttgttcatataaaaagtatagagaattgcagggtttagacttcagaatatgaacttctcttgggttatcttttaagttgatgtaattgatgttttgatatttttatatgatatattgattgcttggattattatggggatt

SEQ ID NO: 50728 - DNA, 1389 bp, Zea Mays
cgccactacgccggccccaacggcccaagccaagcggtccaggccacgggctcgtcggtcgtcgcctcgcgggtctcaactgcgctgcctccggccctccgggtgatcacgtcgcgacgccgcaaccaagcttccgagtcccgacgacgacctgccttgtccagtgatttcattggacagagttatgagtgcagtggaggaagatggatgtagtttacggtgtgatctatgcgacactgagattgtacacagcatggcagaactcctgcttcgtggattggccacagcttcagtggacagcaccacgggcgatatattcaagagcgcatcttctgtagctgctgctgtgaagactgagctagaaaattatatgcttgtgagaactgaatcgcttatccgtgagtttgtcgatggagcccaggatcattcagatcaattgatgaaagcctccacaaggccaaccgagttcctatcagacttgattggcgacttcgtggcatccaaaaggaacttgctgagccatgtgtctgggtttttgtccagtgaaagccgcttgaacagaattaaagattttatgcagaagatggagatggagaatgtgtggacactggacgtaaggcaggctacctcagagactattcttgaaagcatagacatgaagtgcattttccactgccccgaaaaatttgttgagcaagacaagctggtagaccatagaagtcggtgcaaatttagagtcgtgggctgcgaaaatgatggatgctcagtttcactttctgccattcatagtgaggagcatgactccatctgtccatttaaggccctgccatgtgagcagctgtgcgagcaacatgttatgcgcagcgagatggataaacattgtgcaacagtttgtgctatgaagcttattaactgtcctttctaccatgttggatgtgaaacagcctttccacaaggtaatcttgagaaccactgttcgaagctacttcaaacgcatatgttgtatgttctccaagcaagtacaagacaaaatgctgctgttaatgatatgaatcaacgattacaacttcttgagaaggctcagtcacttaacgaaatctctggggctttagatgttaggtcgctcactctgataataaaggagcaagaagcaaagatcaaggatcttgagagcggtatcaaagcacaagaagcaaagtcatatgtcaatgcaaggttgatcttccacttgaagatatcagtatatcgcgatgatattggcctcaaagctaatcattaagctgcattgattacatccgatgctggagtttgaagtcacaagaaactgacagacaagttaccaggaactgattggtgtcaatgaacgaggggagagatttctgtcccgtg

SEQ ID NO: 50729 - DNA, 1885 bp, Zea Mays
cgccactacgccggccccaacggcccaagccaagcggtccaggccacgggctcgtcggtcgtcgcctcgcgggtctcaactgcgctgcctccggccctccgggtgatcacgtcgcgacgccgcaaccaagcttccgagtcccgacgacgacctgccttgtccagtgagttatgagtgcagtggaggaagatggatgtagtttacggtgtgatctatgcgacactgagattgtacacagcatggcagaactcctgcttcgtggattggccacagcttcagtggacagcaccacgggcgatatattcaagagcgcatcttctgtagctgctgctgtgaagactgagctagaaaattatatgcttgtgagaactgaatcgcttatccgtgagtttgtcgatggagcccaggatcattcagatcaattgatgaaagcctccacaaggccaaccgagttcctatcagacttgattggcgacttcgtggcatccaaaaggaacttgctgagccatgtgtctgggtttttgtccagtgaaagccgcttgaacagaattaaagattttatgcagaagatggagatggagaatgtgtggacactggacgtaaggcaggctacctcagagactattcttgaaagcatagacatgaagtgcattttccactgccccgaaaaatttgttgagcaagacaagctggtagaccatagaagtcggtgcaaatttagagtcgtgggctgcgaaaatgatggatgctcagtttcactttctgccattcatagtgaggagcatgactccatctgtccatttaaggccctgccatgtgagcagctgtgcgagcaacatgttatgcgcagcgagatggataaacattgtgcaacagtttgtgctatgaagcttattaactgtcctttctaccatgttggatgtgaaacagcctttccacaaggtaatcttgagaaccactgttcgaagctacttcaaacgcatatgttgtatgttctccaagcaagtacaagacaaaatgctgctgttaatgatatgaatcaacgattacaacttcttgagaaggctcagtcacttaacgaaatctctggggctttagatgttaggtcgctcactctgataataaaggagcaagaagcaaagatcaaggatcttgagagcggtatcaaagcacaagaagcaaaggtgaagaaacttgagaacgagcttaggtcgaagaatgcacgataacttcctacacaaaccagagtggcatactttaggacctgtaaataatcagtagcactgacatatatttggaaattatgtttttttgttcatataaaaagtatagagaattgcagggtttagacttcagaatatgaacttctcttgggttatcttttaagttgatgtaattgatgttttgatatttttatatgatatattgattgcttggattattatggggattagttgtatccgaatcgtctattatctcctttgttggttttgtcccatgttggctttcttgtaattatgttagggcgcttagaagagtaattcataaaaaatattgataggttctgggcttgtacatagcaatactaatgtgattggaagcatttaccacatgatgtgtggaacactccttagcaaatacaaacattgccaatcactaagacagattttttgtgcaaatatatcgtgtatcagtcatatgtcaatgcaaggttgatcttccacttgaagatatcagtatatcgcgatgatattggcctcaaagctaatcattaagctgcattgattacatccgatgctggagtttgaagtcacaagaaactgacagacaagttaccaggaactgattggtgtcaatgaacgaggggagagatttctgtcccgtg

SEQ ID NO: 50730 - DNA, 1423 bp, Zea Mays
ctctcacctgttttggggagagcgggtataagcatcaagttagtttctgcgagaagataaggaaagataaagttcaaatatgtacggtacctgtttttcagcttccaaggttgcttcataactttgtagtgcagcctctagagctctaaatgtacgatttctactccagaatgatgcgaaggtgaaaaaacatggcacatatgtgatggtgctttgtctgaaggagtatttatgcttgaaaatagtaaactcaacctctctgattgaagttttcagaaatcttgcagacaaaacccataaggctacttttataattaggataaattcatttgtatgttagctctcaacaaaagaaacagacactatttgtatgccataaaatggccatatggattgcatacctcgtctatgtcttgcaatggaataatcacctaaaaagtgcagggcttagatacggaactcaatggtatcatatagggatagaatatgaaaaattggcctgaaagtttttgtcactattttaattcgatactgctaaccattgattgtggcagtgaccttatttgtgccagttacctgctagaagaacaacttaacttttacagattttctgaggaatatgaaatgatattatggtgtgccctcatcattttgggattcgaagagggctggagagaagtctaatgcacatttcatcttcaattactgtatatcaaacggctacattaagttccaggaaccattttcagaatatttgcttacattcaattgtttggagaatacgttagagtggaagcacagatgccattgggagatgtacatacggccatggagcaagaaacacctgtccagagcacaggagtaactttggtgaacaatctgcaaggataagagataaattagatgtatcgataaattataagttctgagggccaatgccttcaatcatcgcttgacgttgcttattcagtatcatctttctcggggactcagctccattgcattcttcaaaggagctggaaaacatgattgaattgggatgatgtttacattcagaaatgctggggttgtttttcccaaaacaaggttacctatcagaatctggaaatgctttagttgaacgaagacgcaggcagatctgcagccagatgtttttggattgtcaatacatgctgaaatccattgaattgtcaagatggacgcaagtggcataaaatattcaatcacaaatctcccataaaatgcatgttttacctgaccaaatttgctgtccagttcgtaccaactagcccccgattcgttctcagtgagaacaactatagttacagatccaataactttgcatttgcacacagtgtcccagtcatatattgttatggttacctatgcagaaagcaacaatgcatgtcacacgttttatcat

SEQ ID NO: 50731 - DNA, 3472 bp, Zea Mays
ctgacatttgggggcagctgtcagcaatttctcccttttcttcctcatttacttatccctctcgcttcccgcatcccacgccgccgtcctccgcaccgtccacgccgccgtcctccgaccaccgcgactctgccgcagccgccctctgcaccgtcctcgccgcgcaccaccgcgactctgaccgtggcccgcagtcctgcctcgctgccagtactgagcccgcaggcggcgcccgcagccgagccggaggtcgccagcgccgccagaagacttgcttcgagggattccctacgggctcaaggtcaatcaggtgtggtcgcagttttccatttttagggttcagctaaactggccccccatgtcccatggtgtgcccgcccccatgttagaagagttggcgagggaggcaacactcgccgatgtgtctattcttgtagatgggaatgacgcagagctacatgtacatggcaatggcgcagaggtacatgataatggcacagagttacatggcaatggtgcagtgctgaaaagagttgaaatgccccaggatttgggagcgatttcagccaaggaggtgccgctgcatgagggcaaggaggtgatacttgtggatgataatgacagcgggcaggaagatgatgcagagggtaaggtggatgagaacacacctcgtgttgggctgagattcaaaacttatgatgacgctctcaagtactataaacaatatgctgaggattctgggttttcagcaatcattctgaagtcgtcgtatttaaagtcaggggtgtgccgaaggttggtgattggatgtagtcgagctgggagagggagagcaaatgcgtgctatctatcaagagagtcgaccaagataaattgtccagcaaggatatctttgaagttaaggcaagatagatggcttcatattgatgatgctaagctcgagcacaaccatccatacaaccagtccactacatcacttattaattgttataaaaaactaacagatgccaagaatggggtatctgcctcacgattgaagggtcgcaggaacattccagctgaaaaagagcaagggaacttcacggagataggaaggcttaaatttggggaaggagacgatgaatatatccagaagttttttgggaatatgcagaacaagaatccttacttcttctacttagtagatttggataatcagggacgtttgaggaacttattctggagtgatgctaggtcacgggcagcgaatgattactttggtcatgatgttgtttactttgacacctcatacttgacagagaaatatgatttgccacttgttttcttcactgggatgaataatcatggtcagcctgttctgtttggtactgctttactgtcagatctaagtgttgatagttatgcttggttacttagagcatttttatcatgtatgaagggtctctgcccaaaggcaatcatcactgaacattacaatgctattatggatgctgttcaagaagttctccctgaagttagacatcgcctttgcctgtatcgtattatgaaagatgtagcagagaacttgaaagaacatgcagagtttaaaacaataaataaagcactgaagaaagtaacatatggatctttgaagataccagagtttgaaatggagtggaagaagattatcgaagagcatggacttggaggaaatgagtgcctcagttccctttatgagcaccgccaactctgggcacctgcatatctgagagataaattctgggcagggatgtctatttcacagcgaggggagtctatttcctcgtactatgatgggtttgtgtacccaaaaacttctttgaagcaattttttagtaaatatgagatgatattagagaacaaatacaaaaaggagtggcaagcagatgaagaatcttcccataggtctccattgactgtaacaaaattttacatggaagagcagctggctaaagcctatacaataaacatgttcagaaaatttcaagatgagttgaaagcaacaatgtattgcgatggtatgccaattaaagttgatggccgacttgttacttttgaagtgaaagaatgctcatacatggaagatggaaaggacacagagagcaggacctatgaagtttacttttgtaaagaagaacccaaagttgaaattgagtgtgaatgtggtttcgttcagttcactggcatcctgtgtagacatgcattgtctgtgttgaagttgcaggagatatttgagatcccaaaagattatgttctcgatcgctggagaagggactataagaaattatattataatgcaaagaaacctaatgaaatgcctcttagtgacattgttgaacgctctgattatttgttcacacaatgtagtcagctgctcaatctagggtttgtatctgagagtaggtaccttgttgctctgaagttactgagagaaatggaaagatctcttctggatgatggactacctgctagagacaggcagccaatgcttctttcctttgaggctgatgcaccagaaaatggtcaaggcctttttagtcctcagttttcagagggcgtaaagaattctcagtcagcccatgcaaagcgccgtggccggccactgaagaaagtgacagaatctactgatgataccgtaacacagccaaataaagaacaggatttcctacgatcatcatttgtcacagaaaatacaaatatgatccaagggccatcttctgcctcccatcttgaaggtcctcacatgggagtgcaaggaggcattgatttaatggatggaataccaaatctctcatttggtaatcattttggaatggatattaatcaccaacatcaagtacccaaccaccaaaggatgcagcagaacaatttcatacaggtgcaggcagaaccacatgggtttgggaatcagtgggtttaccacccaatgttgcaggataatccagtgctaagaactcctgcacgaagagcagggtagtgtgtattcattgctctaattatttcagttaaactttaggcaccatgacttctcaggctcctgtaatgacttcctgagtcctgaactaacctaaggataccgaggctgtacgtggcactggcactccagaatccagatggcaagaacttggcagtgaatccaattgattctaacatttttgttatatgatactgttagctgctctcactaggatgaatgttcaaactgtacatagcactggctctataatatgatctttttatttcctgatttgcgccagaactgatattttgtggcagaggacgcgtattgtttagcatattggtttgtttcagacaaagatcagactagtatgctgtatgcctttaaaacgagggagtggcagtagctcaagaggccaataccgcctcgtcctcgccagcaccttgtactacttccgttccgtcgtcccaaaataaatataaatgtcacgcgctg

SEQ ID NO: 50732 - DNA, 3062 bp, Zea Mays
gtcagcaatttctcccttttcttcctcatttacttatccctctcgcttcccgcatcccacgccgccgtcctccgcaccgtccacgccgccgtcctccgaccaccgcgactctgccgcagccgccctctgcaccgtcctcgccgcgcaccaccgcgactctgaccgtggcccgcagtcctgcctcgctgccagtactgagcccgcaggcggcgcccgcagccgagccggaggtcgccagcgccgccagaagacttgcttcgagggattccctacgggctcaaggtcaatcaggtgtggtcgcagttttccatttttagggttcagctaaactggccccccatgtcccatggtgtgcccgcccccatgttagaagagttggcgagggaggcaacactcgccgatgtgtctattcttgtagatgggaatgacgcagagctacatgtacatggcaatggcgcagaggtacatgataatggcacagagttacatggcaatggtgcagtgctgaaaagagttgaaatgccccaggatttgggagcgatttcagccaaggaggtgccgctgcatgagggcaaggaggtgatacttgtggatgataatgacagcgggcaggaagatgatgcagagggtaaggtggatgagaacacacctcgtgttgggctgagattcaaaacttatgatgacgctctcaagtactataaacaatatgctgaggattctgggttttcagcaatcattctgaagtcgtcgtatttaaagtcaggggtgtgccgaaggttggtgattggatgtagtcgagctgggagagggagagcaaatgcgtgctatctatcaagagagtcgaccaagataaattgtccagcaaggatatctttgaagttaaggcaagatagatggcttcatattgatgatgctaagctcgagcacaaccatccatacaaccagtccactacatcacttattaattgttataaaaaactaacagatgccaagaatggggtatctgcctcacgattgaagggtcgcaggaacattccagctgaaaaagagcaagggaacttcacggagataggaaggcttaaatttggggaaggagacgatgaatatatccagaagttttttgggaatatgcagaacaagaatccttacttcttctacttagtagatttggataatcagggacgtttgaggaacttattctggagtgatgctaggtcacgggcagcgaatgattactttggtcatgatgttgtttactttgacacctcatacttgacagagaaatatgatttgccacttgttttcttcactgggatgaataatcatggtcagcctgttctgtttggtactgctttactgtcagatctaagtgttgatagttatgcttggttacttagagcatttttatcatgtatgaagggtctctgcccaaaggcaatcatcactgaacattacaatgctattatggatgctgttcaagaagttctccctgaagttagacatcgcctttgcctgtatcgtattatgaaagatgtagcagagaacttgaaagaacatgcagagtttaaaacaataaataaagcactgaagaaagtaacatatggatctttgaagataccagagtttgaaatggagtggaagaagattatcgaagagcatggacttggaggaaatgagtgcctcagttccctttatgagcaccgccaactctgggcacctgcatatctgagagataaattctgggcagggatgtctatttcacagcgaggggagtctatttcctcgtactatgatgggtttgtgtacccaaaaacttctttgaagcaattttttagtaaatatgagatgatattagagaacaaatacaaaaaggagtggcaagcagatgaagaatcttcccataggtctccattgactgtaacaaaattttacatggaagagcagctggctaaagcctatacaataaacatgttcagaaaatttcaagatgagttgaaagcaacaatgtattgcgatggtatgccaattaaagttgatggccgacttgttacttttgaagtgaaagaatgctcatacatggaagatggaaaggacacagagagcaggacctatgaagtttacttttgtaaagaagaacccaaagttgaaattgagtgtgaatgtggtttcgttcagttcactggcatcctgtgtagacatgcattgtctgtgttgaagttgcaggagatatttgagatcccaaaagattatgttctcgatcgctggagaagggactataagaaattatattataatgcaaagaaacctaatgaaatgcctcttagtgacattgttgaacgctctgattatttgttcacacaatgtagtcagctgctcaatctagggtttgtatctgagagtaggtaccttgttgctctgaagttactgagagaaatggaaagatctcttctggatgatggactacctgctagagacaggcagccaatgcttctttcctttgaggctgatgcaccagaaaatggtcaaggcctttttagtcctcagttttcagagggcgtaaagaattctcagtcagcccatgcaaagcgccgtggccggccactgaagaaagtgacagaatctactgatgataccgtaacacagccaaataaagaacaggatttcctacgatcatcatttgtcacagaaaatacaaatatgatccaagggccatcttctgcctcccatcttgaaggtcctcacatgggagtgcaaggaggcattgatttaatggatggaataccaaatctctcatttggtaatcattttggaatggatattaatcaccaacatcaagtacccaaccaccaaaggatgcagcagaacaatttcatacaggtgcaggcagaaccacatgggtttgggaatcagtgggtttaccacccaatgttgcaggataatccagtgctaagaactcctgcacgaagagcagggtagtgtgtattcattgctctaattatttcagttaaactttagattcagacattcagtcatacactacggcatgattttttagcctggtt

SEQ ID NO: 50733 - DNA, 3294 bp, Zea Mays
atttacttatccctctcgcttcccgcatcccacgccgccgtcctccgcaccgtccacgccgccgtcctccgaccaccgcgactctgccgcagccgccctctgcaccgtcctcgccgcgcaccaccgcgactctgaccgtggcccgcagtcctgcctcgctgccagtactgagcccgcaggcggcgcccgcagccgagccggaggtcgccagcgccgccagaagacttgcttcgagggattccctacgggctcaaggtcaatcaggtgtggtcgcagttttccatttttagggttcagctaaactggccccccatgtcccatggtgtgcccgcccccatgttagaagagttggcgagggaggcaacactcgccgatgtgtctattcttgtagatgggaatgacgcagagctacatgtacatggcaatggcgcagaggtacatgataatggcacagagttacatggcaatggtgcagtgctgaaaagagttgaaatgccccaggatttgggagcgatttcagccaaggaggtgccgctgcatgagggcaaggaggtgatacttgtggatgataatgacagcgggcaggaagatgatgcagagggggtgtgccgaaggttggtgattggatgtagtcgagctgggagagggagagcaaatgcgtgctatctatcaagagagtcgaccaagataaattgtccagcaaggatatctttgaagttaaggcaagatagatggcttcatattgatgatgctaagctcgagcacaaccatccatacaaccagtccactacatcacttattaattgttataaaaaactaacagatgccaagaatggggtatctgcctcacgattgaagggtcgcaggaacattccagctgaaaaagagcaagggaacttcacggagataggaaggcttaaatttggggaaggagacgatgaatatatccagaagttttttgggaatatgcagaacaagaatccttacttcttctacttagtagatttggataatcagggacgtttgaggaacttattctggagtgatgctaggtcacgggcagcgaatgattactttggtcatgatgttgtttactttgacacctcatacttgacagagaaatatgatttgccacttgttttcttcactgggatgaataatcatggtcagcctgttctgtttggtactgctttactgtcagatctaagtgttgatagttatgcttggttacttagagcatttttatcatgtatgaagggtctctgcccaaaggcaatcatcactgaacattacaatgctattatggatgctgttcaagaagttctccctgaagttagacatcgcctttgcctgtatcgtattatgaaagatgtagcagagaacttgaaagaacatgcagagtttaaaacaataaataaagcactgaagaaagtaacatatggatctttgaagataccagagtttgaaatggagtggaagaagattatcgaagagcatggacttggaggaaatgagtgcctcagttccctttatgagcaccgccaactctgggcacctgcatatctgagagataaattctgggcagggatgtctatttcacagcgaggggagtctatttcctcgtactatgatgggtttgtgtacccaaaaacttctttgaagcaattttttagtaaatatgagatgatattagagaacaaatacaaaaaggagtggcaagcagatgaagaatcttcccataggtctccattgactgtaacaaaattttacatggaagagcagctggctaaagcctatacaataaacatgttcagaaaatttcaagatgagttgaaagcaacaatgtattgcgatggtatgccaattaaagttgatggccgacttgttacttttgaagtgaaagaatgctcatacatggaagatggaaaggacacagagagcaggacctatgaagtttacttttgtaaagaagaacccaaagttgaaattgagtgtgaatgtggtttcgttcagttcactggcatcctgtgtagacatgcattgtctgtgttgaagttgcaggagatatttgagatcccaaaagattatgttctcgatcgctggagaagggactataagaaattatattataatgcaaagaaacctaatgaaatgcctcttagtgacattgttgaacgctctgattatttgttcacacaatgtagtcagctgctcaatctagggtttgtatctgagagtaggtaccttgttgctctgaagttactgagagaaatggaaagatctcttctggatgatggactacctgctagagacaggcagccaatgcttctttcctttgaggctgatgcaccagaaaatggtcaaggcctttttagtcctcagttttcagagggcgtaaagaattctcagtcagcccatgcaaagcgccgtggccggccactgaagaaagtgacagaatctactgatgataccgtaacacagccaaataaagaacagcaggatttcctacgatcatcatttgtcacagaaaatacaaatatgatccaagggccatcttctgcctcccatcttgaaggtcctcacatgggagtgcaaggaggcattgatttaatggatggaataccaaatctctcatttggtaatcattttggaatggatattaatcaccaacatcaagtacccaaccaccaaaggatgcagcagaacaatttcatacaggtgcaggcagaaccacatgggtttgggaatcagtgggtttaccacccaatgttgcaggataatccagtgctaagaactcctgcacgaagagcagggtagtgtgtattcattgctctaattatttcagttaaactttaggcaccatgacttctcaggctcctgtaatgacttcctgagtcctgaactaacctaaggataccgaggctgtacgtggcactggcactccagaatccagatggcaagaacttggcagtgaatccaattgattctaacatttttgttatatgatactgttagctgctctcactaggatgaatgttcaaactgtacatagcactggctctataatatgatctttttatttcctgatttgcgccagaactgatattttgtggcagaggacgcgtattgtttagcatattggtttgtttcagacaaagatcagactagtatgctgtatgcctttaaaacgagggagtggcagtagctcaagaggccaataccgcctcgtcctcgccagcaccttgtactacttccgttccgtcgtcccaaaataaatataaatgtcacgcgctg

SEQ ID NO: 50734 - DNA, 3412 bp, Zea Mays
ccacgccgccgtcctccgcaccgtccacgccgccgtcctccgaccaccgcgactctgccgcagccgccctctgcaccgtcctcgccgcgcaccaccgcgactctgaccgtggcccgcagtcctgcctcgctgccagtactgagcccgcaggcggcgcccgcagccgagccggaggtcgccagcgccgccagaagacttgcttcgagggattccctacgggctcaaggtcaatcaggtgtggtcgcagttttccatttttagggttcagctaaactggccccccatgtcccatggtgtgcccgcccccatgttagaagagttggcgagggaggcaacactcgccgatgtgtctattcttgtagatgggaatgacgcagagctacatgtacatggcaatggcgcagaggtacatgataatggcacagagttacatggcaatggtgcagtgctgaaaagagttgaaatgccccaggttagagaggtgtatgatttgggagcgatttcagccaaggaggtgccgctgcatgagggcaaggaggtgatacttgtggatgataatgacagcgggcaggaagatgatgcagagggtaaggtggatgagaacacacctcgtgttgggctgagattcaaaacttatgatgacgctctcaagtactataaacaatatgctgaggattctgggttttcagcaatcattctgaagtcgtcgtatttaaagtcaggggtgtgccgaaggttggtgattggatgtagtcgagctgggagagggagagcaaatgcgtgctatctatcaagagagtcgaccaagataaattgtccagcaaggatatctttgaagttaaggcaagatagatggcttcatattgatgatgctaagctcgagcacaaccatccatacaaccagtccactacatcacttattaattgttataaaaaactaacagatgccaagaatggggtatctgcctcacgattgaagggtcgcaggaacattccagctgaaaaagagcaagggaacttcacggagataggaaggcttaaatttggggaaggagacgatgaatatatccagaagttttttgggaatatgcagaacaagaatccttacttcttctacttagtagatttggataatcagggacgtttgaggaacttattctggagtgatgctaggtcacgggcagcgaatgattactttggtcatgatgttgtttactttgacacctcatacttgacagagaaatatgatttgccacttgttttcttcactgggatgaataatcatggtcagcctgttctgtttggtactgctttactgtcagatctaagtgttgatagttatgcttggttacttagagcatttttatcatgtatgaagggtctctgcccaaaggcaatcatcactgaacattacaatgctattatggatgctgttcaagaagttctccctgaagttagacatcgcctttgcctgtatcgtattatgaaagatgtagcagagaacttgaaagaacatgcagagtttaaaacaataaataaagcactgaagaaagtaacatatggatctttgaagataccagagtttgaaatggagtggaagaagattatcgaagagcatggacttggaggaaatgagtgcctcagttccctttatgagcaccgccaactctgggcacctgcatatctgagagataaattctgggcagggatgtctatttcacagcgaggggagtctatttcctcgtactatgatgggtttgtgtacccaaaaacttctttgaagcaattttttagtaaatatgagatgatattagagaacaaatacaaaaaggagtggcaagcagatgaagaatcttcccataggtctccattgactgtaacaaaattttacatggaagagcagctggctaaagcctatacaataaacatgttcagaaaatttcaagatgagttgaaagcaacaatgtattgcgatggtatgccaattaaagttgatggccgacttgttacttttgaagtgaaagaatgctcatacatggaagatggaaaggacacagagagcaggacctatgaagtttacttttgtaaagaagaacccaaagttgaaattgagtgtgaatgtggtttcgttcagttcactggcatcctgtgtagacatgcattgtctgtgttgaagttgcaggagatatttgagatcccaaaagattatgttctcgatcgctggagaagggactataagaaattatattataatgcaaagaaacctaatgaaatgcctcttagtgacattgttgaacgctctgattatttgttcacacaatgtagtcagctgctcaatctagggtttgtatctgagagtaggtaccttgttgctctgaagttactgagagaaatggaaagatctcttctggatgatggactacctgctagagacaggcagccaatgcttctttcctttgaggctgatgcaccagaaaatggtcaaggcctttttagtcctcagttttcagagggcgtaaagaattctcagtcagcccatgcaaagcgccgtggccggccactgaagaaagtgacagaatctactgatgataccgtaacacagccaaataaagaacaggatttcctacgatcatcatttgtcacagaaaatacaaatatgatccaagggccatcttctgcctcccatcttgaaggtcctcacatgggagtgcaaggaggcattgatttaatggatggaataccaaatctctcatttggtaatcattttggaatggatattaatcaccaacatcaagtacccaaccaccaaaggatgcagcagaacaatttcatacaggtgcaggcagaaccacatgggtttgggaatcagtgggtttaccacccaatgttgcaggataatccagtgctaagaactcctgcacgaagagcagggtagtgtgtattcattgctctaattatttcagttaaactttaggcaccatgacttctcaggctcctgtaatgacttcctgagtcctgaactaacctaaggataccgaggctgtacgtggcactggcactccagaatccagatggcaagaacttggcagtgaatccaattgattctaacatttttgttatatgatactgttagctgctctcactaggatgaatgttcaaactgtacatagcactggctctataatatgatctttttatttcctgatttgcgccagaactgatattttgtggcagaggacgcgtattgtttagcatattggtttgtttcagacaaagatcagactagtatgctgtatgcctttaaaacgagggagtggcagtagctcaagaggccaataccgcctcgtcctcgccagcaccttgtactacttccgttccgtcgtcccaaaataaatataaatgtcacgcgctg

SEQ ID NO: 50735 - DNA, 3279 bp, Zea Mays
gtcacggcgcgttcactgttgcggtgaggaagtcgagagctaaaggccggacagctgctggaacagctgctcgcgttcactgttgcgcggcggggaagccgagagctaaaggccgggccccacctccctcgggcccttgtgcagatgcgcagaggttgcgtcccctaattcgtttgtcaccaaactttgcacccgcctcgccgtacccgtccgaaaccctagtctacctcggcggcggcgggccctccggcgatggaggtggaggaaccgctcccaacgtccaagaacccccgccgtgctcggcgccgggacctcaacgcactggatcccacattggaggagtccgacggggaggatattggtgttccggaagttggtatggtgttcaataatcacacagaagtcaaccgattctaccgccggtatgcccgccgtgttggctttggtgtctcagtaaggaggtcttcgttctcacgagaagggacctgcttatatctggagcttatgtgctgcaaaggagggaggccacgttatgagccgaagtttcggaaaagggcttcatcgaccactaactgcccagccaaagtacgagtgaagttgtggggagataaattgttgcatatagagttggcgatccttgatcataatcacccagtgagccctgcaatggcaaggtttttgaactcttataagcagctctctggccctgcaaagaggcggttgcgtatgggtggccctgggactatgcctgttgaagagtcaagcaagatgcccatggataagctgggggagcttgagcagcttctgtttggtgagagcaagcacaacagctttgtggagaggggtcgtttgaagctccaacctggagattcggaggcccttcggcttttcttcactcggatgcaggccaaaaatgccaacttttttaatgtcattgacctggacgatgaaggctgtaccaggaatgttttctgggcagatgcacggtctagagccatgtgtgagtactatagtgatgtcatcacacttgatacatcatatgtggctagtaaatatgatatgcctcttgcaacatttattggggtgaatcatcatggacaatctgtcttgatggggtgtgccctgctttctgatgaaacagcagaaacctattcatggctacttaagtcttggatagcatgtatgtacggcaatcttccaaaggctattgtcactgactattgtaggggcatccaaagtgctgtagctgagattattccgggagtccgtcatagaatgtgtttgtttcagataatgaggaaggccgcagaacgtttaggtgggctgtcagagtacagagctatcaacaaggcgatgcataaggctgtatatgattctttaaccattgatgagtttgaagaagaatggaatactttaattacatatagtgggcttcagagcaatgactggttaagatcactttatgaatgtcgatcttcatgggttcctgtttttattaaagatacattttgggcaggaatgtctactacacaaagaaatgaaacaatcactcctttttttgatggatatgttgatttgaaaactaccttgaaacaatttcttgtcaagtatgagatggctttgcagagtaaatatgagaaggaggcccaagcagattttgagacgtttcataagcaacgcccaccggtatcaaaattctatatggaagagcagctctcaaaagtatacacacataatatgttcaagaagttccaagatgagattgaagccataatgtactgccatgtatctttaattagtgttgatgggcctgtctctacattcaatgtcaaggagtgcattttctttgaagatggtaaaaggactatgagtaaaatttttgcagtgacatacaaagtggacgaaaagaatattagctgtatatgtggaggtttccaattcagtggcatactatgtaggcatagtctctcaatgctcaagtttcaactggttcgtgaaatcccacaacattatattcttgataggtggaagaaggattttcgacagttgcatgtgatgagacgccctccaagcgatcttgttcctaacaatcgcatggatcgatatgactatttatcaataagatgtttgcaacttgttgactctgcagtcctatcagataagtatcgccttgctttgaggttggtaagggagacagagaaatttctgctaaatagcaacacacatgatgatacacaaccaaggatcaagtctcgtgttcctaaagtaaataaaccaaatattgtgactggccaaaccatggtgggtgcagctactggaaatggaaatgatggtctcaaaggaccagaggctacagcagtcacgcaagtaccacaatcccaaaagggaggagcagaaaaaggaatagttcctactggctacattggagtaccagctaatctccaacaatttgtaggcaatcaaacagcatttcggccaagcattgtgtacatggtaccgagtggtgttgatccacatgcttttggaaatgttatgatgccagtgatgtaccagcagatgttccaggtgcctccgaagccaaatgagaccgtgcaggatacttcagccaatggaaaaagtaagcgacctcgcggtcagaagctcacagagacatcccaacaggcaaatggaaccccagcatctgcatctggctagggtggactactaacattttgaacaggatttctgtacatacgttgacttcgttgacttcatgccgtgagaaattttacatatggacgctggcactaacaattacctcaatgttgtccaaggtatctggcccaggaccggaaattatctctcgcacactttctttttgtgtgtggctgatttctgcaagacaggttccacctaatgtacaagtccccttgtcctttttatgctatgtaaatgaatgttcttggaacagctctatcatggctcatgagtacggtgtcagttgccttcgaattcccattgtcgataccagatcgatggctaatgcatatagaaatataaaggggacaaattatgattatatctttcttggcattgaagcgtgtcctgactggtcattgggtacttcggcaataatcagggcataccaaaggagagctctattggaagttttgttgttctctcggtattcagagcaaagctaatttattcaaaactaacaaacctgtcaaacgtgaaaaatgtgctctgtttttaaaaaattacaggctgttttttctagaaatatattgcaagttgttt

SEQ ID NO: 50736 - DNA, 3106 bp, Zea Mays
attcgtttgtcaccaaactttgcacccgcctcgccgtacccgtccgaaaccctagtctacctcggcggcggcgggccctccggcgatggaggtggaggaaccgctcccaacgtccaagaacccccgccgtgctcggcgccgggacctcaacgcactggatcccacattggaggagtccgacggggaggatattggtgttccggaagttggtatggtgttcaataatcacacagaagtcaaccgattctaccgccggtatgcccgccgtgttggctttggtgtctcagtaaggaggtcttcgttctcacgagaagggacctgcttatatctggagcttatgtgctgcaaaggagggaggccacgttatgagccgaagtttcggaaaagggcttcatcgaccactaactgcccagccaaagtacgagtgaagttgtggggagataaattgttgcatatagagttggcgatccttgatcataatcacccagtgagccctgcaatggcaaggtttttgaactcttataagcagctctctggccctgcaaagaggcggttgcgtatgggtggccctgggactatgcctgttgaagagtcaagcaagatgcccatggataagctgggggagcttgagcagcttctgtttggtgagagcaagcacaacagctttgtggagaggggtcgtttgaagctccaacctggagattcggaggcccttcggcttttcttcactcggatgcaggccaaaaatgccaacttttttaatgtcattgacctggacgatgaaggctgtaccaggaatgttttctgggcagatgcacggtctagagccatgtgtgagtactatagtgatgtcatcacacttgatacatcatatgtggctagtaaatatgatatgcctcttgcaacatttattggggtgaatcatcatggacaatctgtcttgatggggtgtgccctgctttctgatgaaacagcagaaacctattcatggctacttaagtcttggatagcatgtatgtacggcaatcttccaaaggctattgtcactgactattgtaggggcatccaaagtgctgtagctgagattattccgggagtccgtcatagaatgtgtttgtttcagataatgaggaaggccgcagaacgtttaggtgggctgtcagagtacagagctatcaacaaggcgatgcataaggctgtatatgattctttaaccattgatgagtttgaagaagaatggaatactttaattacatatagtgggcttcagagcaatgactggttaagatcactttatgaatgtcgatcttcatgggttcctgtttttattaaagatacattttgggcaggaatgtctactacacaaagaaatgaaacaatcactcctttttttgatggatatgttgatttgaaaactaccttgaaacaatttcttgtcaagtatgagatggctttgcagagtaaatatgagaaggaggcccaagcagattttgagacgtttcataagcaacgcccaccggtatcaaaattctatatggaagagcagctctcaaaagtatacacacataatatgttcaagaagttccaagatgagattgaagccataatgtactgccatgtatctttaattagtgttgatgggcctgtctctacattcaatgtcaaggagtgcattttctttgaagatggtaaaaggactatgagtaaaatttttgcagtgacatacaaagtggacgaaaagaatattagctgtatatgtggaggtttccaattcagtggcatactatgtaggcatagtctctcaatgctcaagtttcaactggttcgtgaaatcccacaacattatattcttgataggtggaagaaggattttcgacagttgcatgtgatgagacgccctccaagcgatcttgttcctaacaatcgcatggatcgatatgactatttatcaataagatgtttgcaacttgttgactctgcagtcctatcagataagtatcgccttgctttgaggttggtaagggagacagagaaatttctgctaaatagcaacacacatgatgatacacaaccaaggatcaagtctcgtgttcctaaagtaaataaaccaaatattgtgactggccaaaccatggtgggtgcagctactggaaatggaaatgatggtctcaaaggaccagaggctacagcagtcacgcaagtaccacaatcccaaaagggaggagcagaaaaaggaatagttcctactggctacattggagtaccagctaatctccaacaatttgtaggcaatcaaacagcatttcggccaagcattgtgtacatgagtggtgttgatccacatgcttttggaaatgttatgatgccagtgatgtaccagcagatgttccaggtgcctccgaagccaaatgagaccgtgcaggatacttcagccaatggaaaaagtaagcgacctcgcggtcagaagctcacagagacatcccaacaggcaaatggaaccccagcatctgcatctggctagggtggactactaacattttgaacaggatttctgtacatacgttgacttcgttgacttcatgccgtgagaaattttacatatggacgctggcactaacaattacctcaatgttgtccaaggtatctggcccaggaccggaaattatctctcgcacactttctttttgtgtgtggctgatttctgcaagacaggttccacctaatgtacaagtccccttgtcctttttatgctatgtaaatgaatgttcttggaacagctctatcatggctcatgagtacggtgtcagttgccttcgaattcccattgtcgataccagatcgatggctaatgcatatagaaatataaaggggacaaattatgattatatctttcttggcattgaagcgtgtcctgactggtcattgggtacttcggcaataatcagggcataccaaaggagagctctattggaagttttgttgttctctcggtattcagagcaaagctaatttattcaaaactaacaaacctgtcaaacgtgaaaaatgtgctctgtttttaaaaaattacaggctgttttttctagaaatatattgcaagttgttt

SEQ ID NO: 50737 - DNA, 2452 bp, Zea Mays
aaatttccattgccttccttgaattcgattcgaggtgtgggactgccgaggaagccttcagaatttcattctgaagcgggcgggcaggcagtggttgtcatttagggatcccacattggaggagtccgacggggaggatattggtgttccggaagttggtatggtgttcaataatcacacagaagtcaaccgattctaccgccggtatgcccgccgtgttggctttggtgtctcagtaaggaggtcttcgttctcacgagaagggacctgcttatatctggagcttatgtgctgcaaaggagggaggccacgttatgagccgaagtttcggaaaagggcttcatcgaccactaactgcccagccaaagtacgagtgaagttgtggggagataaattgttgcatatagagttggcgatccttgatcataatcacccagtgagccctgcaatggcaaggtttttgaactcttataagcagctctctggccctgcaaagaggcggttgcgtatgggtggccctgggactatgcctgttgaagagtcaagcaagatgcccatggataagctgggggagcttgagcagcttctgtttggtgagagcaagcacaacagctttgtggagaggggtcgtttgaagctccaacctggagattcggaggcccttcggcttttcttcactcggatgcaggccaaaaatgccaacttttttaatgtcattgacctggacgatgaaggctgtaccaggaatgttttctgggcagatgcacggtctagagccatgtgtgagtactatagtgatgtcatcacacttgatacatcatatgtggctagtaaatatgatatgcctcttgcaacatttattggggtgaatcatcatggacaatctgtcttgatggggtgtgccctgctttctgatgaaacagcagaaacctattcatggctacttaagtcttggatagcatgtatgtacggcaatcttccaaaggctattgtcactgactattgtaggggcatccaaagtgctgtagctgagattattccgggagtccgtcatagaatgtgtttgtttcagataatgaggaaggccgcagaacgtttaggtgggctgtcagagtacagagctatcaacaaggcgatgcataaggctgtatatgattctttaaccattgatgagtttgaagaagaatggaatactttaattacatatagtgggcttcagagcaatgactggttaagatcactttatgaatgtcgatcttcatgggttcctgtttttattaaagatacattttgggcaggaatgtctactacacaaagaaatgaaacaatcactcctttttttgatggatatgttgatttgaaaactaccttgaaacaatttcttgtcaagtatgagatggctttgcagagtaaatatgagaaggaggcccaagcagattttgagacgtttcataagcaacgcccaccggtatcaaaattctatatggaagagcagctctcaaaagtatacacacataatatgttcaagaagttccaagatgagattgaagccataatgtactgccatgtatctttaattagtgttgatgggcctgtctctacattcaatgtcaaggagtgcattttctttgaagatggtaaaaggactatgagtaaaatttttgcagtgacatacaaagtggacgaaaagaatattagctgtatatgtggaggtttccaattcagtggcatactatgtaggcatagtctctcaatgctcaagtttcaactggttcgtgaaatcccacaacattatattcttgataggtggaagaaggattttcgacagttgcatgtgatgagacgccctccaagcgatcttgttcctaacaatcgcatggatcgatatgactatttatcaataagatgtttgcaacttgttgactctgcagtcctatcagataagtatcgccttgctttgaggttggtaagggagacagagaaatttctgctaaatagcaacacacatgatgatacacaaccaaggatcaagtctcgtgttcctaaagtaaataaaccaaatattgtgactggccaaaccatggtgggtgcagctactggaaatggaaatgatggtctcaaaggaccagaggctacagcagtcacgcaagtaccacaatcccaaaagggaggagcagaaaaaggaatagttcctactggctacattggagtaccagctaatctccaacaatttgtaggcaatcaaacagcatttcggccaagcattgtgtacatggtaccgctagagctaggagattgggaggagcaaaggaggtcacaagggagcatgcttgttggtgatgtgaggaagacgagtggtggtgtgggctgtgtggcgataaggaggccgcgagtcaccctgggtgccaaatctgcactattccaggatattgatgcttttcttgcatattga

SEQ ID NO: 50738 - DNA, 3034 bp, Zea Mays
attcgaggtgtgggactgccgaggaagccttcagaatttcattctgaagcgggcgggcaggcagtggttgtcatttagggatcccacattggaggagtccgacggggaggatattggtgttccggaagttggtatggtgttcaataatcacacagaagtcaaccgattctaccgccggtatgcccgccgtgttggctttggtgtctcagtaaggaggtcttcgttctcacgagaagggacctgcttatatctggagcttatgtgctgcaaaggagggaggccacgttatgagccgaagtttcggaaaagggcttcatcgaccactaactgcccagccaaagtacgagtgaagttgtggggagataaattgttgcatatagagttggcgatccttgatcataatcacccagtgagccctgcaatggcaaggtttttgaactcttataagcagctctctggccctgcaaagaggcggttgcgtatgggtggccctgggactatgcctgttgaagagtcaagcaagatgcccatggataagctgggggagcttgagcagcttctgtttggtgagagcaagcacaacagctttgtggagaggggtcgtttgaagctccaacctggagattcggaggcccttcggcttttcttcactcggatgcaggccaaaaatgccaacttttttaatgtcattgacctggacgatgaaggctgtaccaggaatgttttctgggcagatgcacggtctagagccatgtgtgagtactatagtgatgtcatcacacttgatacatcatatgtggctagtaaatatgatatgcctcttgcaacatttattggggtgaatcatcatggacaatctgtcttgatggggtgtgccctgctttctgatgaaacagcagaaacctattcatggctacttaagtcttggatagcatgtatgtacggcaatcttccaaaggctattgtcactgactattgtaggggcatccaaagtgctgtagctgagattattccgggagtccgtcatagaatgtgtttgtttcagataatgaggaaggccgcagaacgtttaggtgggctgtcagagtacagagctatcaacaaggcgatgcataaggctgtatatgattctttaaccattgatgagtttgaagaagaatggaatactttaattacatatagtgggcttcagagcaatgactggttaagatcactttatgaatgtcgatcttcatgggttcctgtttttattaaagatacattttgggcaggaatgtctactacacaaagaaatgaaacaatcactcctttttttgatggatatgttgatttgaaaactaccttgaaacaatttcttgtcaagtatgagatggctttgcagagtaaatatgagaaggaggcccaagcagattttgagacgtttcataagcaacgcccaccggtatcaaaattctatatggaagagcagctctcaaaagtatacacacataatatgttcaagaagttccaagatgagattgaagccataatgtactgccatgtatctttaattagtgttgatgggcctgtctctacattcaatgtcaaggagtgcattttctttgaagatggtaaaaggactatgagtaaaatttttgcagtgacatacaaagtggacgaaaagaatattagctgtatatgtggaggtttccaattcagtggcatactatgtaggcatagtctctcaatgctcaagtttcaactggttcgtgaaatcccacaacattatattcttgataggtggaagaaggattttcgacagttgcatgtgatgagacgccctccaagcgatcttgttcctaacaatcgcatggatcgatatgactatttatcaataagatgtttgcaacttgttgactctgcagtcctatcagataagtatcgccttgctttgaggttggtaagggagacagagaaatttctgctaaatagcaacacacatgatgatacacaaccaaggatcaagtctcgtgttcctaaagtaaataaaccaaatattgtgactggccaaaccatggtgggtgcagctactggaaatggaaatgatggtctcaaaggaccagaggctacagcagtcacgcaagtaccacaatcccaaaagggaggagcagaaaaaggaatagttcctactggctacattggagtaccagctaatctccaacaatttgtaggcaatcaaacagcatttcggccaagcattgtgtacatggtaccgagtggtgttgatccacatgcttttggaaatgttatgatgccagtgatgtaccagcagatgttccaggtgcctccgaagccaaatgagaccgtgcaggatacttcagccaatggaaaaagtaagcgacctcgcggtcagaagctcacagagacatcccaacaggcaaatggaaccccagcatctgcatctggctagggtggactactaacattttgaacaggatttctgtacatacgttgacttcgttgacttcatgccgtgagaaattttacatatggacgctggcactaacaattacctcaatgttgtccaaggtatctggcccaggaccggaaattatctctcgcacactttctttttgtgtgtggctgatttctgcaagacaggttccacctaatgtacaagtccccttgtcctttttatgctatgtaaatgaatgttcttggaacagctctatcatggctcatgagtacggtgtcagttgccttcgaattcccattgtcgataccagatcgatggctaatgcatatagaaatataaaggggacaaattatgattatatctttcttggcattgaagcgtgtcctgactggtcattgggtacttcggcaataatcagggcataccaaaggagagctctattggaagttttgttgttctctcggtattcagagcaaagctaatttattcaaaactaacaaacctgtcaaacgtgaaaaatgtgctctgtttttaaaaaattacaggctgttttttctagaaatatattgcaagttgttt

SEQ ID NO: 50739 - DNA, 1656 bp, Zea Mays
gcctcctgggctgctgccgccgccgcttgcttcgcttgggtgggcgagggtcgacgagcgtgccgccgccgcatcgcaagtcgcaaccacgaggccgcggccacctcggacgttcagcttgcgctcaacgtcaacgagatacccgtggaatctgcggtcccgcgcgcgcggcccgatgcgacagcagggtgcggcgccacacgatttcggtgttcgtcggggacgagagcggcatgatcaaccggatcgccggggtgttcgccaggagaggctacaacatcgagtcgctcgccgtggggctcaacaaggacaaggccctcttcaccattgtcgtctccgggaccgacatggtgctcaaccaagtcattgagcagctcaataagctcgtcaacgttcatagtgttgaagatctatctaaagaacctcaggttgaaagagagctgatgcttataaagctaaacgttgaacctgatcagcgccctgaggtcatggttttagttgacattttcagagcaaaagttgttgatatatctgagaaaacacttaccatagaggtagctggagatcctggcaaaattgctgcagtgcagaggaatctaaggaaattcggcatcaaagaaatttgcaggacaggaaaaattgctttgagacgtgaaaagattggtgcaacagcccgtttctggcgattttctgctgcttcttatccagaccttatagaggcattaccaaaaaaaccgcttacatctgtaaataagacagtgaatggcagttttgttcgaccatccaatgctgggggtgatgtttatcctgtggaatcttacgagagctcagctaaccaagtacttgatgctcactggggtgttctggatgatgatgatgcaactggactttgctcgcataccctctccatccttgtgaatgattgtcctggtgttctcaacattgtaacaggagtctttgctcgcaggggctacaatatacagagccttgctgttggctcagctgagaaggaaggcatttcacgtattacaacagttgttcctggtactgttgaatccattgggaagttagttcagcagctttacaagcttattgatgtgcatgaagttcatgacattacccactcaccttttgctgaaagggagctgatgcttattaaggtttctgtaaacactgctgctcggagggaaattctagatattgctgaaatcttccgagcaaaacctattgacgtttctgaccatacagtaacccttcagcttactggagatcttgacaagatggttgcactacaaaggttattagagccatatggcatctgcgaggtcgccagaactggacgagtggcactggtccgtgaatcgaaggtcgactccaagtacctccgcggttactctcttccattgtagcctggcatttgtgattggtggtggacccgataaagagcttggtttgttgttatagatcagaccatctcgcgctgggatgtgttgtgcaattacaggacttgtttctttcatgttgtgaactccctggcctgcgagttcaataatgcccctttttaatgcgcgttgaggttgcatatgtatcccatcgactgtccgaataagatgcatagcataactgtttacttcagcgaagagagattcgaaatca

SEQ ID NO: 50740 - DNA, 1793 bp, Zea Mays
aaccagccccgtccggagggacagacagcgagcgagcgagcgagcacgcccgcggcccgcactgccaagtgccactgcccccagcaacccccgccaccttagcgcccgacggcatgtctctcgcctcctcccaccacctgcggccgtcgccggcgggcccggcgcggcgcccgggctgccccgcgccgcgcgtggcgctctgccggccacccggtgcctcgcccccgtaccgcggccgctgctgcaccatcgtggcggcggcggcgcctgccgcgggcgccggcggagaggcagcctcggcccccgccgccgctgtgccggcggtcgcccccggtgccgccgccagggacaaggtgcggcgccacacgatttcggtgttcgtcggggacgagagcggcatgatcaaccggatcgccggggtgttcgccaggagaggctacaacatcgagtcgctcgccgtggggctcaacaaggacaaggccctcttcaccattgtcgtctccgggaccgacatggtgctcaaccaagtcattgagcagctcaataagctcgtcaacgttcatagtgttgaagatctatctaaagaacctcaggttgaaagagagctgatgcttataaagctaaacgttgaacctgatcagcgccctgaggtcatggttttagttgacattttcagagcaaaagttgttgatatatctgagaaaacacttaccatagaggtagctggagatcctggcaaaattgctgcagtgcagaggaatctaaggaaattcggcatcaaagaaatttgcaggacaggaaaaattgctttgagacgtgaaaagattggtgcaacagcccgtttctggcgattttctgctgcttcttatccagaccttatagaggcattaccaaaaaaaccgcttacatctgtaaataagacagtgaatggcagttttgttcgaccatccaatgctgggggtgatgtttatcctgtggaatcttacgagagctcagctaaccaagtacttgatgctcactggggtgttctggatgatgatgatgcaactggactttgctcgcataccctctccatccttgtgaatgattgtcctggtgttctcaacattgtaacaggagtctttgctcgcaggggctacaatatacagagccttgctgttggctcagctgagaaggaaggcatttcacgtattacaacagttgttcctggtactgttgaatccattgggaagttagttcagcagctttacaagcttattgatgtgcatgaagttcatgacattacccactcaccttttgctgaaagggagctgatgcttattaaggtttctgtaaacactgctgctcggagggaaattctagatattgctgaaatcttccgagcaaaacctattgacgtttctgaccatacagtaacccttcagcttactggagatcttgacaagatggttgcactacaaaggtcgccagaactggacgagtggcactggtccgtgaatcgaaggtcgactccaagtacctccgcggttactctcttccattgtagcctggcatttgtgattggtggtggacccgataaagagcttggtttgttgttatagatcagaccatctcgcgctgggatgtgttgtgcaattacaggacttgtttctttcatgttgtgaactccctggcctgcgagttcaataatgcccctttttaatgcgcgttgaggttgcatatgtatcccatcgactgtccgaataagatgcatagcataactgtttacttcagcgaagagagattcgaaatca

SEQ ID NO: 50741 - DNA, 1283 bp, Zea Mays
gaagtagagttatttctgaactttcttggttgaagatctatctaaagaacctcaggttgaaagagagctgatgcttataaagctaaacgttgaacctgatcagcgccctgaggtcatggttttagttgacattttcagagcaaaagttgttgatatatctgagaaaacacttaccatagaggtagctggagatcctggcaaaattgctgcagtgcagaggaatctaaggaaattcggcatcaaagaaatttgcaggacaggaaaaattgctttgagacgtgaaaagattggtgcaacagcccgtttctggcgattttctgctgcttcttatccagaccttatagaggcattaccaaaaaaaccgcttacatctgtaaataagacagtgaatggcagttttgttcgaccatccaatgctgggggtgatgtttatcctgtggaatcttacgagagctcagctaaccaagtacttgatgctcactggggtgttctggatgatgatgatgcaactggactttgctcgcataccctctccatccttgtgaatgattgtcctggtgttctcaacattgtaacaggagtctttgctcgcaggggctacaatatacagagccttgctgttggctcagctgagaaggaaggcatttcacgtattacaacagttgttcctggtactgttgaatccattgggaagttagttcagcagctttacaagcttattgatgtgcatgaagttcatgacattacccactcaccttttgctgaaagggagctgatgcttattaaggtttctgtaaacactgctgctcggagggaaattctagatattgctgaaatcttccgagcaaaacctattgacgtttctgaccatacagtaacccttcagcttactggagatcttgacaagatggttgcactacaaaggttattagagccatatggcatctgcgaggtcgccagaactggacgagtggcactggtccgtgaatcgaaggtcgactccaagtacctccgcggttactctcttccattgtagcctggcatttgtgattggtggtggacccgataaagagcttggtttgttgttatagatcagaccatctcgcgctgggatgtgttgtgcaattacaggacttgtttctttcatgttgtgaactccctggcctgcgagttcaataatgcccctttttaatgcgcgttgaggttgcatatgtatcccatcgactgtccgaataagatgcatagcataactgtttacttcagcgaagagagattcgaaatca

SEQ ID NO: 50742 - DNA, 1763 bp, Zea Mays
aatgcagcccaggagtggagaaggagggcgtggcactggtacccgattccggttccgggtaggggaggaaggtaagcgaagaagcatccggactctctcgctcgagggtagggcagggcagggcagggcaggcggcgatccgaatccaatcgccggagggaggaagccaccggtggccgcagtgagggcggcggaggtagaggcaaagggatgacgcgcgggaagcagaagatcgacgcgcagcggcgtaacgcggagcgaaaccagaaatccaaggggtctcagctcgaggcccgcgccgtcggcctcaagatcgtctgctccatctgcaaggtaagccggggcccttcgatcgatctccagccatcgtgtggacctgctgggttgcctgggtagtagatccggccagcccgccagatccgtgctttgccctgcccctattcaggcgaaggaatagtgactaccgcatcacatcgtacggcacggagtatatctatctagcgcctcactttatctgcacaaaaaaaatcgtgccaacagattgaaatgttcctgctgcatatataccataagaataagattgccctaaccttctttaatcaggcagtttgtacgtattggtgccttggtagtagtgttacctaggcactgtgactcgaagtggaatctactagccagtgtaaccttctcctagcatgatttgatcccagagctaatacttcagaaacagttcctgccgtggaacgttttgtgggttcgtctctaaacatggttcagctgtactcttttatttgtcatccagtaatttctctatatgatggcgcaaaggttactgtggcatacttactgtcttctatagttctatattttctgcattcgtttctgctcacaagtaaagttgtgggttcattatgtatgtggatgccttactttttagctggctagttgcatttgaggaacatgtctgctcacctggcgttgctatttctatttccgtaggtacaattggcaaatgaaaaacagctgaccgatcactatggatcaaagcatccaaaggagaaacctccgagcacatcgagcaccgaataaccatggctggtcgtgacgcagaaatatagatcctgcttggctggtttgaggatctttaagtccgtctgatccatgccttggacctcaacgtcagttatatactctctagtgtgttcatttcctcttgtttcaggtattgtgttgtcgtgctgccaatgtgtctccaaactgtatgtggtcaccatggcattgggatgatgcgaaaaaattatgagcgtatccaatgtttgtgtggcttacaagatggtttgtgcccgtgcgttcgctccctaaacggcttcgcccgtgccgcttgaatggtgccgtgcttccgaatgaatgaaatgaaatgacgccccgtttggatcactagaattgaattctattctaataatagtaatttaggcatatatcaaattaagctaattcacttttatacaaacgccccgtgaaggaaattggccggtcgatcccaaacaaggaaggctcctgctcctctgactcggatgttatgccattagccggatgtaattttcttcttaatcctcgaaaatcctagaggtaatttaaattttcaaactagcctccttatataaatgtctcttagttttgtactccttgcgctctaaattaactgcacgtctcgcataacatactagcccttatataatattaatgtttaccaaataaacatt

SEQ ID NO: 50743 - DNA, 1485 bp, Zea Mays
gttggatcgtaactaacgctagagaagcactccgaagacctgctctccttcgttctgtttgttgtttttcttctcccgtccgcagtccgcttggcgtgcgcgacggctagggcgaccgccgccgccctacgccctacgtccagctgcccatgtcttcttcgggccccttgccggcgggaactcaccagaccaggaatcgtgctggcaaccggcgcaagtctggagatagggctgataaagctaattactcctacaataatgatggagagaagagcaatgttccttcattaaagaaccttcctccaattgttcatcatgaaacattcttcagcaatgttcagaatgactacaatcaaacaggattagtgcctttggagggatgttctgccagtgaggcttcacagcttctcagtgatcgctggactgctgcaatcaacatgtacaatgaccaaacaattgacccctcaggtgaatcaacagtactctaaactctacatttctccatggttatcggctggctcttcaatgttaaatctggcagtgaggaaaaaatttggaccttagtacttactagtgactttcatgtatattattacatgcaatgacgacttcaaagttgacattatattcttgtactttgctcgacctattgtagcagctgttaagaattgagaatttcatactgggtagaggtttttgtgcatatactctgctgcaactcataaaactaatatgttcatattgggcagagagctagtgatgctgtagtgttagtataatatatcatgctttgcactgcaacattaaacaacagtagtcaatcaaagtttggaatacagtttttagggcgtgctacctggaaaggtgtttcgatcaaattgggatttcaataacatgctataaattatattctggtgaactttgtatatcaacctgacacctcagataggtatccgtgcgagtggtgccagtgtgaaacatgttaatgctgttaacttcgctatcttgatgtttgcctagagaaaccggtaatgtattctggatctagcagctcatcatggggtcacctgaagcttcctcatcagatgaacttcctcgaggagttgcgccgtgcagtggacgctcatacagaatttgcgtcgcctgtcgtcacctggaactaatcgaagtctatgtatgatgtatcccatacacggatgatgtgccaaaaggctttcgtctgacctgcagctgcttctggaatctgcatctgtacaattgtaccattgttacccctggccttgtagctgcaaagcagtttgttgtaacaattaaatgaggcgccggatcctcacgccatcgaaagtttgaaacagcttggttgttgtatggtagttccaagacttggtgattataatgtgcgcattttctcgacctggagttttagaatatgtagaaggtaatgcttattgaaaacctcagcttttaacttcaacggtatttctc

SEQ ID NO: 50744 - DNA, 914 bp, Zea Mays
gttggatcgtaactaacgctagagaagcactccgaagacctgctctccttcgttctgtttgttgtttttcttctcccgtccgcagtccgcttggcgtgcgcgacggctagggcgaccgccgccgccctacgccctacgtccagctgcccatgtcttcttcgggccccttgccggcgggaactcaccagaccaggaatcgtgctggcaaccggcgcaagtctggagatagggctgataaagctaattactcctacaataatgatggagagaagagcaatgttccttcattaaagaaccttcctccaattgttcatcatgaaacattcttcagcaatgttcagaatgactacaatcaaacaggattagtgcctttggagggatgttctgccagtgaggcttcacagcttctcagtgatcgctggactgctgcaatcaacatgtacaatgaccaaacaattgacccctcagctcatcatggggtcacctgaagcttcctcatcagatgaacttcctcgaggagttgcgccgtgcagtggacgctcatacagaatttgcgtcgcctgtcgtcacctggaactaatcgaagctgttcgccaggtctatgtatgatgtatcccatacacggatgatgtgccaaaaggctttcgtctgacctgcagctgcttctggaatctgcatctgtacaattgtaccattgttacccctggccttgtagctgcaaagcagtttgttgtaacaattaaatgaggcgccggatcctcacgccatcgaaagtttgaaacagcttggttgttgtatggtagttccaagacttggtgattataatgtgcgcattttctcgacctggagttttagaatatgtagaaggtaatgcttattgaaaacctcagcttttaacttcaacggtatttctc

SEQ ID NO: 50745 - DNA, 902 bp, Zea Mays
gttggatcgtaactaacgctagagaagcactccgaagacctgctctccttcgttctgtttgttgtttttcttctcccgtccgcagtccgcttggcgtgcgcgacggctagggcgaccgccgccgccctacgccctacgtccagctgcccatgtcttcttcgggccccttgccggcgggaactcaccagaccaggaatcgtgctggcaaccggcgcaagtctggagatagggctgataaagctaattactcctacaataatgatggagagaagagcaatgttccttcattaaagaaccttcctccaattgttcatcatgaaacattcttcagcaatgttcagaatgactacaatcaaacaggattagtgcctttggagggatgttctgccagtgaggcttcacagcttctcagtgatcgctggactgctgcaatcaacatgtacaatgaccaaacaattgacccctcagctcatcatggggtcacctgaagcttcctcatcagatgaacttcctcgaggagttgcgccgtgcagtggacgctcatacagaatttgcgtcgcctgtcgtcacctggaactaatcgaagtctatgtatgatgtatcccatacacggatgatgtgccaaaaggctttcgtctgacctgcagctgcttctggaatctgcatctgtacaattgtaccattgttacccctggccttgtagctgcaaagcagtttgttgtaacaattaaatgaggcgccggatcctcacgccatcgaaagtttgaaacagcttggttgttgtatggtagttccaagacttggtgattataatgtgcgcattttctcgacctggagttttagaatatgtagaaggtaatgcttattgaaaacctcagcttttaacttcaacggtatttctc

SEQ ID NO: 50746 - DNA, 933 bp, Zea Mays
gttggatcgtaactaacgctagagaagcactccgaagacctgctctccttcgttctgtttgttgtttttcttctcccgtccgcagtccgcttggcgtgcgcgacggctagggcgaccgccgccgccctacgccctacgtccagctgcccatgtcttcttcgggccccttgccggcgggaactcaccagaccaggaatcgtgctggcaaccggcgcaagtctggagatagggctgataaagctaattactcctacaataatgatggagagaagagcaatgttccttcattaaagaaccttcctccaattgttcatcatgaaacattcttcagcaatgttcagaatgactacaatcaaacaggattagtgcctttggagggatgttctgccagtgaggcttcacagcttctcagtgatcgctggactgctgcaatcaacatgtacaatgaccaaacaattgacccctcagagaaaccggtaatgtattctggatctagcagctcatcatggggtcacctgaagcttcctcatcagatgaacttcctcgaggagttgcgccgtgcagtggacgctcatacagaatttgcgtcgcctgtcgtcacctggaactaatcgaagtctatgtatgatgtatcccatacacggatgatgtgccaaaaggctttcgtctgacctgcagctgcttctggaatctgcatctgtacaattgtaccattgttacccctggccttgtagctgcaaagcagtttgttgtaacaattaaatgaggcgccggatcctcacgccatcgaaagtttgaaacagcttggttgttgtatggtagttccaagacttggtgattataatgtgcgcattttctcgacctggagttttagaatatgtagaaggtaatgcttattgaaaacctcagcttttaacttcaacggtatttctc

SEQ ID NO: 50747 - DNA, 2734 bp, Zea Mays
ctccgatccctcgcccataactcctcctccggcaccgcgctcttgcttcctccctctccccgtctcacgcgcgcgctatatataaagggagagccccagcagcccttcttctccaccgttcttgccgttgcgaaccctctcctcctctcaggccaggccaccaagcaacaagatgccaagcgacgaccaccatcgccgccggacgttcttgctcccggtctactgcccaagcttctcggccaccggggcccccgcgtcaccgccggctgccgcagcctcgacggggcgcctctgctgctggatgaccaggaagaagaggaagcggctcaagcaccgccgtgcgagcaccagcggctgctgggagcgcttccgtgctcatgctgttctgtgatacggcgctatcctcgccgagcttattcctcgacttccaacctattcaccaccgctgtcagaacccttcttgtgacaaaaagttaagcgagcgtcttcttgaccttgcaagactttttgtccggagataatctcctacgaattaccctcttgcatcttgcgactacctctcctcgtctcgcgcctgtcgatccttccatccctctcgtccccgtctatccctcttgagcttggaacactctcgcagctagtagtagctatatattattgttttcctttcacctactttcgcatgaactactctgctatttgctgtaataaagctaagttttccggtgcattgttcttttgcagtagttgcctttcagctagctagtactttggcttcaactttgtccatgcaataatgaaagtgaagtttctttctggtgtatttcagtgtgcaaagcgttaattatcgggtttctgtattgactctccccctgctggccaattaattcttgatccaactggggaataagaatgatattattgagcagtttgttgttgttgacaaaaaaaaagagaaacccactgtctccgctccgactagcccaggccagcagaaacccactgtctccgctccgactcccttttcctctctctctctcgttctcatccatccagccaggcgagccaacaagcaagcaaaagtaaacggggcgaggagctgcggctgagcaggaggagggagccggagatggtgggtctcgtcggcggcagcacggcgcgggcggagcacgtcgtcgccaacgccggaggggaggcagagtacgtgcgccgcatgcaccgccacgcgccgaccgagcaccagtgcacctccaccctcgtcaagcacatcaaggcgcccgtccacctcgtgtgggagctggtgcggaggttcgaccagccgcagcggtacaagccattcgtcaggaactgcgtcgtgcgcggggaccagctcgaggtgggcagcctgcgcgacgtcaacgtcaatcccggccttgatatgcccgcgactgtagcttgtgaaatcaaggcacagcttgtccgcacagccgaggcggctaggcagctcgcgccaatgctcgaagtcgggaggccaagctaccaaggccgcagctcagtctaccaatcttcctcaaagatgatgtcggctatctccgtggctcatttggggtgcaaagacatggacgtcgtggacgtcggagtggtagggatggtggactcgcagagcctatcctcggcacttgagaaactctatttctgggagaggaagctgtatgctgaggtcaagattgtaggctgtggagtacggagttcacaaaatctaggagatgaacaacctcagggtaaccctctcattgtctcatgccagcagccgcacccacgtcctgttctgtctcgcacgctctcgccaacttgtggttgtccatccgccgccaagcacccgaccccagcagtcgcaatattacttctgtgaaaattatacggaacaagcagactgggcactcagaaggctatggttttattgagttttcctctcgagctactgcagaacatactctgataaacttcaatcggcagatgatgtcgaatgttgagatgacttttaagctgaactgggcttctgctagcactggtgataagcgtggagatagtggttctgatcacacaatatttgttggtgatttggctcatggtgttactgactccatgttggaagatgtgttcagagctaagtacccttcagttagaggagctaatgttgttgttgatacttgataggatgactggatggcccaaaggatatggtttcgtgcgttttggagatctgaataatgcattgtgaagatgtacatttgtgcttgtttgatctgaaaaggggacaacttttagatatagcataataggatatgaagatgaaagatctgtacttagaaatttgttcatgaatgctttgtttgacatttaacttcgtatgctggcatctcagtgtattaagtgttaatgttacaattattcttggatcaacaccattcgagtatttgactattgtttgtcacgtgcacttattattcttgcatcgctattttgaaccaatttttaagttaccgtagcaacgcaaaacttgatctgagtgactgatcgtgagctaatgtaacagtatgaattatatggcttgaacatggtaggtgtaaaatgttttgttcatcggtagagtattccagatgtgatcggcttaacagtatgaaatatatagaactatgtgagccaatgtaacagtatgaattatataagttatcaagatattatatgccctcgt

SEQ ID NO: 50748 - DNA, 2801 bp, Zea Mays
ctccgatccctcgcccataactcctcctccggcaccgcgctcttgcttcctccctctccccgtctcacgcgcgcgctatatataaagggagagccccagcagcccttcttctccaccgttcttgccgttgcgaaccctctcctcctctcaggccaggccaccaagcaacaagatgccaagcgacgaccaccatcgccgccggacgttcttgctcccggtctactgcccaagcttctcggccaccggggcccccgcgtcaccgccggctgccgcagcctcgacggggcgcctctgctgctggatgaccaggaagaagaggaagcggctcaagcaccgccgtgcgagcaccagcggctgctgggagcgcttccgtgctcatgctgttctgtgatacggcgctatcctcgccgagcttattcctcgacttccaacctattcaccaccgctgtcagaacccttcttgtgacaaaaagttaagcgagcgtcttcttgaccttgcaagactttttgtccggagataatctcctacgaattaccctcttgcatcttgcgactacctctcctcgtctcgcgcctgtcgatccttccatccctctcgtccccgtctatccctcttgagcttggaacactctcgcagctagtagtagctatatattattgttttcctttcacctactttcgcatgaactactctgctatttgctgtaataaagctaagttttccggtgcattgttcttttgcagtagttgcctttcagctagctagtactttggcttcaactttgtccatgcaataatgaaagtgaagtttctttctggtgtatttcagtgtgcaaagcgttaattatcgggtttctgtattgactctccccctgctggccaattaattcttgatccaactggggaataagaatgatattattgagcagtttgttgttgttgacaaaaaaaaagagaaacccactgtctccgctccgactagcccaggccagcagaaacccactgtctccgctccgactcccttttcctctctctctctcgttctcatccatccagccaggcgagccaacaagcaagcaaaagtaaacggggcgaggagctgcggctgagcaggaggagggagccggagatggtgggtctcgtcggcggcagcacggcgcgggcggagcacgtcgtcgccaacgccggaggggaggcagagtacgtgcgccgcatgcaccgccacgcgccgaccgagcaccagtgcacctccaccctcgtcaagcacatcaaggcgcccgtccacctcgtgtgggagctggtgcggaggttcgaccagccgcagcggtacaagccattcgtcaggaactgcgtcgtgcgcggggaccagctcgaggtgggcagcctgcgcgacgtcaacgtcaatcccggccttgatatgcccgcgactgtagcttgtgaaatcaaggcacagcttgtccgcacagccgaggcggctaggcagctcgcgccaatgctcgaagtcgggaggccaagctaccaaggccgcagctcagtctaccaatcttcctcaaagatgatgtcggctatctccgtggctcatttggggtgcaaagacatggacgtcgtggacgtcggagtggtagggatggtggactcgcagagcctatcctcggcacttgagaaactctatttctgggagaggaagctgtatgctgaggtcaagattgtaggctgtggagtacggagttcacaaaatctaggagatgaacaacctcagggtaaccctctcattgtctcatgccagcagccgcacccacgtcctgttctgtctcgcacgctctcgccaacttgtggttgtccatccgccgccaagcacccgaccccagcagtcgcaatgcgattgcgttgtgcatggcggacttgagacagttgatggtttgtccgaagcattggaaatctgagaattacttctgtgaaaattatacggaacaagcagactgggcactcagaaggctatggttttattgagttttcctctcgagctactgcagaacatactctgataaacttcaatcggcagatgatgtcgaatgttgagatgacttttaagctgaactgggcttctgctagcactggtgataagcgtggagatagtggttctgatcacacaatatttgttggtgatttggctcatggtgttactgactccatgttggaagatgtgttcagagctaagtacccttcagttagaggagctaatgttgttgttgatacttgataggatgactggatggcccaaaggatatggtttcgtgcgttttggagatctgaataatgcattgtgaagatgtacatttgtgcttgtttgatctgaaaaggggacaacttttagatatagcataataggatatgaagatgaaagatctgtacttagaaatttgttcatgaatgctttgtttgacatttaacttcgtatgctggcatctcagtgtattaagtgttaatgttacaattattcttggatcaacaccattcgagtatttgactattgtttgtcacgtgcacttattattcttgcatcgctattttgaaccaatttttaagttaccgtagcaacgcaaaacttgatctgagtgactgatcgtgagctaatgtaacagtatgaattatatggcttgaacatggtaggtgtaaaatgttttgttcatcggtagagtattccagatgtgatcggcttaacagtatgaaatatatagaactatgtgagccaatgtaacagtatgaattatataagttatcaagatattatatgccctcgt

SEQ ID NO: 50749 - DNA, 1132 bp, Zea Mays
aaaaaccccaagcaagaggaccggacttcatctttgattgtaggctgtggagtacggagttcacaaaatctaggagatgaacaacctcagggtaaccctctcattgtctcatgccagcagccgcacccacgtcctgttctgtctcgcacgctctcgccaacttgtggttgtccatccgccgccaagcacccgaccccagcagtcgcaatgcgattgcgttgtgcatggcggacttgagacagttgatggtttgtccgaagcattggaaatctgagaattacttctgtgaaaattatacggaacaagcagactgggcactcagaaggctatggttttattgagttttcctctcgagctactgcagaacatactctgataaacttcaatcggcagatgatgtcgaatgttgagatgacttttaagctgaactgggcttctgctagcactggtgataagcgtggagatagtggttctgatcacacaatatttgttggtgatttggctcatggtgttactgactccatgttggaagatgtgttcagagctaagtacccttcagttagaggagctaatgttgttgttgatacttgataggatgactggatggcccaaaggatatggtttcgtgcgttttggagatctgaataatgcattgtgaagatgtacatttgtgcttgtttgatctgaaaaggggacaacttttagatatagcataataggatatgaagatgaaagatctgtacttagaaatttgttcatgaatgctttgtttgacatttaacttcgtatgctggcatctcagtgtattaagtgttaatgttacaattattcttggatcaacaccattcgagtatttgactattgtttgtcacgtgcacttattattcttgcatcgctattttgaaccaatttttaagttaccgtagcaacgcaaaacttgatctgagtgactgatcgtgagctaatgtaacagtatgaattatatggcttgaacatggtaggtgtaaaatgttttgttcatcggtagagtattccagatgtgatcggcttaacagtatgaaatatatagaactatgtgagccaatgtaacagtatgaattatataagttatcaagatattatatgccctcgt

SEQ ID NO: 50750 - DNA, 2523 bp, Zea Mays
acgcagtccgctatcaaccaagctaggggcagcaagctgaaacatccgtcggatcggtggatcaaagcaggccgcagctactccacggtgacggccgccatgagagccctcctctccctctcccgtctcgcccgacggcttccagcttctctcagccctgtgagggcgccgacaacattactcctccggcacatccatgcggacgcccctccgccaccgccatctcatgactcgacgcccttcgtctcccgcatcctcgaatcggagccgtgcctgaccccgaacgacgagtcggagccggcatccgatccgaccctcgacgagttcctcgcgcgcttcgtggctgccttccgcccgcgactggcggctgccttccccaaccatgaccgtgacgtgctcgacgagatgctccgcctcgtcgcggacgccgtgctgtgccgcctcaccgggaccgaccgggggggcgatgctattgagctcaatgacgacctctgggcggccgtatgggaggtcagcgcctccgtgcgcgaggctatgcgccgggatcaggtccgcgccgaccttcgccaataccttcactgcgacgaggtgaaggagatgacgcggttcgctgtcgatgtcggcatccgcggttccatgctccgggagctccgcttcaagtgggccggcgagaagctcgacgaggtcgagttctatcgcggccttgatgacaagcacgccgatgccgaggccggcgccgaccgggcgccagtgccgaggctgactgctttgccgaagaggaagggagaggtgaagttcacgatgtacgggctggacatgtctgacccaaagtgggctgaggtggcggagcgagtggccgaggctgaggcgcattttgtgcctgaggaggccaaggctgtagaagggagggcgaagaaggctgaggagcggctgctgtccgttgacccgaggagtggagatccggtgcctgccattgaggagtggaaggaagatctcaggccaaaccgtgtcgattggatatctctgcttgagcggattaaggcacggaatgtcgagttatacctcaaggttgctgaaattctgctagatcaagaatcttttgaggcaaacatccgagattactcaaaattaattgatcttcatgctaaagcaaataatgtggaaagtgcagagagagtacttggtaaaatgaaagagaagggtattgcacctgatgtcatcatatccatcgtattagtccacatgtatagcagggcaggcaagctagagcaggccaaggaggcttttgattttattcgtagggaggattttaaaccagatcggaaactcttcagttcaatgattaaatgctatatcaaccatggagaaccagaacaagcagaaaatctgataaaagttatgagggatacacgtgtcaaacccactagagaaatctacataggtctcttacgatcatatgttcagcgaggcttgatggcatatgcagagagggttcttaagacaatgtcatttgatagagtcgagcctacacaggaactctatacaatatgtatagaagcatatggacgtgttggtgatccaaaagaggcctgtgccatgtttgatcaaatgaggaggaagtttggacacgaagcagatgacagttcaattgctggtgtggtggccgcatacatgaagaataaccaactagaccatgctttgcagtggctgctgagtttagagaaggaaggacttcaacttggtgtcaagacaaatctcatgttactggattggttgtctatgttgcagctagttccggaggctgaacagtttgtgcagaagataaagaatcttggagaagagcccatagaagtccatgtgttccttgccgatatgtatgcgaagtcgtcccaggaagataaagcccgcaggtccctcaagatcttggaagagaagaagaaactattgaagtctgatcagtttgagagggttataagaggccttgtcgatggtgggttttcggaggaggcaaataaattctacaaaatgatgaaatcctgtggctttgaaccatcaaaaacaatcgaggtcgctgttaaggctctcaggattaggggcggttctcatcgcactggtaggtagagcctgtacgccggcagagtggcagtgatctactgggcacgcagtcaggcaaagagggattctggtgtgagaaccttgtggcactgacacggtacaatcaaattgacaaaactcagtgctgaaagatggtttggccaattttttttttctggttgtcaattgtctcgaggcgcgacgttgcttccatagactatgtagttaataggtcctggctaaatgactttgttgtttccagtgatcaggattttcacttgtattagatgaggtttgaagtgattgtaacactgatccatctttcaggttgtgccaaggaaaacatatatccgcgattagtggttattactctgttcagacatgcaatgatgtaagttaataaatattccttctggcttccggtcacaa

SEQ ID NO: 50751 - DNA, 2513 bp, Zea Mays
ccgctatcaaccaagctaggggcagcaagctgaaacatccgtcggatcggtggatcaaaggccgcagctactccacggtgacggccgccatgagagccctcctctccctctcccgtctcgcccgacggcttccagcttctctcagccctgtgagggcgccgacaacattactcctccggcacatccatgcggacgcccctccgccaccgccatctcatgactcgacgcccttcgtctcccgcatcctcgaatcggagccgtgcctgaccccgaacgacgagtcggagccggcatccgatccgaccctcgacgagttcctcgcgcgcttcgtggctgccttccgcccgcgactggcggctgccttccccaaccatgaccgtgacgtgctcgacgagatgctccgcctcgtcgcggacgccgtgctgtgccgcctcaccgggaccgaccgggggggcgatgctattgagctcaatgacgacctctgggcggccgtatgggaggtcagcgcctccgtgcgcgaggctatgcgccgggatcaggtccgcgccgaccttcgccaataccttcactgcgacgaggtgaaggagatgacgcggttcgctgtcgatgtcggcatccgcggttccatgctccgggagctccgcttcaagtgggccggcgagaagctcgacgaggtcgagttctatcgcggccttgatgacaagcacgccgatgccgaggccggcgccgaccgggcgccagtgccgaggctgactgctttgccgaagaggaagggagaggtgaagttcacgatgtacgggctggacatgtctgacccaaagtgggctgaggtggcggagcgagtggccgaggctgaggcgcattttgtgcctgaggaggccaaggctgtagaagggagggcgaagaaggctgaggagcggctgctgtccgttgacccgaggagtggagatccggtgcctgccattgaggagtggaaggaagatctcaggccaaaccgtgtcgattggatatctctgcttgagcggattaaggcacggaatgtcgagttatacctcaaggttgctgaaattctgctagatcaagaatcttttgaggcaaacatccgagattactcaaaattaattgatcttcatgctaaagcaaataatgtggaaagtgcagagagagtacttggtaaaatgaaagagaagggtattgcacctgatgtcatcatatccatcgtattagtccacatgtatagcagggcaggcaagctagagcaggccaaggaggcttttgattttattcgtagggaggattttaaaccagatcggaaactcttcagttcaatgattaaatgctatatcaaccatggagaaccagaacaagcagaaaatctgataaaagttatgagggatacacgtgtcaaacccactagagaaatctacataggtctcttacgatcatatgttcagcgaggcttgatggcatatgcagagagggttcttaagacaatgtcatttgatagagtcgagcctacacaggaactctatacaatatgtatagaagcatatggacgtgttggtgatccaaaagaggcctgtgccatgtttgatcaaatgaggaggaagtttggacacgaagcagatgacagttcaattgctggtgtggtggccgcatacatgaagaataaccaactagaccatgctttgcagtggctgctgagtttagagaaggaaggacttcaacttggtgtcaagacaaatctcatgttactggattggttgtctatgttgcagctagttccggaggctgaacagtttgtgcagaagataaagaatcttggagaagagcccatagaagtccatgtgttccttgccgatatgtatgcgaagtcgtcccaggaagataaagcccgcaggtccctcaagatcttggaagagaagaagaaactattgaagtctgatcagtttgagagggttataagaggccttgtcgatggtgggttttcggaggaggcaaataaattctacaaaatgatgaaatcctgtggctttgaaccatcaaaaacaatcgaggtcgctgttaaggctctcaggattaggggcggttctcatcgcactggtaggtagagcctgtacgccggcagagtggcagtgatctactgggcacgcagtcaggcaaagagggattctggtgtgagaaccttgtggcactgacacggtacaatcaaattgacaaaactcagtgctgaaagatggtttggccaattttttttttctggttgtcaattgtctcgaggcgcgacgttgcttccatagactatgtagttaataggtcctggctaaatgactttgttgtttccagtgatcaggattttcacttgtattagatgaggtttgaagtgattgtaacactgatccatctttcaggttgtgccaaggaaaacatatatccgcgattagtggttattactctgttcagacatgcaatgatgtaagttaataaatattccttctggcttccggtcacaa

SEQ ID NO: 50752 - DNA, 1523 bp, Zea Mays
attatgccttcaccttcagacaagggttatgattctagaatttctgaaaactttaatgagtagttctcgttgctgaaattctgctagatcaagaatcttttgaggcaaacatccgagattactcaaaattaattgatcttcatgctaaagcaaataatgtggaaagtgcagagagagtacttggtaaaatgaaagagaagggtattgcacctgatgtcatcatatccatcgtattagtccacatgtatagcagggcaggcaagctagagcaggccaaggaggcttttgattttattcgtagggaggattttaaaccagatcggaaactcttcagttcaatgattaaatgctatatcaaccatggagaaccagaacaagcagaaaatctgataaaagttatgagggatacacgtgtcaaacccactagagaaatctacataggtctcttacgatcatatgttcagcgaggcttgatggcatatgcagagagggttcttaagacaatgtcatttgatagagtcgagcctacacaggaactctatacaatatgtatagaagcatatggacgtgttggtgatccaaaagaggcctgtgccatgtttgatcaaatgaggaggaagtttggacacgaagcagatgacagttcaattgctggtgtggtggccgcatacatgaagaataaccaactagaccatgctttgcagtggctgctgagtttagagaaggaaggacttcaacttggtgtcaagacaaatctcatgttactggattggttgtctatgttgcagctagttccggaggctgaacagtttgtgcagaagataaagaatcttggagaagagcccatagaagtccatgtgttccttgccgatatgtatgcgaagtcgtcccaggaagataaagcccgcaggtccctcaagatcttggaagagaagaagaaactattgaagtctgatcagtttgagagggttataagaggccttgtcgatggtgggttttcggaggaggcaaataaattctacaaaatgatgaaatcctgtggctttgaaccatcaaaaacaatcgaggtcgctgttaaggctctcaggattaggggcggttctcatcgcactggtaggtagagcctgtacgccggcagagtggcagtgatctactgggcacgcagtcaggcaaagagggattctggtgtgagaaccttgtggcactgacacggtacaatcaaattgacaaaactcagtgctgaaagatggtttggccaattttttttttctggttgtcaattgtctcgaggcgcgacgttgcttccatagactatgtagttaataggtcctggctaaatgactttgttgtttccagtgatcaggattttcacttgtattagatgaggtttgaagtgattgtaacactgatccatctttcaggttgtgccaaggaaaacatatatccgcgattagtggttattactctgttcagacatgcaatgatgtaagttaataaatattccttctggcttccggtcacaa

SEQ ID NO: 50753 - DNA, 1523 bp, Zea Mays
ctcctccaaaacagtgtttgatttaggttttaaatgtattttgtcagccaaatttgttgttagccatggttgctgaaattctgctagatcaagaatcttttgaggcaaacatccgagattactcaaaattaattgatcttcatgctaaagcaaataatgtggaaagtgcagagagagtacttggtaaaatgaaagagaagggtattgcacctgatgtcatcatatccatcgtattagtccacatgtatagcagggcaggcaagctagagcaggccaaggaggcttttgattttattcgtagggaggattttaaaccagatcggaaactcttcagttcaatgattaaatgctatatcaaccatggagaaccagaacaagcagaaaatctgataaaagttatgagggatacacgtgtcaaacccactagagaaatctacataggtctcttacgatcatatgttcagcgaggcttgatggcatatgcagagagggttcttaagacaatgtcatttgatagagtcgagcctacacaggaactctatacaatatgtatagaagcatatggacgtgttggtgatccaaaagaggcctgtgccatgtttgatcaaatgaggaggaagtttggacacgaagcagatgacagttcaattgctggtgtggtggccgcatacatgaagaataaccaactagaccatgctttgcagtggctgctgagtttagagaaggaaggacttcaacttggtgtcaagacaaatctcatgttactggattggttgtctatgttgcagctagttccggaggctgaacagtttgtgcagaagataaagaatcttggagaagagcccatagaagtccatgtgttccttgccgatatgtatgcgaagtcgtcccaggaagataaagcccgcaggtccctcaagatcttggaagagaagaagaaactattgaagtctgatcagtttgagagggttataagaggccttgtcgatggtgggttttcggaggaggcaaataaattctacaaaatgatgaaatcctgtggctttgaaccatcaaaaacaatcgaggtcgctgttaaggctctcaggattaggggcggttctcatcgcactggtaggtagagcctgtacgccggcagagtggcagtgatctactgggcacgcagtcaggcaaagagggattctggtgtgagaaccttgtggcactgacacggtacaatcaaattgacaaaactcagtgctgaaagatggtttggccaattttttttttctggttgtcaattgtctcgaggcgcgacgttgcttccatagactatgtagttaataggtcctggctaaatgactttgttgtttccagtgatcaggattttcacttgtattagatgaggtttgaagtgattgtaacactgatccatctttcaggttgtgccaaggaaaacatatatccgcgattagtggttattactctgttcagacatgcaatgatgtaagttaataaatattccttctggcttccggtcacaa

SEQ ID NO: 50754 - DNA, 580 bp, Zea Mays
gtcgtcgctgggtgcagccggagttggcagccagtctgcggcttcatagcgggtggttttagtttcggaaaggggtttcggcttccacatgcatcccacacccaaaacagttgtccacttcgcaggcggtcatgcgcacgacgttggtcttttctctcgtgaagcatgtggtggcggtaggtcaaccagcacaaggaagcttcatcagaagccgcggagaagatggatcgaggaggattggagcacttgatccatagccatggtcggtgttaccacactctcatgttctgatttgaagatgctatgttaggcatcaacatacatggagttcaatagaacaagagtcatggattatgcattttatattattattacaattaaaggacaagatgggaaaaatgaatctctacagttttccaaagaatatgaaaaaagtgagtggggcccacctaaaactttccccaatctcattctgaatcaaacagcagcttcttgctcccgagtcggccagcacgcgccgccgggccgcatctcgtctccctcctcgaagcacctcctctccctggctccacgacgcggc

SEQ ID NO: 50755 - DNA, 3629 bp, Zea Mays
ctcgccaccacccctgcgctcgaccacctccgcgcgcgccaagacctactgcgtgaccaccaaattctcgcgcacctccccgacccttctctgggagcactatcaccgccggtaagtcacgctgttgttttctccaccgccttccccccgttccggcgatagtggaccacatgttagaatacgagaaagactaggggttatttgcaggggctacgactcacgtgaatagttctccaaggatatactttaaatgaatcagttgacaacaagctacgggccctgacacaaagttgttttccttttcccttttgatttttgttttaataatttgccaaaaaacttctaaaagtcacaactagctattccctaacccaaaaatagtgaaaccaattttgtagtgctctttgtggctagatctacgggataaaaataggaaattgtgtttttggaatacttttatatgcatagtttacatttaaactagaaattgcatatttcttggaaatagaaagaaaaataggagaacacctggaaaatgcttagaaacttttgtgtagaacccttagttgctttgtcacttgtgttatggagtaaataggaatagtgaaataaataacaaaactgctgattcttttagaaaaaaacaaaataaatgaaaatggactggaacaaagcaacacctatttttaatagactagttagaggagttagcatctattataaaaatataatctactcataattcgatacgaagtgagtattaccttatttaaaattataagatgtcttagtttttgctaaacatgtagatgtacattatatatgattaaaaatatctaaaaagccaaaaacatattttaatttaaaatggacggagtacatgctacatgtgtataatcaaataaaaacattcctaacaaattaagcattttatccactactaggtgtgtgtgtccgtgtgatgccacggaatacaaattgacgagcctcgaacccaggggttcagcattaccaaatcggcgtgagtgcgacgaaaatcgaggaatgcgagcacggttaacgaggttgggagcgaggagggggaggcggcacggggaagggggcgggggagcggcgttgtcgacgtcgttggcggaaattgatgagccttgaacccgaggttcggggttagggatcgacatagccaaatcgacgtgtgtgcgacgtgaatcggggagtgagtgtgcggttaatgaggtcgggagtgcggagggggtgcagggaaggggcaggggagcggcgttgtcgacattgttggtagaaattgatgagcctcgaaccccagggttcgggttcaggatcggcattgccaaatcggtgtaataggggagtccgtgtgcggttaacgggtcaggagcgcagagggggtagcgacgcggggaagaagggcgggcgagcggtgctgtcgacgtcattagcggattggagcccagtcaggctgcagagggggagggagaggcggaggcatggttgtgccatggtctacactacaatcttaataatagtatagataataaatggtgatgaaatttatatgctctagcgggcatagttgttagaggaagtataataagctgatgtagaggaacgataaaatatgccatatcagatttatggtgatgtggaagaaaaacaattgagggtagagaaaaagcgagctgctcactaccagctgagagtgggctagctactcactgactccaagactctctatgagaaagagatgtggaccaaatattaaatatacagcttgtatcatgaggtggttattatatgagcaaccttttagttggttatatgacatagcaatatcataaagcgcgttatatgctatattattaaacatgctcttagatcattctcaattgaggttgcatgatattaattagtagactgcatagaattttcatgacatagcactatatttattatgaaataaatgaaaatagtttcattaacatgagactatgttaacacatttccaaggtattagaaggcgcgtgaaaccaccattaaagcaatttgtttcatctatttctattggttatttagattcgcatgttagtctataaaattgtgccgtaaaactatttattaaaaggatatattctattcttcattttatcttatacctattgatgtggtaacacaaatatcgtgatgaaactacccctcaaaatcaaaggttttcaagaatgttcaccaagaaagaagcagctcactgtcattgaagagataagtacgagacgtcacgaatggaacagtggctggacagcgacccccaccaccaatccaccattccctggaggctggagcacaaatgtgccgtcatcgccaaagtggctgcgctgcagagactagctgtgtcacacaggacggacagtatgaacaggatctgcagactgcagcgccatctatcgtccatctcctgttaaatctctgaatatatggatcgggggtaccactgaccctggcaaggagaaaagagaacaatgtgacgatgctaagcagatctaagacagagaatcgaccggcggtgtgcttccattggaattcttctgtcaccagcgtcttctgctgccatggcgaaatccagaatctggagattagatgatgcatggggtactgtaaaaggggaattggaagacaactggtagtagcaattgacatctcaaaattgaggaaagcggaacggatctggtcaactaacaccaacacccacatactactgtaccttccgtccttccgaacgatgaacattgaagaatttaccttcccgagaagcttgcaggcgcaggcaacggttggatcccttccctttcctcggaaacaatgaacagggctagcagcggcttgtccgtaccaagcgaatgggagggaatcccgaatccgtgcgaggaggaggtacacgcgcgcgcccaaaagctcagatccggcatccaggccgtacgtacgaaccgcccagaaatagaaattcccgcggacggccgccgggcaccaacgagaggccacgtagcgtatagcggcgacccgttccgcggcatacaatgacacggacaagaagagcggcgggtggacgtagctagcggctagcgtgccagcgccgcgggcacaggcgcggtgatcacgacggctgcgcacaggcacagcgcggccggcttcgatcgaccggcaaggcagccggaggagaggaacggggagggggagtgggtgacagatagagcagtgagcacgcggccgcgacggcacatccgccggtgccgttccgcccggccgtgtgctcactctcttctgtcaccgcccgccgcccgcccgccggctgatcgatagccagtcagcgcggccgccggcgtgtggcctgcagaacagcttagcgccgccgccgcgatcaccgcacggcggccacacaactacatgcgaggcgaggtgggtggatggtgagagaggcgagcgtcgcggggaggaacaagggggcgctgctggtgccggctatataggcccgcgcgcgccagagcaacgggacggagaggctagcagcgtgtgcgcctgccggaacattccgtgcctgctggctgcctggcaacttcttg

SEQ ID NO: 50756 - DNA, 1929 bp, Zea Mays
tgtgcgtgtgcgtccccgcgttgccgcttccctccttcctcccgtcctcggcgaatcgaagccgctagcccccgacatccatggccgccggtttagcccgtctccgatccgctgtcgagcggctcgggtcctcccgcgcccgcgcccgtgcccgccccttctccgcagccgttgctgaggccgcggccgcggtgaccgccagctcggggctggggatctggctgctgtcgtcgaacccgcactcgctggcggattccggccaggcggaggatgccgccaccgcaggcggcggaggcaacattgccttccccgctgctgtcggcggtgtcggagccaccggggagcgggagggcaggttcctgttcggagattcatatcgccgaagggtgttcttcaagtacgagaaaaggattaggacgcgcagccctccagagaagatctttgagtacttcgcatccgtccacagcccggaaggtgagatgcacatgttacctacggacctgatgagggcagtcgttcccattttccccccatcagagtccaaaattgtcagggaagggagattgaggggggagcgccaccctggcgagctacaatgtgccccgtctgactttttcatgttattcgatacaaatgctgatggagtcatctcctttgccgagtatatcttctttgtaacattacttagcatccctgaatcaagtttcaatgtggctttcaagatgtttgaccttgaccacaatggggaaattgacaaagatgagtttaggaaggtgatgacactgatgcgatcctataatagacaaggagctgcccacagggatggtttacgctttgggcgtaaggttggtcagccagtggaaaatggtggactcgtcgagtacttctttggcaaggatgggaatgaacatctacactatgataagttctctagttttttgaaacaattgcatgatgagattgtccgcttggagttcagtcactacgatttgaaatcatcgaacacaatatctgcaaaggactttgcgttatctatggttgcttctgctgatatgaatcacatagacaagttattggatagagttgatgatttggatgacaatcttgacctcaaggatctgcgcattacctttgaggagttcaaggcatttgctgatcttcgaagaaggttggaaccatttgcaatggctatcttcagctatggcaaagtaaatggtttgttgacgaagcaggatctaaaacgtgctgcatcacatgtttgtggagtggacttgactgacaaagtagtggacataattttccatgtatttgatgctaactgcgatggtaacctgagctcagaggagttcttgaggtcattacaaagaagagaaaatgacattcgccagccagcaacttctggttttctaggggtgatcgcctgctggctgaactgtacaaagtgttctcttcaacaaatgctgccccagtagattcttttgacagtcgtgacactgttccattgtccttggttgctctgtattaaatgagctggagaacgtgatcgacaaccgatagagttctgaagtgtgaagaggacttttggtgtaaatattaccctgcggccccttcttaatactgattagagttggtcataccacatagcagctgtaaggaataccttccgttcttgtccaagggctccgataacatacatcttctcgcttgtttgggagcaaggataccaaataggattggagaggctaaaatgcttttgctattcaaacaaaccctaaatgtccatcgacttagctggagccttgctaacgatcttgcttttaagctcatccctgatgctaatattctgtggattgtggccggacaatcaaacttgtaatgactaaggtcttgtttgaaatcaatctagttttgaaaaaaccagtttttatc

SEQ ID NO: 50757 - DNA, 782 bp, Zea Mays
gtccaatctcaggcgttcttaaggggaaattgacaaagatgagtttaggaaggtgatgacactgatgcgatcctataatagacaaggagctgcccacagggatggtttacgctttgggcgtaaggttggtcagccagtggaaaatggtggactcgtcgagtacttctttggcaaggatgggaatgaacatctacactatgataagttctctagttttttgaaacaattgcatgatgagattgtccgcttggagttcagtcactacgatttgaaatcatcgaacacaatatctgcaaaggactttgcgttatctatggttgcttctgctgatatgaatcacatagacaagttattggatagagttgatgatttggatgacaatcttgacctcaaggatctgcgcattacctttgaggagttcaaggcatttgctgatcttcgaagaaggttggaaccatttgcaatggctatcttcagctatggcaaagtaaatggtttgttgacgaagcaggatctaaaacgtgctgcatcacatgtttgtggagtggacttgactgacaaagtagtggacataattttccatgtatttgatgctaactgcgatggtaacctgagctcagaggagttcttgaggtcattacaaagaagagaaaatgacattcgccagccagcaacttctggttttctaggggtgatcgcctgctggctgaactgtacaaagtgttctcttcaacaaatgctgccccagtagattcttttgacagtcgtgacactgttccatt

SEQ ID NO: 50758 - DNA, 1507 bp, Zea Mays
ccaacccaacccacccggccagccccccgttacttcgtcccaggttttcggcatgaccgtgccgccgtactgcttgatcgccgtgtccgcagcccgttggccgcgtggacggtaacgtctgccccggtttaatttctcccgtcccgatccggcaacccgaggcccgggctggtgcttctcactagtcagtactcagtagtagtagtagtcactccattccccccacccggctagtagccctgctctgctctctgcctcggctatatatatacgccgcgggcgcaccggtccagcaagcaacaataaagggcggtgtcgaagaggagcttggagcttggaccgacccgagccccatcgagcgagagaggaaataatgggtgaagaggccagctgcaacgctgccagcgcgatggaggccgccaccaacgccaggccggccaaggagaacggacgcgcgccggctgtggcggaggtagtggcccaggaggcggccgctgacccccggctgcagggcatctccgacgccatccgcgtcgtgccgcacttccccaagcacggcatcatgttcaacgacatcaccacgctgctgctgcgccccagggtgttcaaggacgccgtcgacctgttcgtcgagcgctaccgcgggatgcgcatcgacgccgtcgccgggattgaggccaggggcttcatatttggcccggcagtcgcattggctattggcgccaagttcatacctttgcgcaagcctaggaagctccccggcgaggtgatctccgagaaatacgttctcgagtacgggaccgattgcttagagatgcatgtcggagccatcgaacgacctggtgagcgcgtgctgatcaccgacgacttggtcgcgacgggagggacgctctgtgctgcaatcaggcttcttgaacgtgctgaagctgatgtggtcgagtgcgcatgcctcattggcctcccaaaattcaaggatttctacaagttgaatggaaagcccgtctacgtgctggttgagtcccgggaatcagataaataagaacttatgggtcagaggaaagctggcggttcattccttgctgttgtgattgagcagtggagggacatcgacaagccaaccatgggggtgctttagcgttactaaggctgagtagattttcagagtactgaagagcttgtagttctgccaggaacatgcttattagttgaagcaagtgtgttgatggtccattgcttgttggattttgtggttttgatttgaagggcgcaaaaacatggctggatcagcttgacggaagaacttggacatcaatacgcttagcatcaagtactagcgaagtaggaacttgctacttgtagcgtgttattcctatctttgaactcgttagcttattagtgacaaaattcacaaaaaattggcacgcgaaacggacacaagtcgtagcagaaaaaaacgtgaatatactatctaaaaataaaaataaaaaccaggcgcatgggatttaac

SEQ ID NO: 50759 - DNA, 859 bp, Zea Mays
tcgccgtgtccgcagcccgttggccgcgtggacggtaacgtctgccccggtttaatttctcccgtcccgatccggcaacccgaggcccgggctggtgcttctcactagtcagtactcagtagtagtagtagtcactccattccccccacccggctagtagccctgctctgctctctgcctcggctatatatatacgccgcgggcgcaccggtccagcaagcaacaataaagggcggtgtcgaagaggagcttggagcttggaccgacccgagccccatcgagcgagagaggaaataatgggtgaagaggccagctgcaacgctgccagcgcgatggaggccgccaccaacgccaggccggccaaggagaacggacgcgcgccggctgtggcggaggtagtggcccaggaggcggccgctgacccccggctgcagggcatctccgacgccatccgcgtcgtgccgcacttccccaagcacggcatcatgttcaacgacatcaccacgctgctgctgcgccccagggtgttcaaggacgccgtcgacctgttcgtcgagcgctaccgcgggatgcgcatcgacgccgtcgccgggattgaggccaggggcttcatatttggcccggcagtcgcattggctattggcgccaagttcatacctttgcgcaagcctaggaagctccccggcgaggtgatctccgagaaatacgttctcgagtacgggaccgattgcttagagatgcatgtcggagccatcgaacgacctggtgagcgcgtgctgatcaccgacgacttggtcgcgacgggagggacgctctgtgctgcaatcaggcttcttgcaaagggtatcttgcgattgtt

SEQ ID NO: 50760 - DNA, 947 bp, Zea Mays
tcgccgtgtccgcagcccgttggccgcgtggacggtaacgtctgccccggtttaatttctcccgtcccgatccggcaacccgaggcccgggctggtgcttctcactagtcagtactcagtagtagtagtagtcactccattccccccacccggctagtagccctgctctgctctctgcctcggctatatatatacgccgcgggcgcaccggtccagcaagcaacaataaagggcggtgtcgaagaggagcttggagcttggaccgacccgagccccatcgagcgagagaggaaataatgggtgaagaggccagctgcaacgctgccagcgcgatggaggccgccaccaacgccaggccggccaaggagaacggacgcgcgccggctgtggcggaggtagtggcccaggaggcggccgctgacccccggctgcagggcatctccgacgccatccgcgtcgtgccgcacttccccaagcacggcatcatgttcaacgacatcaccacgctgctgctgcgccccagggtgttcaaggacgccgtcgacctgttcgtcgagcgctaccgcgggatgcgcatcgacgccgtcgccgggattgaggccaggggcttcatatttggcccggcagtcgcattggctattggcgccaagttcatacctttgcgcaagcctaggaagctccccggcgaggtgatctccgagaaatacgttctcgagtacgggaccgattgcttagagatgcatgtcggagccatcgaacgacctggtgagcgcgtgctgatcaccgacgacttggtcgcgacgggagggacgctctgtgctgcaatcaggcttcttgaacgtgctgaagctgatgtggtcgagtgcgcatgcctcattggcctcccaaaattcaaggtgccatataatatatcagctgttcattatgtgtactaaaacacaacaaat

SEQ ID NO: 50761 - DNA, 622 bp, Zea Mays
agtcactccattccccccacccggctagtagccctgctctgctctctgcctcggctatatatatacgccgcgggcgcaccggtccagcaagcaacaataaagggcggtgtcgaagaggagcttggagcttggaccgacccgagccccatcgagcgagagaggaaataatgggtgaagaggccagctgcaacgctgccagcgcgatggaggccgccaccaacgccaggccggccaaggagaacggacgcgcgccggctgtggcggaggtagtggcccaggaggcggccgctgacccccggctgcagggcatctccgacgccatccgcgtcgtgccgcacttccccaagcacggcatcatgttcaacgacatcaccacgctgctgctgcgccccagggtgttcaaggacgccgtcgacctgttcgtcgagcgctaccgcgggatgcgcatcgacgccgtcgccgggattgaggccaggggcttcatatttggcccggcagtcgcattggctattggcgccaagttcatacctttgcgcaagcctaggaagctccccgcccacgacgggaaattaagaaatgcatggatcagactgttacgcgagatcattgtgcactcttgtcc

SEQ ID NO: 50762 - DNA, 374 bp, Zea Mays
ccctgctctgctctctgcctcggctatatatatacgccgcgggcgcaccggtccagcaagcaacaataaagggcggtgtcgaagaggagcttggagcttggaccgacccgagccccatcgagcgagagaggaaataatgggtgaagaggccagctgcaacgctgccagcgcgatggaggccgccaccaacgccaggccggccaaggagaacggacgcgcgccggctgtggcggaggtagtggcccaggaggcggccgctgacccccggctgcagggcatctccgacgccatccgcgtcgtgccgcacttccccaagcacgtaacgccttccttgctctgcatgcgccgtcgttgggggccacgggacgctgcag

SEQ ID NO: 50763 - DNA, 1382 bp, Zea Mays
tgcctcggctatatatatacgccgcgggcgcaccggtccagcaagcaacaataaagggcggtgtcgaagaggagcttggagcttggaccgacccgagccccatcgagcgagagaggaaataatgggtgaagaggccagctgcaacgctgccagcgcgatggaggccgccaccaacgccaggccggccaaggagaacggacgcgcgccggctgtggcggaggtagtggcccaggaggcggccgctgacccccggctgcagggcatctccgacgccatccgcgtcgtgccgcacttccccaagcacggcatcatgttcaacgacatcaccacgctgctgctgcgccccagggtgttcaaggacgccgtcgacctgttcgtcgagcgctaccgcgggatgcgcatcgacgccgtcgccgggattgaggccaggggcttcatatttggcccggcagtcgcattggctattggcgccaagttcatacctttgcgcaagcctaggaagctccccggcgaggtgatctccgagaaatacgttctcgagtacgggaccgattgcttagagatgcatgtcggagccatcgaacgacctggtgagcgcgtgctgatcaccgacgacttggtcgcgacgggagggacgctctgtgctgcaatcaggcttcttggatttctacaagttgaatggaaagcccgtctacgtgctggttgagtcccgggaatcagataaataagaacttatgggtcaggtgagggatattgatcgcattcatttctttatgaagtgatgttgagaccagcatgtgtacgttgtttacttgctcgttttatcttctgcttgtttttgcagaggaaagctggcggttcattccttgctgttgtgattgagcagtggagggacatcgacaagccaaccatgggggtgctttagcgttactaaggctagctactaagatcgacttggtgagaggagaggttagaagtgctgggggggggggggggggggtgggggcgttagtcttgtaggctgagtagattttcagagtactgaagagcttgtagttctgccaggaacatgcttattagttgaagcaagtgtgttgatggtccattgcttgttggattttgtggttttgatttgaagggcgcaaaaacatggctggatcagcttgacggaagaacttggacatcaatacgcttagcatcaagtactagcgaagtaggaacttgctacttgtagcgtgttattcctatctttgaactcgttagcttattagtgacaaaattcacaaaaaattggcacgcgaaacggacacaagtcgtagcagaaaaaaacgtgaatatactatctaaaaataaaaataaaaaccaggcgcatgggatttaac

SEQ ID NO: 50764 - DNA, 1978 bp, Zea Mays
gccaaagcgcacccgcccgtctgcctccaataaaaggcggccgcctgcggcctgcctcgctgtcgctggccaagcctggcaggcgcaggcgtgaccgggcagaagcttccgcatccgcagtcctagtcccgcacccggggtcgctgaccggcgacctcatcgccgaggcgaggacgagacagacgacaccgcacccgttaccagcgcggcgcacgaaccggccagttttattcggctgccgtcgcgtgctgcggaatcaggccagggaagtgtgtggggaccggggacagaaatatcctcctgctgctcttcgtcctcgccctcggcgtgctcgcgggcgggcggagcgaggaggcggatcggggagcagagatcccggccggagggatggcgaagggtggcggggagaggggcacgctgctgccggtctcggcggacgacgggaagggcaacgacggagggggaggcggcgacgacgccgtgctgttcaaggggtccgccatgacccgccgaggcggcgccgcggcgctctcctacatggcatgctccgtgctgctagtgatgtttaacaaagcagctctttcttcatacaaattcccttgcgcaaatgtcatcacgctccttcaggttattgttgcgcaccacacctctttccttggcttatttactctacatgctagcttcgatggaatcggtccgtggagttaacgttcctatgtatacaactctacgacgcacaacagtcgtgtttacaatgacaatggagtatttcctggcaaagcagaagcacaccccacctataataggcagtgtggctttgattgtattcggagcatttgttgctggagctcgagacttgtcatttgatgctcgtgggtatgctattgtctttgtggccaacattacaacagctgtttatcttgctaccataaaccgtataggaaaatctagtggccttaatagctttggcctgatgtggtgcaatggtcttgtctgtggaccttcagtactgttcttgacttacattcagggtgacctaaagaggaccatggaatttccataccttcattctcttgggtttcaggttgtgcttctattttcatgcatcttagcatttctactgaactacaccatcttctggaacacaatcctgaattctgcactcacacaatctatgtgtggcaacttgaaggatttcttcaccgttggaattggttgggtgctatttggtggtcttccttttgatcttcttaatgttatcggacagggactaggctttctgggatctggattgtatgcctactgcaagatcagagggaagtagacggaaactccattcaggggccagtgtgcttaacaaagtagcgttgtttatgctatttgctccttggagagaaattttgtaggtgtcctatatgtattgaacttcagccctcatgaacactacaaaactgacaaggaaatagagtataccgaaattttgctgttgctttatgatcgtttctcttttaaactcgtttctcttttaaactcgaatagacgtttacaatgaataacgtatgtataaggcgagagacttgcagaatacaatgaacttatgtaaaaggcacgtgatgcaaaacgatctgactgaaatccgattactctacatccagtcttcaggctcaaatgtgaaactccttggaagatgatctggcggcccctaaatacaagtttttcatttggctagttattaataacaagtgctggactgcagagggcttgactctcggagtgttgcgtgctttgtgagcaagaagaggaaacgtgtgacatatcatctccagctatgtgtttgcaaggaaattttggcactctattctctccccattggtttttgggctgtagtccctaagagaagtgatatttgttttgttgaccggtggagggaagccctgtcctaaattcctaaaggcaataaaaatggattcaacagcgt

SEQ ID NO: 50765 - DNA, 2002 bp, Zea Mays
cgctggccaagcctggcaggcgcaggcgtgaccgggcagaagcttccgcatccgcagtcctagtcccgcacccggggtcgctgaccggcgacctcatcgccgaggcgaggacgagacagacgacaccgcacccgttaccagcgcggcgcacgaaccggccagttttattcggctgccgtcgcgtgctgcggaatcaggccagggaagtgtgtggggaccggggacagaaatatcctcctgctgctcttcgtcctcgccctcggcgtgctcgcgggcgggcggagcgaggaggcggatcggggagcagagatcccggccggagggatggcgaagggtggcggggagaggggcacgctgctgccggtctcggcggacgacgggaagggcaacgacggagggggaggcggcgacgacgccgtgctgttcaaggggtccgccatgacccgccgaggcggcgccgcggcgctctcctacatggcatgctccgtgctgctagtgatgtttaacaaagcagctctttcttcatacaaattcccttgcgcaaatgtcatcacgctccttcagatggtgtgctccacgtgccttctttatgttctgagacggttaaagatcatctccttcacaaatagtgatccatcagtgccttctgattcactattctttgtgccgtttaggttattgttgcgcaccacacctctttccttggcttatttactctacatgctagcttcgatggaatcggtccgtggagttaacgttcctatgtatacaactctacgacgcacaacagtcgtgtttacaatgacaatggagtatttcctggcaaagcagaagcacaccccacctataataggcagcatttgttgctggagctcgagacttgtcatttgatgctcgtgggtatgctattgtctttgtggccaacattacaacagctgtttatcttgctaccataaaccgtataggaaaatctagtggccttaatagctttggcctgatgtggtgcaatggtcttgtctgtggaccttcagtactgttcttgacttacattcagggtgacctaaagaggaccatggaatttccataccttcattctcttgggtttcaggttgtgcttctattttcatgcatcttagcatttctactgaactacaccatcttctggaacacaatcctgaattctgcactcacacaatctatgtgtggcaacttgaaggatttcttcaccgttggaattggttgggtgctatttggtggtcttccttttgatcttcttaatgttatcggacagggactaggctttctgggatctggattgtatgcctactgcaagatcagagggaagtagacggaaactccattcaggggccagtgtgcttaacaaagtagcgttgtttatgctatttgctccttggagagaaattttgtaggtgtcctatatgtattgaacttcagccctcatgaacactacaaaactgacaaggaaatagagtataccgaaattttgctgttgctttatgatcgtttctcttttaaactcgtttctcttttaaactcgaatagacgtttacaatgaataacgtatgtataaggcgagagacttgcagaatacaatgaacttatgtaaaaggcacgtgatgcaaaacgatctgactgaaatccgattactctacatccagtcttcaggctcaaatgtgaaactccttggaagatgatctggcggcccctaaatacaagtttttcatttggctagttattaataacaagtgctggactgcagagggcttgactctcggagtgttgcgtgctttgtgagcaagaagaggaaacgtgtgacatatcatctccagctatgtgtttgcaaggaaattttggcactctattctctccccattggtttttgggctgtagtccctaagagaagtgatatttgttttgttgaccggtggagggaagccctgtcctaaattcctaaaggcaataaaaatggattcaacagcgt

SEQ ID NO: 50766 - DNA, 1960 bp, Zea Mays
cgctggccaagcctggcaggcgcaggcgtgaccgggcagaagcttccgcatccgcagtcctagtcccgcacccggggtcgctgaccggcgacctcatcgccgaggcgaggacgagacagacgacaccgcacccgttaccagcgcggcgcacgaaccggccagttttattcggctgccgtcgcgtgctgcggaatcaggccagggaagtgtgtggggaccggggacagaaatatcctcctgctgctcttcgtcctcgccctcggcgtgctcgcgggcgggcggagcgaggaggcggatcggggagcagagatcccggccggagggatggcgaagggtggcggggagaggggcacgctgctgccggtctcggcggacgacgggaagggcaacgacggagggggaggcggcgacgacgccgtgctgttcaaggggtccgccatgacccgccgaggcggcgccgcggcgctctcctacatggcatgctccgtgctgctagtgatgtttaacaaagcagctctttcttcatacaaattcccttgcgcaaatgtcatcacgctccttcagatggtgtgctccacgtgccttctttatgttctgagacggttaaagatcatctccttcacaaatagtgatccatcagtgccttctgattcactattctttgtgccgtttaggttattgttgcgcaccacacctctttccttggcttatttactctacatgctagcttcgatggaatcggtccgtggagttaacgttcctatgtatacaactctacgacgcacaacagtcgtgtttacaatgacaatggagtatttcctggcaaagcagaagcacaccccacctataataggcagtgtggctttgattgtattcggagcatttgttgctggagctcgagacttgtcatttgatgctcgtgggaaaatctagtggccttaatagctttggcctgatgtggtgcaatggtcttgtctgtggaccttcagtactgttcttgacttacattcagggtgacctaaagaggaccatggaatttccataccttcattctcttgggtttcaggttgtgcttctattttcatgcatcttagcatttctactgaactacaccatcttctggaacacaatcctgaattctgcactcacacaatctatgtgtggcaacttgaaggatttcttcaccgttggaattggttgggtgctatttggtggtcttccttttgatcttcttaatgttatcggacagggactaggctttctgggatctggattgtatgcctactgcaagatcagagggaagtagacggaaactccattcaggggccagtgtgcttaacaaagtagcgttgtttatgctatttgctccttggagagaaattttgtaggtgtcctatatgtattgaacttcagccctcatgaacactacaaaactgacaaggaaatagagtataccgaaattttgctgttgctttatgatcgtttctcttttaaactcgtttctcttttaaactcgaatagacgtttacaatgaataacgtatgtataaggcgagagacttgcagaatacaatgaacttatgtaaaaggcacgtgatgcaaaacgatctgactgaaatccgattactctacatccagtcttcaggctcaaatgtgaaactccttggaagatgatctggcggcccctaaatacaagtttttcatttggctagttattaataacaagtgctggactgcagagggcttgactctcggagtgttgcgtgctttgtgagcaagaagaggaaacgtgtgacatatcatctccagctatgtgtttgcaaggaaattttggcactctattctctccccattggtttttgggctgtagtccctaagagaagtgatatttgttttgttgaccggtggagggaagccctgtcctaaattcctaaaggcaataaaaatggattcaacagcgt

SEQ ID NO: 50767 - DNA, 2683 bp, Zea Mays
tctcaggtggccaggatattttttctggccccttcctgccctcttcacactgacccatgtgttgttctatccctggaaagctatacctccttacccctatcagcttctcctcacatctcctctcgtcgccacccatgctatcaccgctctgatcacaagcaaggcaaaccctcactgttctatcaacgcccctcccttagctagatggcttcagcgaacaactggctgggcttctcgctctcgggccaggataacccgcagcctaaccaggacagctcgcctgccgccggtatcgacatctccggcgccagcgacttctatggcctgcccacgcagcagggctccgacgggcatctcggcgtgccgggcctgcgggacgatcacgcttcttatggtatcatggaggcctacaacagggttcctcaagaaacccaagattggaacatgaggggcttggactacaacggcggtggctcggagctctcgatgcttgtggggtccagcggcggcggcgggggcaacggcaagagggccgtggaagacagcgagcccaagctcgaagatttcctcggcggcaactcgttcgtctccgatcaagatcagtccggcggttacctgttctctggagtcccgatagccagcagcgccaatagcaacagcgggagcaacaccatggagctctccatgatcaagacctggctacggaacaaccaggtggcccagccccagccgccagctccacatcagccgcagcctgaggaaatgagcaccgacgccagcggcagcagctttggatgctcggattcgatgggaaggaacagcatggtggcggctggtgggagctcgcagagcctggcgctctcgatgagcacgggctcgcacctgcccatggttgtgcccagcggcgccgccagcggagcggcctcggagagcacatcgtcggagaacaagcgagcgagcggtgccatggattcgcccggcagcgcggtagaagccgtaccgaggaagtccatcgacacgttcgggcaaaggacctctatatatcgaggtgtaacaaggcatagatggacagggcggtatgaggctcatctatgggataatagttgtagaagggaagggcagagtcgcaagggtaggcaagtattgtgtcttttggttccattgcacacaccctggcttcaaacattgcctaccggaatgacaccaacaatatgcagtttaccttggtggctatgacaaggaggacaaggcagcaagggcttacgatttggcagctctcaagtattggggcactacgacaacaacaaatttccctataagcaactacgaaaaagagctagaagaaatgaaacatatgactagacaggagtacattgcatacctaagaagaaatagcagtggattttctcgtggggcatcaaagtatcgtggagtaactagacatcatcagcatgggagatggcaagcaaggatagggagagttgcaggaaacaaggatctttacttgggcacattcagcaccgaggaggaggcggcggaggcctacgacatcgccgcgatcaagttccgcggtctcaacgccgtcaccaacttcgacatgagccgctacgacgtgaagagcatcctcgagagcagcacactgcctgtcggcggtgcggccaggcgcctcaaggacgccgtggaccacgtggaggccggcgccaccatctggcgcgccgacatggacggcgccgtgatctcccagctggccgaagccgggatgggcggctacgcctcgtacggccaccacggctggccgaccatcgcgttccagcagccgtcgccgctctccgtccactacccgtacggccagccgtcccgcgggtggtgcaaacccgagcaggacgcggccgccgccgcggcgcacagcctgcaggacctccagcagctgcacctcggcagcgcggcccacaacttcttccaggcgtcgtcgagctccacagtctacaacggcggcgccggcgccagtggtgggtaccagggcctcggtggtggcagctctttcctcatgccgtcgagcactgtcgtggcggcggccgaccaggggcacagcagcacggccaaccaggggagcacgtgcagctacggggacgaccaccaggaggggaagctcatcggttacgacgccgccatggtggcgaccgcagctggtggagacccgtacgctgcggcgaggaacgggtaccagttctcgcagggctcgggatccacggtgagcatcgcgagggcgaacgggtacgctaacaactggagctctcctttcaacaacggcatggggtgacgacgacggtacggtccaacgaacggagagggcagaagctagtggctagtgatagggggttagctagctagaagatcccaagtctaggttagagttatttggtcatcgttgtcgtgtttcgacgtgctcaggttctggttcgattctgcacaattaacccgtgcatgcacgcgtgtgcctttctggaagctggtaatggcaggtcagggtaagtaaagttagtgttgtaagttatcctgatgtgctgttaattttgggtagtttcagaaggtctagccaatctcttcggaggactcaattgtcatcttgcttgcactcgtgcttatgagaataactttatcatatttcatttttctgatcacg

SEQ ID NO: 50768 - DNA, 1829 bp, Zea Mays
caggccgcggcgagcacagtcagcaagtcggcccaagcggctgcacatcgacgtgccgacgtctcgtgcctgtgtcatctcttgactcttgtccgtcctagcttctccaactccaaaggacgcaaaccaaaacgcacaggttgcctaatccaaaccggccgtcgctcgacgctcgtcccgcttcctgatcctcacccctgcctgcgcggctcggctcctcggctttccgcgttcgctacggtcggtttgtgccagcagccgtgccggatcgttggccttgcgcggttacaccgtgctccaggcaatggcgagccaacagcaagcaaaaggcacaatcctgtgggccaatcaacactcactaggactctagaagccagggcattgattcagagaactctgagaccatttttgttgcatctttgacaggattacatgatgagtgctcttgtttttcctctggttgtatatgttatccagtgaacacatgtttaattttataatcatttcagtttttatcatgtttaaatctattattttctagctttcgcagtttctaaaaagtgtggtccagtgtctgtacttttatgctgtttaggttttcgcggccactgcctcctcccatcgtggtactcattccttccggactgtcagagagcggggatctatctacgctagtattcagttcttccattactggtctaccacacgatggttccctgtcatggagcggctactgcgaatcctcagcagtttggtgttattgccgcaaaccgctatggttctcctgtgaagccatctttatgccctagtgttgcgtttctgagactgcagggttccgcatttcttcttgggaataaatccttggctttgagagctggtgtggattctcaccgttatgctacatcttcagcatttgcaaagtataatcctgtcaagaacatcaagccactactgtcatccccaaagttgaaaccaagaactaaagttggttgccaagcatccttgtcgtcattcagctaccctgagttatctttcaaaccgaaatggtggtggaggaccctagcatgtgtaccttatcttctgccactgcacaacatgtgggggcatgcagatgctatctatcagcttcatccatacttgcaaagatttagcctgccttacgctttcatcgatacaatggctctgctccctgggtggcttttcctggcgatcttcatgactatatacttctttgttgtgaggcggaagtggtcgccacacttcttgcgcttccacatcatattggctatcctgcttgacacgggctcacaagctctggccactgcctgcaactggaacccaagcattgcttttcagggcaaacaaatggcacatttctggatggcaatggccttcattcaaatcttcacggttgccgagtgtgtaaggtagttgatcattgcaaagtgcatttttggaattaagaggtactgaattggttaaactgtcgagtagaggactaatcagactatcagagaggaaattaatgtaaccattgctcttcactgcattgttgccagtactgttgatttcatgtctctgaatttaagcttgagtggcaccaggctttgtgctttcttctttccccaccctctttagcggcacaaacgttgagaacttatttatatggataaatatttatcgatttaatagtgtggtggtacttctgtgcattttagctgccttgtgataaatcaccaggccccgatttggtttcacaggtcgcttttgttgtcaacgtgttcaatgccttgtttgaaataggtgcaaaggagccttcacttggttaa

SEQ ID NO: 50769 - DNA, 1774 bp, Zea Mays
gcctaatccaaaccggccgtcgctcgacgctcgtcccgcttcctgatcctcacccctgcctgcgcggctcggctcctcggctttccgcgttcgctacggtcggtttgtgccagcagccgtgccggatcgttggccttgcgcggttacaccgtgctccaggcaatggcgagccaacagcaagcaaaaggcacaatcctgtggggtattttgatttccgaatcggagcaggtgtcctttaaacaaggagttacttgtttgctatttttctaaatttgcagccaatcaacactcactaggactctagaagccagggcattgattcagagaactctgagaccatttttgttgcatctttgacaggattacatgatgagtgctcttgtttttcctctggttgtatatgttatccagtgaacacatgtttaattttataatcatttcagtttttatcatgtttaaatctattattttctagctttcgcagtttctaaaaagtgtggtccagtgtctgtacttttatgctgtttaggttttcgcggccactgcctcctcccatcgtggtactcattccttccggactgtcagagagcggggatctatctacgctagtattcagttcttccattactgcatttcgtcaggtctaccacacgatggttccctgtcatggagcggctactgcgaatcctcagcagtttggtgttattgccgcaaaccgctatggttctcctgtgaagccatctttatgccctagtgttgcgtttctgagactgcagggttccgcatttcttcttgggaataaatccttggctttgagagctggtgtggattctcaccgttatgctacatcttcagcatttgcaaagtataatcctgtcaagaacatcaagccactactgtcatccccaaagttgaaaccaagaactaaagttggttgccaagcatccttgtcgtcattcagctaccctgagttatctttcaaaccgaaatggtggtggaggaccctagcatgtgtaccttatcttctgccactgcacaacatgtgggggcatgcagatgctatctatcagcttcatccatacttgcaaagatttagcctgccttacgctttcatcgatacaatggctctgctccctgggtggcttttcctggcgatcttcatgactatatacttctttgttgtgaggcggaagtggtcgccacacttcttgcgcttccacatcatattggctatcctgcttgacacgggctcacaagctctggccactgcctgcaactggaacccaagcattgcttttcagggcaaacaaatggcacatttctggatggcaatggccttcattcaaatcttcacggttgccgagtgtgtaaggtagttgatcattgcaaagtgcatttttggaattaagaggtactgaattggttaaactgtcgagtagaggactaatcagactatcagagaggaaattaatgtaaccattgctcttcactgcattgttgccagtactgttgatttcatgtctctgaatttaagcttgagtggcaccaggctttgtgctttcttctttccccaccctctttagcggcacaaacgttgagaacttatttatatggataaatatttatcgatttaatagtgtggtggtacttctgtgcattttagctgccttgtgataaatcaccaggccccgatttggtttcacaggtcgcttttgttgtcaacgtgttcaatgccttgtttgaaataggtgcaaaggagccttcacttggttaa

SEQ ID NO: 50770 - DNA, 2991 bp, Zea Mays
cttcctccgatcctcaacaggatacacccctcgcaacagaaaccccctccgccgaggcccgccgaccaaacttctgccagtaccgcttgcaccttacctgccaagctgcgtactgacggaacgccttgagcgagagcgaggttgcgctccactccactccactcgccagttcagttcttgcttcctgctcctgtcgtggtgccctgagtccctgactgcgaggagctagctatgcatccccgcggtggccgacgaactgcgtagcctgatcaaacagctgaataatctggggaagcaagcgtcaaggtaacaatgactgaaatgggagaagctctgagaacctgcatggagcggctggtggttgccagagaagagcgggagcagatcatcgtcgaggcggccaacgagatatcctccaagaagaagaaagtgcgcgagctccagctgaagctggaggacgcgaacaagaagatcgcgaagctcgccgccgagaacagcaacctctgcaaggccgctgacgtcaaggacgcgctgatcggggagctgagggagtccgcagcggccactggggacaagctcgccgacgcgacggcgaggctagagtcggcgcagaaacaagccgggtcgttggagtacgaggtgcgcatgctccagaaggagctggaggtccggggccaggagcgggagtacgacctcaagtccgtcgacgccgcgcgccggcagcaggcggagcaccagaagcggatcgcgcagctggaggctgagtgccagcggctgcgcgccatggtccgcaagaggcttcccgggccggcagcgatcgccaagatgagggacgaggtcgatcagcagcaggcccagacccccacagccagcccgaggcgaccccgtcccgcgacgccctcctcgccgcggtcggccgtcgcgccgttctcgccgcggaccccgtcgccgcggcgatccgtctcgggcggcgccgacggctacgcgttcaggctccgcgccgtggaggacgagaacacggcgctgaagcaggcgctggccaagagggagagcgagctgcagttcatgcagatgaagtacgccgacgaggcctgcaagctgacggcggctcagatgcaggtcaaggagctgacggaggagaacaggcagctgagtgacgccaacactcagtctgaatcctgggcttctgctctggtttctgaactggacaagttcaggtcaggcaacgagaacggtggtgcctgtgcgtccatcatggcatcatctgagatgaacctgctccatgatttctctgaggttgagaagctggagacggcgtcaggtgatcaaaagcgcaacgtgcagcgtgcatctccgcacaaggcggatacaggactggcaacggaagaacagaatggtaatgctcctgtcctggatggtagcgtctccaacggccatcctgagaaggttaggcatatctgggaattagttgtgcagaagcatgaagcgagcggggaaagctttgaagctattattgaacagataagccaggcattggagcagacagctactcgtgccaagagagatggttcggacgtgccaagtgaccagtctgaaatagagaaggcggtgagagatatggttgagcagaccacttccatgatccaggcggcatatgcagaagaagacgacgtcgcaagatcaagagcgctgtcgcaccacaagtctgagatgtttcgccgcttcaagcgcctggttcaggtccgtcatgagctactggaagggaaatgcgaccttggaaagtttgtagacgaggtctgcctcatcctaaagtacgtagtgagccaatgcttctcggatcaagatcagatcgacactgtgagccgtgatacagaggattttgatggagctaagccatcaggtgcggttacagcagacggtacgcatgacactgaaagcgctaaaccaacagcgacttcagcttttcggacagaagcagatggagaaccagttcagtcagttgaaagccagactacggcggccaatcgtctgcagaaacctgatatagaactcatacatgccctacaacacgaggatggtagtagtatcctttcagagagaaaatcggcggcataccgtgagatgcaaagccctgcttctgaggcaagtgtggaacgtcgggcagtgcaagaggaaaatcatttagcaacaaactcagagattctcgcagcggctgataagctcgccgagtgccaggagacgatcacgatgctgagcaagcagctgcaggctctaaagacgccggcaactccaggtcctctagacgcctcctccgcctgcatccccaggacgagctcggcgaagtccgactacaagccgcagtcgctcgcgagcatcctcgccgaggcctccacgtctcccagtcccactcccaccacgcccacgccacaggtgctgtccaaggaagacgaaggcgaggttcgtgctactgctacgccgacgacgaggagcgcagcacggcaggaggagaacgacgccggcggcaataattcgatgcagattgtcgtcgtccatgccgagccgcggccggacgacggtggttccgctgacccgacgaagaggaggaagaagcgcggcacgagcctgctgggcaggatcgtgttcaggaagagagccgaaggcggctcctagaccgactgcggtgacctgcatcgatgcggtggatgcgttctgctgcctacaggtttggcatggatccggccaagtgtgctgtcacgttgtgaccagtggtttttttccccttcttcagcgtgttctgtttatgctgctcccagtgagcgagcgatctttttgggcgacatatgttccggtcttgcagagccttgtggctgatggcgacgggttctgtcgcatggtgtgagctacgtgtcttcttttgtttatggacagacttttctctgtgtatttatgaacatcttggctgtgcaaaaatgtttatttattggaagggga

SEQ ID NO: 50771 - DNA, 361 bp, Zea Mays
tgtcagcacaaggaatagctgcagaattgatgtttggtgagacaagaatggcatggacagtgatttccagacatcgccacgcgctccatacagtaacctttctctgtttttttctttctttctgtcattaaagcgcaccaccggcagcgtctttaaaatgccaccgtgcaagttgttcttggctctcacaagagcctttcgctgcatcaacacctgccgactgctgcaggcaagtaaaggtggatttgatggaacagcttgcaaggcatttcataaggccccttactaaggatcaaatggaggcaattatggagttggcaattcagggaaaggagaaggaagggaccaagaagaagggcag

SEQ ID NO: 50772 - DNA, 1100 bp, Zea Mays
cccaagtggcccaactagcccacgtatatcctccaaacctaaccctagcaacacatttcgctccccacagcggcggcggccacagccacacgttctcgcgcgggatctaattccaaacagcactgcccttgcttctaccgttccccaagtgcgctccctctctcgccatccatctcgtgcacgactgggcaaccgttgccgctgtcgaggtgcccaggtcttcatcggtccctcgtcagttcttctccggcccttcgccgccgacaagctcccccagctactaaagagacaggagcaaagagttaacaggagatgaatgcccctgaccgttatgagcgtttcgtcgtgccagagggcaccaagaaagtgtcctatgagagggatacaaagattgtgaatgctgcatcattcactgtcgaacgcgaggatcacactgtaggcaatatcctccgcatgcagttgcacagagacccaaatgttctctttgccgggtataagctccctcacccactccagtacaagatcattgttaggatccacacaacgagccagtcctccccgacgcaggcctacacccaggctatcaatgatctagacaaagagcttgagtaccttaagcaagcttttgagacaccaacagaccatcattgaaccttttctactttatgatacaaagatgtgaactatggactacttgatgaactactagatgttcaacacaggaatgcctttggcaaaatttgcatattcactctcccgtcaaactgatacccttaagttcatttgaatctctttttatttcctagaagtatctcgctactttagtcctactaggaaaagttctttgggatctctctttgtaaatgttagtttcgactcttgtttttttccaggttgcatggcatttctttgtgcaattttgtatcgctaaacaacgaaaagttttagttagcattaaccagtggtacatagcaaggcagactgtgtggttctatgggtgtaatgtatttaagaatgttttgtataaagtattgtttctgtaggaaaaagtgcttgatttgacatgaatgtggcagtaattttgatagatttgttgggag

SEQ ID NO: 50773 - DNA, 626 bp, Zea Mays
gtatatcctccaaacctaaccctagcaacacatttcgctccccacagcggcggcggccacagccacacgttctcgcgcgggatctaattccaaacagcactgcccttgcttctaccgttccccaagtgcgctccctctctcgccatccatctcgtgcacgactgggcaaccgttgccgctgtcgaggtgcccaggtcttcatcggtccctcgtcagttcttctccggcccttcgccgccgacaagctcccccagctactaaagagacaggagcaaagagttaacaggagatgaatgcccctgaccgttatgagcgtttcgtcgtgccagagggcaccaagaaagtgtcctatgagagggatacaaagattgtgaatgctgcatcattcactgtcgaacgcgaggatcacactgtaggcaatatcctccgcatgcagttgcacagagacccaaatgttctctttgccgggtataagctccctcacccactccagtacaagatcattgttaggatccacacaacgagccagtcctccccgacgcaggcctacacccaggctatcaatgatctagacaaagagcttgagtaccttaagcaagcttttgaggttgcatggcatttctttg

SEQ ID NO: 50774 - DNA, 986 bp, Zea Mays
tatcctccaaacctaaccctagcaacacatttcgctccccacagcggcggcggccacagccacacgttctcgcgcgggatctaattccaaacagcactgcccttgcttctaccgttccccaagtgcgctccctctctcgccatccatctcgtgcacgactgggcaaccgttgccgctgtcgaggtgcccaggtcttcatcggtccctcgtcagttcttctccggcccttcgccgccgacaagctcccccagagtgtcctatgagagggatacaaagattgtgaatgctgcatcattcactgtcgaacgcgaggatcacactgtaggcaatatcctccgcatgcagttgcacagagacccaaatgttctctttgccgggtataagctccctcacccactccagtacaagatcattgttaggatccacacaacgagccagtcctccccgacgcaggcctacacccaggctatcaatgatctagacaaagagcttgagtaccttaagcaagcttttgagacaccaacagaccatcattgaaccttttctactttatgatacaaagatgtgaactatggactacttgatgaactactagatgttcaacacaggaatgcctttggcaaaatttgcatattcactctcccgtcaaactgatacccttaagttcatttgaatctctttttatttcctagaagtatctcgctactttagtcctactaggaaaagttctttgggatctctctttgtaaatgttagtttcgactcttgtttttttccaggttgcatggcatttctttgtgcaattttgtatcgctaaacaacgaaaagttttagttagcattaaccagtggtacatagcaaggcagactgtgtggttctatgggtgtaatgtatttaagaatgttttgtataaagtattgtttctgtaggaaaaagtgcttgatttgacatgaatgtggcagtaattttgatagatttgttgggag

SEQ ID NO: 50775 - DNA, 1206 bp, Zea Mays
tatcctccaaacctaaccctagcaacacatttcgctccccacagcggcggcggccacagccacacgttctcgcgcgggatctaattccaaacagcactgcccttgcttctaccgttccccaagtgcgctccctctctcgccatccatctcgtgcacgactgggcaaccgttgccgctgtcgaggtgcccaggtcttcatcggtccctcgtcagttcttctccggcccttcgccgccgacaagctcccccagtacttatgttaccaaagcaaggctagtaaatcataccggaaagaatggtgatggcgtcttggtcttgggtctgctagatgcatgcctactgccttatcgcaaagctagcttacctggtcatacgaatttgtactactaaagagacaggagcaaagagttaacaggagatgaatgcccctgaccgttatgagcgtttcgtcgtgccagagggcaccaagaaagtgtcctatgagagggatacaaagattgtgaatgctgcatcattcactgtcgaacgcgaggatcacactgtaggcaatatcctccgcatgcagttgcacagagacccaaatgttctctttgccgggtataagctccctcacccactccagtacaagatcattgttaggatccacacaacgagccagtcctccccgacgcaggcctacacccaggctatcaatgatctagacaaagagcttgagtaccttaagcaagcttttgagacaccaacagaccatcattgaaccttttctactttatgatacaaagatgtgaactatggactacttgatgaactactagatgttcaacacaggaatgcctttggcaaaatttgcatattcactctcccgtcaaactgatacccttaagttcatttgaatctctttttatttcctagaagtatctcgctactttagtcctactaggaaaagttctttgggatctctctttgtaaatgttagtttcgactcttgtttttttccaggttgcatggcatttctttgtgcaattttgtatcgctaaacaacgaaaagttttagttagcattaaccagtggtacatagcaaggcagactgtgtggttctatgggtgtaatgtatttaagaatgttttgtataaagtattgtttctgtaggaaaaagtgcttgatttgacatgaatgtggcagtaattttgatagatttgttgggag

SEQ ID NO: 50776 - DNA, 1117 bp, Zea Mays
tatcctccaaacctaaccctagcaacacatttcgctccccacagcggcggcggccacagccacacgttctcgcgcgggatctaattccaaacagcactgcccttgcttctaccgttccccaagtgcgctccctctctcgccatccatctcgtgcacgactgggcaaccgttgccgctgtcgaggtgcccaggtcttcatcggtccctcgtcagttcttctccggcccttcgccgccgacaagctcccccagtacttatgttaccaaagcaaggctagtaaatcataccggaaagaatggtgatggcgtcttggtcttgggtctgctagatgcatgcctactgccttatcgcaaagctagcttacctggtcatacgaatttgtactactaaagagacaggagcaaagagttaacaggagatgaatgcccctgaccgttatgagcgtttcgtcgtgccagagggcaccaagaaagtgtcctatgagagggatacaaagattgtgaatgctgcatcattcactgtcgaacgcgaggatcacactgtaggcagttgcacagagacccaaatgttctctttgccgggtataagctccctcacccactccagtacaagatcattgttaggatccacacaacgagccagtcctccccgacgcaggcctacacccaggctatcaatgatctagacaaagagcttgagtaccttaagcaagcttttgaggatgagaagaacaggtacgaggacaggatgaagcaggggttctagatgaatggaatggtgtgggagataaacttcccgtgttagttttatcctaggcgagtcaacaatgaaacgaacgcccaaggattgtgaatgtctgatccctgaactaaggttgcttgctgtcgttttactgtcatgcttgtgtcaatattcgtattattgcaaacacaccaatggagttttacattaacatcctcagattgttcgcaactagataattacatgcatgcctgtcttcaacataaaatatataacggtccatttcgacccttttgtctgggctgaaataggttctactccgtgaacttagcaatttagctatgggtcgtatggatctatttattttgaaggaatt

SEQ ID NO: 50777 - DNA, 2438 bp, Zea Mays
aagctaaatgcaatgaatgaaaataaaattttgaatcagtgcatgttgttcacccaggttcactaagcttgttttagtaggcctgctaaacaaaaaatgaaggtttgctttcatccaacatctgtaaggaggatacaaactaaagtaaaaaaataattgaatagcagcgttagccattagacctccctctaccaggcaaccaaatttgctcagttcaggtgccggacagcttttcagttgatgattgtgtttcactgttgttgcctgctattgcctaacatgtttgaagagttcagctaccatgttccacgcctcccagatcttgtgtttcagctggtgatcataaactgttcagtcggtgatcttaattttcacacctaccatgttcagccggtgatcatgtgtttcagctgccaatcttcagtaacatgtttgaacagtttaattgctgaatagtttgaagaacactgcacaccaacaaacagtcagttgttgcctgctggagaaggtgacactgagatttgcatggatcctccagtcagtggatcacaatcacatcatctcaggattaggtttcagaatgcagagaaactgggttcatatacgattcatgtttatatatacttaacatcttgaattatataccattatctactcctaaaacaagatcacaagctcaggttctattgccttttcaagaggaccaggaattatatatgccattttgaagcaggattaggtttcagaattcagagaaacacatgatcatcggctggtgacaactactgcagattagcttgcacagatcaccattatctactccctctaacacaaaagtttgtcatttctcattctttaatgagtcagccattttaggtttgatcaaatataaacataaaaggttagtactaacatttgtaataacacctacatgatggagcggtggtgtcactgcattctgttcctttattctttctagctagtggcttcttgttgtcataacgttccaaataagagaataaataaatcagctggtatcacagaaagattctaggagaaattgaacgcaaagcttctttttttccttaataggaaaaggtgcagctaaacgagggctgcctaaacaaataaatcagcaaagacaaacatttgagggttgagaggcttccatgaggacaagtggataaggatctaggcaatttaagtgaacattaaatcaagcatgccaatggaatttatagtttcaccgaaaaccaaattctaaagtaccatatcccctcttttccatttagattcagaaaatccacactccctggttatactcctactgtttatctgaagaactttgtcttctcacctgaagaacaaaaaactggacaaataaatcagcaaagacatagatatttcattttaagaaaaaaaaactggacaacattttacctcacatgaagaactttgtattctcatttacatcagttctcctactgtttgcctgctaagatctatccggcacagtaatctagcgtccgtttcttgacaataaattattgtataaatttgcagtagcttacctgccttgtttgcatctcgttcacttgtgtggtcaccactgcagctactcaaggcaatactggagaaaatttgacgaccactgacatgaagacatgtaaagcttcgcatgttgatgaccaagaaaataaatgtcaaaagcaggaacttggaacttattgagtcaagtaaataatttcttcatgaaatgcttgtgtacatagactgtaaaaaaatcatatgaaacactcatctcggattcatacgccaattaaatcatacaaactggttgtgaccttgtggttatatgctacaaaatataatgggaatgtgcagataataaaaacaattttgttatatttcattccgtttacacgactgataagatatagttcatcggtaagtgctgctttcttgggtacaacatagaaattatatccaactaaatgcctaagcgtgttggtgttcttagatttaaataaaaggccacgatctgatgaactggttggatataatttacaaatttattaaataaaaggccacaatctagggtacgcatcatttggaacctaaatgaacgataaagtatatcgcatgatctagttgtgatctagtctgccatggacgcaaagatgaaggggaacagtaattttattccatactggactcggatgcttcgtgagaagtagggggtgcctcggtgacgccgacgacttgcagatctgatgtccggtgatggcgcttcacttggttgctctcgaccgatcgaaggggagggggaacccaaaccccttgccgaggctccccctcgttgccgccttccttggggatagacagctgcagcgggccgtggcaccttgtgagcgccgccatgaaatgtgagattacag

SEQ ID NO: 50778 - DNA, 190 bp, Zea Mays
cgccgctcatccaagggcaactggactctagaagaggatgacatacttcgcaaagctgttgaaacctacaagggaaaaaattggaaaaagatagctgaatgttttccaggtaggactgatgttcaatgtttgcatagatggcagaaggttttgaaccctgaacttgttaaagggccttggtcgaaagaag

SEQ ID NO: 50779 - DNA, 511 bp, Zea Mays
cccaaagctattagattttttcgcaacccagcccatcccgtatacagtataccccaagtggcccaactagcccacgtatatcctccaaacctaaccctagcaacacatttcgctccccacagcggcggcggccacagccacacgttctcgcgcgggatctaattccaaacagcactgcccttgcttctaccgttccccaagtgcgctccctctctcgccatccatctcgtgcacgactgggcaaccgttgccgctgtcgaggtgcccaggtcttcatcggtccctcgtcagttcttctccggcccttcgccgccgacaagctccgccaggttgctgtgttaagtccaagcttatcacatggattcaacacaagattttcaacccaggacattttctataaagttgtggccaccaagtgaaagcacacggctcatgcttgttgagaggatgacaaagactatgtccacagagtccatttttctctcgcaaatatggttttttgggcaagcaa

SEQ ID NO: 50780 - DNA, 485 bp, Zea Mays
atttcgctccccacagcggcggcggccacagccacacgttctcgcgcgggatctaattccaaacagcactgcccttgcttctaccgttccccaagtgcgctccctctctcgccatccatctcgtgcacgactgggcaaccgttgccgctgtcgaggtgcccaggtcttcatcggtccctcgtcagttcttctccggcccttcgccgccgacaagctccgccaggaactgggaagttttcttcttttgttcagatgcgcgaagaaatcgagaatggtcatagtcatcgtcaactccaggaagacctgattgaacacctatgggagcggcgcggacacatgaaccatcaacaataattcattttatgtttcagcaatagtcatcgtcagtagctttatgtttcagcagtagctttatgtttgagcatcttgtgtagctttctggacacatgaagcagcaacaataaatcattttatagtctatgagc

SEQ ID NO: 50781 - DNA, 2698 bp, Zea Mays
agcaaagccgccgccgccccgccgtcatcgttccttttgttttctgttatcatccccttctcgccagattggatttcttattgctgcgctgctcgtttctttcgattttgatctgatagtttggcgtcgatgttgttgtccactcttgcggttggcttcgtcatctggtcgctgggattttcggtctctgaccgtttggttcccagtggactcgttcccttgaagcaaaatcacctgttgtaacctgagttcgctttcaacctgtgccctcggagtttgctggcgccgcagggcacgccgcgatccttacatacattatcaccatcaaacgagaaccgcttcgaatcctcgattacgtgcctccattcttcggcactctagactatgattttgttttgtgtaggctagaatgcaagttttgtgggtcgtgctggcaacggtgatgagtcctacagacctgtaatgactcctgcggagatgatcgcatggtctaagaacatctaagggactgagttgtcttcttgtagtcatccagcgctaggtttttttagtttgctcttttattttagtcagtgagtagttgcagagccctgttattatgtgagtaggcttctcttgactccattgtgcgtattagcctttatggtttgtgggcagcgtctaaatgggaagcataaacgattgttcctctcgctatccggcgcggagttttttgatgcgattggacgtcgaggaacgacactttgtatttttttcatgctgtatatcagattgttgaaacttttcaccgaggagcttcgatgctagcaaaacggcaaattgctttttgttactattatttgcacagaccaaacaccgaaccgagcagacctattatgcatgatggtccccactcatgaaatgaattggttctccctctgtttgtttagttaaaaaaatatattattgaacgataaaaattcgagaacagtatatatttataattgcacaattcttctgataaattattggacactgatcaaactttccttgatggccgcatatatatctttcggtccaatgagtggtccatgagcttttacttacactaacaaataacagagaatttcacggcgttgccaattttttagtaacgaatcaatcatgtttaaaatcatatacactcgcggaatttagaggttcctcaccaacaaaatgccgtacgcttgtgccctgcgtaagtgggttcacgcatgacgtaattcgcatctgccactggcgtcggctaaagtcgtggatctagaatggtctatgcagttgcgacggaacggatggaggaaaaaatgaaccacgatttctcttcagttctttccttgcgtgcacggctgctcgtcaattcggctgccgaaattatcccgttgccttctggttcccacgacaaaagcggcattaccccggtcgctttataaattggactttcttactttcggcacggccaccggacagctccccacaaaaccgtcagttctcttttcccctgtaaatcgcaaattcgtcttccctgcccatctatcgcttggacacctctgcaagggagcacatggctctcgagaaggccaaggagatcatcgcgtcctccccggtcgacctagctctccgaaaggccaaggagaccgtcgcctcccaccccgtcgtcgtcttcagcaaaacttactgtcctttctgcacccgagtgaaacaattgctagcaaagttgggggcaagttacaaggctattgagttggatgtggaaagtgagttttctctccttgattttaccgtacttctttatttctggttcacttatttacttcacaagtagttaactcccaaatctcaatggacataaaataggccaacaaatgaaaggtaagtaaggtttatgatatcaaatggtgatggttgtagaagccactggtagattcatcagctcatctatcagttgaaactgttctgttcaaacaatttatgatattactgaagtaagttctgttcaaactgcaatgccgaaagtgtccatgaaccggatgatcattactagcattcaatcaaattggagatttgttcagtgcttctgcaaaccctatttggagttttctctttaatattggtagcacgttgcacaattacagcaataattattgtttgaatctacaaatgtggtcgaacacagtggagattacacgaaccaatttaacatgtctcgagtgctcaagagacaccagacttattcgttctatgagaactgtttgctgaactatcatcttaaccactgtgcgaaggtgatggcgctgagctgcagtcagctctcgctgaatggactggccagagaactgttcccaatgtcttcgtgaaaggggagcggattggtggctgtgacgcaaccatggcgatgcacgacggtgggaagctggtgcctctgctcaccgaggctggagcaattgtcactgccagggctactgcaactactaccactccgtctttgtagacatgttttacagcgctgttccgctcgcttcgtggctatatgcaagtgttgtacggagtactaaactcatacgtggtaaaagatgaataaagacttaaacatttctttcgttggcttggctgtattatatgctattggtttttgttgataatctccgcaactcttcacacactacctcgtcgtctggactgc

SEQ ID NO: 50782 - DNA, 2340 bp, Zea Mays
gtccgctccgccgagcgtgccggcatgcccccaaccccacccactgagcaaagcggaaaaaagcgaggaaaaatatcctgctcggctgctccaacgaagcaccggaggccgcaacagagaagagcggacgccaccgccgccaatcaatagattaggcgcggataatggtgctggccggaccgcgacgggcggaggagggcgccgcggcccccgcgcgccgccgctgacagagtatacctgcttaaccagccgtctgcaggcacggcgcacgcgcggtggtacctcgcgaggggctcgggttgactgggcgctactcgcggccgcggggatggaggaggaggcgtctgcagatccaccgaccgcttcgtccttcgcctgcgtctctggttccgggcgctgctgaatccgacgcttcggttcgcgtccccagtccccttggcggaggccagcagttcgtggaccggagcaaggtgaggattcttctctgcgacggcgacgccagcagctcccgggaggtgctgcggctcctctgcaactgctcgtaccatgtaacttgcgccaagtctccgcggcaggtgatcaatattctcaactacgagggcggcgagatcgacatcatcctggctgaggttgatctgccggtctccaagtgcttcaagatgctcaagtacattgccaggaacaaggacctgcgccacatccccatcatcatgatgtccaacagagacgaggtgtctgttgttgtcaagtgcttgaggcttggtgcggccgagtacctggtgaagccgctgcgcacgaatgagctgctgaacctttggacccatgtgtggcggcggagacggatggagttgctgtacctgcatgaattattctttaaatcgagtgctggtgttggcagcttggtttgcccgagaaaaacttcttcaatgacaacttcgagttggtgctctcagaacctagtgatgcaaataccaatagcgccaccctcctctcagatgagacagacgacaggcctaaagaaaacacaaatcaagaaacgggcacctcaaatcagcttgaatacgagtctaatccttccgttgctgagcgcgaccagagagacaagatcggtgctccaggctctgccctagatgccagtcaatcatcgactccgggaagaatgttttcacgtcctataaaaactaacctgaaggttgctgagtcgtctgcatttctagcatatgttaagtcaagcaccccagccaccagctcatttgatagcggactacaaagaggtgacagccggttagattctttggataaccatggtaattgctctagtgcaacagatagaagtgacaccggtgctgatgtaaatattcggaataaagaagcttttgagatgcctgtgcagtatcctatggtatgcttttcttcctctagcatgcatatggagcgaagcaatgaaggccataatgacacttcaggaactccacctgcataccatttcccattttattatccagggatggtagaacacaacatggcactttcatcagtgcaaaattttcaagcaaacataaacagtgctcaagcacatacaccaccagcgatgcttcatcagtacaatgttttctcccaatgccatagtttacccatgatatcaccatttcagtttaatacttctggcatgagtatgcactcaagtcatttaccgacgcaaaatgtgtggtcatcggcatcgagcacaccaacgcctgacgaaacatgcaatcgctccgagagaagggctgcagcacttgctaaattcaggcagaaaaggaaagagcgctgttttgacaagaaggtgaggtatgtgaacaggaagaaacttgctgagacgaggctaagggtgcgaggtcaatttgttaggcatgcaagcaatatggatatcataagcaccggagatgatatatctgaagacgaagatgacgatccaacctccagggaggtagatatgatttcttctccagagtagtggagaggtcctcttgtgtgaaaaattagagtgcagatggttactgctcactttgttacaactcagtaggactagacaatacattattctactggcaacaaggcaatacaccctttttgctcacacagtataaacttttgtccccaaatatctggctgttactccggttgctttaatcgagaaatcatctttttgataaggctgttactccggttactttgatcgagaaataatctttttgataagtgtagttatagttttgctaagtttttgatgcaaagaccagtcaaatcagtttgatcttattgcagggtaatatttgcaattttgaggttaacagtgtt

SEQ ID NO: 50783 - DNA, 2376 bp, Zea Mays
cacccactgagcaaagcggaaaaaagcgaggaaaaatatcctgctcggctgctccaacgaagcaccggaggccgcaacagagaagagcggacgccaccgccgccaatcaatagattaggcgcggataatggtgctggccggaccgcgacgggcggaggagggcgccgcggcccccgcgcgccgccgctgacagagtatacctgcttaaccagccgtctgcaggcacggcgcacgcgcggtggtacctcgcgaggggctcgggttgactgggcgctactcgcggccgcggggatggaggaggaggcgtctgcagatccaccgaccgcttcgtccttcgcctgcgtctctggttccgggcgctgctgaatccgacgcttcggttcgcgtccccagtccccttggcggaggcgtggatcgtgtgtttggggggtctgggtatggtgggcggaggcgagggggatcgcgtgggcggcggcgtaggggttgggggaggccagcagttcgtggaccggagcaaggtgaggattcttctctgcgacggcgacgccagcagctcccgggaggtgctgcggctcctctgcaactgctcgtaccatgtaacttgcgccaagtctccgcggcaggtgatcaatattctcaactacgagggcggcgagatcgacatcatcctggctgaggttgatctgccggtctccaagtgcttcaagatgctcaagtacattgccaggaacaaggacctgcgccacatccccatcatcagtaggcagccttcctattctgcgccttgtgcggttgtgcctattactgtgatgtgctttctgtgacccgtcctccctatcttatggaactgtgcagtgatgtccaacagagacgaggtgtctgttgttgtcaagtgcttgaggcttggtgcggccgagtacctggtgaagccgctgcgcacgaatgagctgctgaacctttggacccatgtgtggcggcggagacggatgaacctagtgatgcaaataccaatagcgccaccctcctctcagatgagacagacgacaggcctaaagaaaacacaaatcaagaaacgggcacctcaaatcagcttgaatacgagtctaatccttccgttgctgagcgcgaccagagagacaagatcggtgctccaggctctgccctagatgccagtcaatcatcgactccgggaagaatgttttcacgtcctataaaaactaacctgaaggttgctgagtcgtctgcatttctagcatatgttaagtcaagcaccccagccaccagctcatttgatagcggactacaaagaggtgacagccggttagattctttggataaccatggtaattgctctagtgcaacagatagaagtgacaccggtgctgatgtaaatattcggaataaagaagcttttgagatgcctgtgcagtatcctatggtatgcttttcttcctctagcatgcatatggagcgaagcaatgaaggccataatgacacttcaggaactccacctgcataccatttcccattttattatccagggatggtagaacacaacatggcactttcatcagtgcaaaattttcaagcaaacataaacagtgctcaagcacatacaccaccagcgatgcttcatcagtacaatgttttctcccaatgccatagtttacccatgatatcaccatttcagtttaatacttctggcatgagtatgcactcaagtcatttaccgacgcaaaatgtgtggtcatcggcatcgagcacaccaacgcctgacgaaacatgcaatcgctccgagagaagggctgcagcacttgctaaattcaggcagaaaaggaaagagcgctgttttgacaagaaggtgaggtatgtgaacaggaagaaacttgctgagacgaggctaagggtgcgaggtcaatttgttaggcatgcaagcaatatggatatcataagcaccggagatgatatatctgaagacgaagatgacgatccaacctccagggaggtagatatgatttcttctccagagtagtggagaggtcctcttgtgtgaaaaattagagtgcagatggttactgctcactttgttacaactcagtaggactagacaatacattattctactggcaacaaggcaatacaccctttttgctcacacagtataaacttttgtccccaaatatctggctgttactccggttgctttaatcgagaaatcatctttttgataaggctgttactccggttactttgatcgagaaataatctttttgataagtgtagttatagttttgctaagtttttgatgcaaagaccagtcaaatcagtttgatcttattgcagggtaatatttgcaattttgaggttaacagtgtt

SEQ ID NO: 50784 - DNA, 1832 bp, Zea Mays
gtggaccggagcaaggtgaggattcttctctgcgacggcgacgccagcagctcccgggaggtgctgcggctcctctgcaactgctcgtaccatgtaacttgcgccaagtctccgcggcaggtgatcaatattctcaactacgagggcggcgagatcgacatcatcctggctgaggttgatctgccggtctccaagtgcttcaagatgctcaagtacattgccaggaacaaggacctgcgccacatccccatcatcatgatgtccaacagagacgaggtgtctgttgttgtcaagtgcttgaggcttggtgcggccgagtacctggtgaagccgctgcgcacgaatgagctgctgaacctttggacccatgtgtggcggcggagacggatgcttggtttgcccgagaaaaacttcttcaatgacaacttcgagttggtgctctcagaacctagtgatgcaaataccaatagcgccaccctcctctcagatgagacagacgacaggcctaaagaaaacacaaatcaagaaacgggcacctcaaatcagcttgaatacgagtctaatccttccgttgctgagcgcgaccagagagacaagatcggtgctccaggctctgccctagatgccagtcaatcatcgactccgggaagaatgttttcacgtcctataaaaactaacctgaaggttgctgagtcgtctgcatttctagcatatgttaagtcaagcaccccagccaccagctcatttgatagcggactacaaagaggtgacagccggttagattctttggataaccatggtaattgctctagtgcaacagatagaagtgacaccggtgctgatgtaaatattcggaataaagaagcttttgagatgcctgtgcagtatcctatggtatgcttttcttcctctagcatgcatatggagcgaagcaatgaaggccataatgacacttcaggaactccacctgcataccatttcccattttattatccagggatggtagaacacaacatggcactttcatcagtgcaaaattttcaagcaaacataaacagtgctcaagcacatacaccaccagcgatgcttcatcagtacaatgttttctcccaatgccatagtttacccatgatatcaccatttcagtttaatacttctggcatgagtatgcactcaagtcatttaccgacgcaaaatgtgtggtcatcggcatcgagcacaccaacgcctgacgaaacatgcaatcgctccgagagaagggctgcagcacttgctaaattcaggcagaaaaggaaagagcgctgttttgacaagaaggtgaggtatgtgaacaggaagaaacttgctgagacgaggctaagggtgcgaggtcaatttgttaggcatgcaagcaatatggatatcataagcaccggagatgatatatctgaagacgaagatgacgatccaacctccagggaggtagatatgatttcttctccagagtagtggagaggtcctcttgtgtgaaaaattagagtgcagatggttactgctcactttgttacaactcagtaggactagacaatacattattctactggcaacaaggcaatacaccctttttgctcacacagtataaacttttgtccccaaatatctggctgttactccggttgctttaatcgagaaatcatctttttgataaggctgttactccggttactttgatcgagaaataatctttttgataagtgtagttatagttttgctaagtttttgatgcaaagaccagtcaaatcagtttgatcttattgcagggtaatatttgcaattttgaggttaacagtgtt

SEQ ID NO: 50785 - DNA, 2333 bp, Zea Mays
cgctccccacctcagcaggtcgggaagagcttccctgtccgctctcacgaagcctcctcctccccgtctccctcgcaaagccaccgcctcctcgtctccctctcgaagccgtcgccgcccactgcctcgcactctcttggactggatctgtcgtcgtccggtgattttgctgaacacgagcacttcctgcttcctggcaccgcgcgctcgatctccctcctcttcgctggagcctgggcccgaggatcctgcaagccggcagctggagaaaggcgagcgacatggcgacctccacaatgcggctggtgaaggacgagaaaggtgagcaccttagccttgtcacagatatttttctttttcatcgattatttttctttttccatcaatcatcggtggctagtgacccgctgcaccctctttatttcttttctgaagctgaaaacatgcatatctgtgatgcataatatatatattaatttttgactaaacgatgacacttgcttagttgggagctattttacatgtggattcagtcatggcctttcacgttgtgtgtagctagcctcctgaattcacttctttagctaagatatttctgtagaacggccaccaaggctaggctggttcagtagtccatgattttcacattgtgtacaacctctgacctcagttctaaatctagtacaaagatttattgcagaacaccagtatgcccgggactctgttctgctaatgcgtttgtgccatgtggagtatttgcttactctattctagcttttgtaataaagtatattggatgatgtccctagcaagtttactatctaaagatgtggacagtgtattttctattgcgttttatctattcttttgatatgatatagcagtatggtatcctctgccaaaggacactttgtctgcgtcagacactcgaaccagagaatatggcccttgtctgccaaatggaatcagggcagggcagcccccgacgggcactcccgcccagggaatctggcaaattccaacattgacaaagccacacctcttctgctttgaattcactatatataccttgtaaatgacaacgttgtagataattgcttaagctttctaaaataaaacactagaactccaaaatccgaagatctgtgatgaaaataccggactgaacagaactaataggcaataacagtacgacgtgaaaaaaggacgcgatctctagatacaaaactcaaactagagtaagaacccaatctaaaccggcaataagatcttaaatctaggacacagccctaacacaatgaacatagggtcggagttagagtaaattcgagcagatgtgcttttgttggggatgcgtagattttattgctggcaaaatctgatcataatcatagttcttgtgttttgggtggctgcgaccgtatccccctgatgagggcatgtagaacccttagccttccgttcgttttttcaagtacacgatgcaactaaaatactctatgatacaatcatgagcttctaaataataaatgcagttaagatacaatatgtataaagagccgtgtagagacggtctctttacgaagagcctgttataaatgaatgcgatacaaagaggatcaatcacagagaagacacggatttaacgtggaaaactcctctaaagcgaagggggaaaaaccacggacgccggccagcaacttctcactattttcgggtggttacagatcgcaggagatttacaattgagatagttatctcctgcggcttacaaagatatttatagaggtgaaaccctaaaacgattcgtaccgcggagccttccagcgacgggcctccgcttcgctcgccaacttggccgccttcttcagaatttggatcacaaactcaacagagccttgtctcttgacttttttcactaaacctgcatctccaacagtgccgcaaaattagtgctctattttaaaatatagggctcaatctataaaaatagctccaataatgtcctattttaattttttttatcaataatacaaggcacaccatgaagtgacctaaatatactacatccatattagtgccctatacttgtttctatataattttcaacatttgtttttctaataatgcaatttacttcctaaaatatattatttagagcttgactgctagatcttaatttgtttgtagtgctataaactccttaaattatgtagtattttaatttttggccactatttgagacacattgttgaagacgctctacccctcaatacaccccctaattaatagtgctatacatgccctcattatttggcggtggtggcgcgagg

SEQ ID NO: 50786 - DNA, 1312 bp, Zea Mays
gattgcacgtaaaatgttaggccagattctgataacgaaacaaactggtccagagggaaagattgtgagcaaggtctacttgtgtgagaaactatctcttactaatgagatgtacttcgccatcacccttgataggaaaactgctggtccgctcattattgcttgcagcaagggaggaaccagtattgaagatcttgcggagaagtatcctgatatgattattaaggttcctattgatgtatttaaaggaatcacagatgaggatgcagctaaagttgttgatggtctagctctaaaggcagcggataggcagtcttctatagaacagattaagaagctgtatgaacttttctgcaagtgtgattgcacattgctggagataaatcctctggcggagacagctgacaacaagcttgttgctgctgatgcaaaattgaactttgatgataatgctgcatttagacagaaagaaatatttgcactgcgtgatacaactcaggaagaccccagggaggtcgctgctgccaaagcagatttgaactatattggtcttgatggagagattggttgcatggtgaatggagcaggattggccatggcgaccatggatattataaagttgcatggtggtacgcccgccaattttcttgatgtcggtggaagtgcatcagaggggcaggttgtggaagcttttaagatactgacttcagatgatagagtgaaggcaattctagtgaacatttttggtggcattatgaaatgtgatgtgatagcaagtggaattgttaatgctgccaaacaggttgacctgaaagttcctgttgttgttcggttggaaggcaccaatgtagaccaaggaaagaggattcttaaggaaagtggaatgactttgatcactgcagaagatcttgatgatgcggcagagaaagctgtaaaagcatccgtcaaataactagtgtatcaatctgaagtttctttttttttcactggtacaagatgagcagtgctcttttacggatttcgatttggagcagaagtcgtgaactgcaacgtttttgaaatggtttgactctgatgtcactcaagcgcgatggacaggtggagcatgctgaatagttcgcattttttgcaaggatgatgctatctagctaaaatttatcatacgcacgcacaaaggaaataacatgtgtgcctgcagcacatcgggacatgcaatcccctgttaatatttttaattagatggagccaacattgcgtccaaccaatctcatacaggagggatggaacacgcgtctaagcacatatatctact

SEQ ID NO: 50787 - DNA, 1663 bp, Zea Mays
gcctccgcgtccaagccagctcgtcaagccagctcgtcgtccccgtcggaggagaacctgtttatattcttgtgaggaagaaacgttcccatccccgtcattgaggaattcggaatcggggatcgagtacatctccacttcttcccaggcggccaggccctggcccgcggccgcaccgcaccgtagtttgttccttccgcaaggaagcgagagaaaatcgagtgaaaaggaaggggaaataaggctgaatcacagtttctggatcggaggagcatccccgcctaggtctctgcagccatggttcgcggatcgctcggcaagcttgcatcgcgcgccctctccgtcgcccgggagatggcagcaccagcagctccgccgcctcaacatccacgagtaccagggcgcggagttgatgggtaaatacgggatcaacgtgcccaggggcgcggcggctgggtccgtacacgaggtcaaggacgccttgaagaacatgttccccagcgagaaagagatagttgttaaaagtcaaatccttgctggtggccgagggctgggaactttcaaaagcggactgcaaggtggtgtccatattgttaaggctgaggaagctgaattgattgcaagtaaaatgttaggccagattctgataacgaaacaaactggtccagagggaaagattgtgagcaaggtctacttgtgtgagaaactatctcttactaatgagatgtacttcgccatcacccttgataggaaaactgctggtccgctcattattgcttgcagcaagggaggaaccagtattgaagatcttgcggagaagtatcctgatatgattattaaggttcctattgatgtatttaaaggaatcacagatgaggatgcagctaaagttgttgatggtcttgatggagagattggttgcatggtgaatggagcaggattggccatggcgaccatggatattataaagttgcatggtggtacgcccgccaattttcttgatgtcggtggaagtgcatcagaggggcaggttgtggaagcttttaagatactgacttcagatgatagagtgaaggcaattctagtgaacatttttggtggcattatgaaatgtgatgtgatagcaagtggaattgttaatgctgccaaacaggttgacctgaaagttcctgttgttgttcggttggaaggcaccaatgtagaccaaggaaagaggattcttaaggaaagtggaatgactttgatcactgcagaagatcttgatgatgcggcagagaaagctgtaaaagcatccgtcaaataactagtgtatcaatctgaagtttctttttttttcactggtacaagatgagcagtgctcttttacggatttcgatttggagcagaagtcgtgaactgcaacgtttttgaaatggtttgactctgatgtcactcaagcgcgatggacaggtggagcatgctgaatagttcgcattttttgcaaggatgatgctatctagctaaaatttatcatacgcacgcacaaaggaaataacatgtgtgcctgcagcacatcgggacatgcaatcccctgttaatatttttaattagatggagccaacattgcgtccaaccaatctcatacaggagggatggaacacgcgtctaagcacatatatctact

SEQ ID NO: 50788 - DNA, 3425 bp, Zea Mays
aacgcaagaaagaaccatgcgaaaacaaaaccagacgccgtgcccgtgcccgtgctctcctatcccacctacccgttgtcctgccctgccccgtccgtctcccacggtttccgcgtcccacccatcccttccacactttctcacccccgcccttctcaccccccgaaaaaattcccccggaaatcagagacgcgaatccctccctcgccccacgtccgaggtcgctcgccaattcgatccgcctcgtcgtcgcccgcccgcccgtccgccggtcgaccttgactgctccgtcgcacgtggcgtttcgcagcgcggaatctaccctgggttgggttgggagatccggggaaacccttgttcccgggcgctccgggctcgaatctcgctgcagacgggcaatgtgagcgctctccatcggagagggacgatctgcggggcggttgttggccgggtgaatcgtgcggtgcggggttgcgggaatggagcacgtgatcggagggaagtttaagcttgggaagaagatcgggagcggatctttcggggagctctatctcggtgtcaacgtacagagcggcgaggaggtggctatcaagaatctgtaaaatcaaggcatcctcagcttcattatgagtcaaaactatacatgcttctccaagggggaactggaattcctcatttgaaatggtttggagtggatggggagtacaatgtcatggtcattgatcttcttggtccaagcctcgaagacttgttcaactactgcaacagaaagttttctcttaaaacagtacttatgctagctgatcagatgatatctagggtagagtacatgcacacgagggggtttcttcatcgtgatatcaagccagacaacttcctcatgggcttaggccgtaaaacaagtcaggtttatgtcattgactatggccttgcgaagaagtatcgggacctccaaactcatagacacattccatacagggagaacaaaaacctcacaggaacagcacgatatgctagtgtaaacacccatcttggagtaggtgagtatcgttatttaacggtggtgctaagaggtttaaataatgtttaattatacagaacagcaagttttaggtttttatgggtacacaatctagtacaaaaacagggccttttagtcccaattaagttggggtaggctagagatgagaccctacggaaaggaaaactcatataaaatataaaaaggcattaacactcccccatcacataatataaggcgtatgtttcattgtgacgagcctttgaccaacaattattatatatattttttcgcgaaaacgcaggagagctgcgcgtcattaaattaagaagaaatgggtttaaggtcctagaggaccagtacaagataagaccttacggaggccacatacaggcatacataatacataaacacatccatggccagacacagaccctaatataccaaaaaaacaagctaaatctgtgggagcccaggaataggacccatcaacagggacagcttctttgctccagccaattccaacaattattatagtagtggaatatttttttatttagatcctttacttaaaaattatttacttgtggttatgattttgtattacgtaatgacatattagtagacatgattgtcaaggactttgttctaacaaaggaaaaaacgtcttatattatgaacggtgtagtaatagaggtgtatccagtgttagctcccacgcaagttgatatccaggacacaagtggagagattctaccattgtgccatcccactgcttatacacttctgaagcttaaaaactgtaccttgccaatcaacagaaaatgtcactcgtccaatttttttttctcaccagcagttcaatgtacattttattttgtaagctttggttaactatatactgctgtctgttattttgactgttggtatgtgttattaaaaactcggccggtaggggaaagaccgccccacaatattatattaagaagcttaattggagccccgaccgagaaaggtcacgaaagttgaccctcgtgcagcatgagggtccgccccctataggtcagatctttactgtgctttgagccctcccagccctacacgaggatccccccctatagatcagtacatctcgtgtgcacacaactaggggaaccaccgagtgaccttttttaacctcaacctgaaatttggtcccactgggattcgaacttaggacctcacctaaccaagtcagctagaggcccttccgctgttggtgtgtgttattgatggttttctctacagaacaaagcaggagagatgacttagagtctcttggttatgtgctgatgtacttcttaagaggaagccttccttggcaaggcctgaaagctggaacgaaaaaacaaaagtatgacaaaatcagtgagaagaaaatgctaacctcaattgaggccctgtgtaaatcttatccatcagaatttgttacatatttccattattgccgctctttgcaatttgaagataagccagactacagctatttgaagaaaaattttcgggatttattcatccgtgaaggttgccagcctgattatgtatttgattggactgtatcaaggcaagctgcggacaataacagattgcgactgagtgggaagacaggtgggttggtgggaccatctgtggatcgggctgaacgagctgcagcaaaacaggatgttccacatagattcactggtccagctgatgcattggctaaaagaaccggctctggttctggtcattatggagaacacacaaagcacagaactctgttggattcccttatggcatccaatatgcgcaatggaagcacatcaaggaaggctcttctgtcaagcaaccgaggttctggagaccccagtgaaccaaatcgcagcagccacctagttccgaccaccaccagcagcagccgtccatcgaccaatcaaaggcttcaccactcaactggacttgagggcaggaccccatcatttccaaaacctggaagaatcggctatgatgatcccacaatgaggagttttgaacgccttactattagcgcagagaggaggaaatgaatctttggaagagcaaacgatctgagctgctcccggcgagtatacttcactgaatggattctgtgctgtgcatggtgctgagctctgcacatagcggtgctcgttgattcttggcacagatgatttgagttatgtacattcgtttaactcttccaaaaggttagcgaagcattttacaccccgctatgagggaccggggatcggctgcaatgtttaagccgtggtgatttaagatgatgttgactctaatacttatataatgacaatgaaaaaaagttccctagactagcattacatttgatgtgtttgtgaaagtagga

SEQ ID NO: 50789 - DNA, 1212 bp, Zea Mays
gtaccatagtaagaaaaggactacttattgcagggagaacaaaaacctcacaggaacagcacgatatgctagtgtaaacacccatcttggagtagaacaaagcaggagagatgacttagagtctcttggttatgtgctgatgtacttcttaagaggaagccttccttggcaaggcctgaaagctggaacgaaaaaacaaaagtatgacaaaatcagtgagaagaaaatgctaacctcaattgaggccctgtgtaaatcttatccatcagaatttgttacatatttccattattgccgctctttgcaatttgaagataagccagactacagctatttgaagaaaaattttcgggatttattcatccgtgaaggttgccagcctgattatgtatttgattggactgtatcaaggcaagctgcggacaataacagattgcgactgagtgggaagacaggtgggttggtgggaccatctgtggatcgggctgaacgagctgcagcaaaacaggatgttccacatagattcactggtccagctgatgcattggctaaaagaaccggctctggttctggtcattatggagaacacacaaagcacagaactctgttggattcccttatggcatccaatatgcgcaatggaagcacatcaaggaaggctcttctgtcaagcaaccgaggttctggagaccccagtgaaccaaatcgcagcagccacctagttccgaccaccaccagcagcagccgtccatcgaccaatcaaaggcttcaccactcaactggacttgagggcaggaccccatcatttccaaaacctggaagaatcggctatgatgatcccacaatgaggagttttgaacgccttactattagcgcagagaggaggaaatgaatctttggaagagcaaacgatctgagctgctcccggcgagtatacttcactgaatggattctgtgctgtgcatggtgctgagctctgcacatagcggtgctcgttgattcttggcacagatgatttgagttatgtacattcgtttaactcttccaaaaggttagcgaagcattttacaccccgctatgagggaccggggatcggctgcaatgtttaagccgtggtgatttaagatgatgttgactctaatacttatataatgacaatgaaaaaaagttccctagactagcattacatttgatgtgtttgtgaaagtagga

SEQ ID NO: 50790 - DNA, 1204 bp, Zea Mays
gcgctttgctcgcttgcgccttcaccggttggaacgtgcgcacctcactttcccgagcatgcagagttgcagacaaacgagtgcttttatagatctggaatgcaccaacgtacaggctccggccgtgccatgcagttaaccaatcaatggcacaactgcagtcaacacatgcaacggcctgtacgcggacagctgggcaccaatcatgcaaactgtgtactgaacgaagctaggcgtctcttcgatcgagcacgcactacgtctacgtcgatcgatctccaggcttccagctagcaagcatagggatcgatcgaccgatccatgcatccatggcactgagggagctggtgtgccactgcctccacaagaaggtggccttcgacttcgagcgcatcacgccggggacgctcgtcgaggtcgacctgcacgcccgcgagccgtggcccgtgggagctcccagaggtggcgaagctgacggccaccgacactgatgctacttcttcagcttccgggaccgcaagtacgcgacggggtcgcgcaccagccgtgccaccaagtcgggctactgctggtaggccacttgcaagctaccgcgagcatttctcaagtctgaataatgaatgagcaatggcaattggcggcgccgacggccaagacggcccctcctcctcgcccgccttcacacgccatggcgccggaaccggaccactccgcgtcaggaggctactacggcctctcttttgcgccgcagcaggaggtggcgcacgagctcttccacagtattacggcggcggcacggtcaccgtcgaccaccactacggcttcacgcgagccagcgggggaggagtcgccggcggtcagtgcgggtttggctgcttcgacgacatggccagccttggtggagacaccggtactcttgaaggagtacaattattatgacatggggtttgacaggtagattaaaactagattggctttgaaatgccgtgaggagcttgacaatgtatattgtgtcttggcagtgttttgatgtctagattcacagcatggttccatgcatttggaccccaacttatatttagatttatgcatgtttgttttgaggattgagttagtccatcatattcttttttttgaacgtagtccatcatgttctcagtcctcacttttttgtttggtttattgaatagaatgatttgatcca

SEQ ID NO: 50791 - DNA, 311 bp, Zea Mays
ctcaccgatggattgcgtagtgcttttctctgtcttcgttgcacggcggagatccggcggagcgatacgacggcgaggaattggagcaaaaccggcagttgatcacgagtagcgcggccccacacgtccttcccagaacttgaggaaagtccccgagcacttcacggggcagacgactgcgcggcaggggatttcccccccacggcggagcacaacccctctcctctcggttccctcccatgacgccggtggcagtggccaagtagttctcgtgattgagggctaaaggtcagcgatctgcgcagggattt

SEQ ID NO: 50792 - DNA, 1669 bp, Zea Mays
agcgcgagacgggtgttgtccatggacacgccgatgggagttccctggaagttgccgccgtggagcgccttgccacgggacacatcgatgagcgggttgtcgttgacggagttgatctcgcgctcgatggacttggtggcaaagcggatcacttcgatctgcgggcccagccactgcggggaggtgcggagcgcgtatctgtcctgcttcggcttcatcagcgggtcgagctcgccgagcttcttggccagcttcatgtacgagctgccttccaggacgtgctccatgatagcggcggcctcgatctgtccggggtggtgcttcagcttgtgcgtcaggtggtcggtgaactcgggcttgccggtcatgacctcgcagaacaccgcggagatgacctcggccatgacggcgagaacgttggcctcgaagagcacggtggaggcgaggccggagcccacggcggtgccgttgaccatggcgaggccctccttgggctgcagctcgaagaacccgtgctcgatgccggcgatcctgaacgcctcggcggcgcccaccttcctgccgtcggggcccaccgcgacggagttctggcggcccgtgatgaggccggcgatgtaggagagcgggacgaggtcgcccgacgcggtgatggtgccccggagcggcaggcacggcgtgacgttggcgttgagcagcttggcgatggcctccagaatctcgaagcggatgccggagtagccctggaggagggtgttgatgcgcacgagcatcgccgcgcgcgtggcctcggccggcagcacgtggccgtcggcgccggtgccgaacgcgccagcattgaggaatctggaagatggaaacgggacagagtagaggtcaattttcggagccttaagatagaatattgagcaataaacttggtcagggttgtacgtatacgataaacttgaagattaacttggatcaaacaaggatctgccgactgccgacttttaagagttcagtttatgtttgtattccactttgtattagagtaacgcttaaagcttagtttatgcttcgccgtgatagaccgagtaacagcgaacaaaataatggattcgcacacatggacagagagatatcttgtcggtgcaagtaaattattcttttgcttcattttgccagctttggtgggtaagaagcttcccggatatggggcagttaggaactttgatgaatggaaataattccacatgctatgagtagttgactgcttactctcactctcttaattgtttgttgcgccatggttgtttcatcgctggcacgcgttctttattactcctatgaggaagaaccagttttctgaaacgtactgttgagccttttttttaactcggtaagtaggataaggcggcgagacaaagtctgaaaaatgcaatcgtgttgctgggtctgggctgtggtaaaaaaaaagagaacgtattacagcgcagcgccgaaggttgcccatgtttctatgactgacgggcgcggttgcagcctgtgcacgagcaacgcgtgcaacgtgagctcgagcaacgcgcgggcggcggcggcggcagcgaacccccgttgggcggccacctgtatcggtccgtccagtactagtggagtacgtaaccgaaacggctcacatcgaagcggtgag

SEQ ID NO: 50793 - DNA, 476 bp, Zea Mays
agcgcgagacgggtgttgtccatggacacgccgatgggagttccctggaagttgccgccgtggagcgccttgccacgggacacatcgatgagcgggttgtcgttgacggagttgatctcgcgctcgatggacttggtggcaaagcggatcacttcgatctgcgggcccagccactgcggggaggtgcggagcgcgtatctgtcctgcttcggcttcatcagcgggtcgagctcgccgagcttcttggccagcttcatgtacgagctgccttccaggacgtgctccatgatagcggcggcctcgatctgtccggggtggtgcttcagcttgtgcgtcaggtggtcggtgaactcgggcttgccggtcatgacctcgcagaacaccgcggagatgacctcggccatgacggcgagaacgttggcctcgaagagcacggtggaggcgaggccggagcccacggcggtgcccgagttgac

SEQ ID NO: 50794 - DNA, 1534 bp, Zea Mays
ccgggtggtgcttgagcttgtgggtcagatcgaggctgctgccatcatggagcacatcttggagggcagctcctacatgaagcttgccaagaagctcggcgagctcgatcccttgatgaagcccaagcaggaccggtacgcgctccgcacgtcgccgcagtggcttggcccccagattgaggttatccgcgccgccaccaagtccattgagcgcgagatcaactccgtcaacgacaacccgctcatcgatgtcgcccgaagcaaggctcttcacggtggcaacttccagggcacgcccatcggggtgtccatggacaacacccgtctcgccatcgcagccatcggcaagctcatgtttgcgcagttctctgagctcgtcaacgactactacaacaacggcttgccctccaacctgtccggtgggcgcaaccccagcttggactacggctttaagggtgccgagatcgccatggcgtcctactgctccgagctgcagttcctggggaacccggtcaccaaccacgtgcagagcgcggagcagcacaaccaggacgtcaactcactgggactcatctcctccaggaagactgctgaggccatcgagatcctaaagctcatgtcctcgacgttcctgatcgccctgtgccaggccgtggacctgcgccacatcgaggagaacgtcaagagcgctgtcaagagctgcgtgatgacggtggcgaagaagaccctgagcaccaactccaccggtggtctccacgtcgcccgcttctgcgagaaggacctgctccaggagatcgagcgcgaggcggtgttcgcgtatgccgacgacccctgcagcgctaactacccgctgatgaagaagcttcgcaacgtgctcgtggagcgcgccctcgccaacggcgctgccgagttcaacgcggagacatccgtgttcgccaaggtcgcccagttcgaggaggacctgcgcgcggcgctgccaaaggcggtggaggctgcacgggcggctgtcgagaacggcacggcagggataccgaacagaatcgccgagtgccgctcctacccgctctaccgcttcgtgcgcgaggagctcggagccgtgtacctcaccggcgagaagacgcgctctcccggcgaggagctgaacaaggtgctcgttgccatcaaccagggcaagcacatcgacccgttgctcgagtgcctcaaggagtggaacggcgagccactgcccatctgctgaacagagaaaatacaaggagcagaagactgtatttttagctaataatgctttttattcccaatttatttattgtcgttgatatgctacggattcttgtcatacagctgcaacgccctgtaaccaacttcgaacatgtaataggttttcgagtatgcgaatcatatttgcagttaattaaatccaagtgttacttttttttgaaaaaaaaatcttgtgagaaatttgtataagcgtaaagcttttcaaggaatttttcacagggtaacttttcaaaaatagtttgaagacattaagctc

SEQ ID NO: 50795 - DNA, 2577 bp, Zea Mays
gtggcatactaccttatatactatcgaagaaaaggggatcggaatcgaggagcttcctacactcctttagtcgaatcccaagaatgttctggatttgatatattgaccagtgtggctttctccattccagcctgtctgcggtacttaggaccaactttatcttggcctatcaccaaggtagcacccgctggttcatagttctaaacttacaaaacaattccaacattgtgatttctgtaccgcataggctctgaggagatctacacatcctcatacaaaacaattccaacattgtgattccagcctgtctgcggtattgagaactttgtgccctgtccttgttgtctctcatgggcacctcaaaatgtttcttgtttatgaggatccttatcttgactaccatggctatatcagctgccatgaatgctacaatcattgggacactagtaactaagagggactacaagtttgctgagctcatgagactccctgacacatttcttatgttgtttgttctgctgtgctttgacttttcaatatatttgtcattcaagatattgtggtctgcaagaacttcagtagatcagaaaatatgttcacaggtcttgttggagagtggtcatggttacaaagttgggaacaaaaggaaccccctaacagatcatttacttggagagttagaggatactaccaaaacaacaggaattgggcgtgacccagttatggactctgaatgtgaaactaccttacaaaagcaagtcatggtcttcgatcagcaggatgaaacatttgacatcggagagacacccttgtccaagacatccaaggatcatttgggtcaaactgttggtaaagaaactccagtttctgaggccttacatgttgacactactgattcattgtcgttccatgattcacttttcctctctaagcatggatgtattgcaaggaatcccattcttccttatagacaagtttcaactcctaagttccattcagtcaagaatatgcttgacatgatagattatcttgctgttgaaggttttgctaatggagaagttgtaagggatgatgtttctgctgccttaagtcaacaagttgccgaattgatatccataagatgtaatgagataaacaacacagtgagattttgtaatgaatatgctagtagcatgaaatcgaaagttcaagtggtttttccttcacaccaccagtttgctgacattcttgatgacttctgggggaatttgtttgacctgcatggtaatttgacagaaaaaggaaatgccataaggttggaccttcttattgggctggatgttgaggagatcaaaagctgcccgtgctattttgatgtactacctgggggactatgtgatcctttgaagctaaatttaggtaacatggggctaccacctttgtttagaatcattaataacatgtgccctgaacatggaaattgcacattgcctgctgttgtggcattcagaaggcgcatcatggacacattcctcacggaggatcctagtctgttgaaggatgagaaggtatcatattttcctatggacaatgaagtacaatatgaagttcccatatacaaaaacttggacatggttgctcaatccattggcatgggaagtccattggaggagttgaacaaaatggaagttttggttcaaaaatgtccatcacagcaagtagctcatcaggcttccaagacaaatgtttatttctcctacaatgaattgaaagggctactcttgaattcttttcgggtttgtattctgaatatatcggaaattgagaaagctgattggctgtttcagaatagaggcgggtatgacgagaagctagtgggcttggctgctgaaatggtgatatttggagatatacatccaagcggggtattctgtccgaatgcagtagttggtcccgatggtaaaatattcaacctgtgcacctcaacccttggttgtggagatggatgtatgtggctacctactctccttattagctttggtgtttggtgcatttctagaatgcttgaagtgcttccttcggcaaagaaacctttgctttttgggaagtatagtagggttctcaatcgacttcagcattcttgaagcctgttcaacctgtctccatatgcccgtgcaccaagagcgtcccagtcgtgagactgcctgatggaagccaacgtatcagcgtggaagctgtgctggagatgctgatggaagttgaggccaccatctacggtgtgaggcacgctggagtctatggcagggagaagaaaagcctgaaatctgttctggaccgctataagctccggctctccgaggtggcatctcaggagtaggatttccttcatattagatcgacataataataataaaataaaaagctgaactctccagctatggtcacagatttctgtatgtctcttatctataagctatggtaataatgttatgctacatggtatgggcttgtgaaccgagactaataatttgacaattcctgaaattctccttgatgctcgtgctttatgatgggtggaatcatggaactgaataaaat

SEQ ID NO: 50796 - DNA, 2521 bp, Zea Mays
ggcatactaccttatatactatcgaagaaaaggggatcggaatcgaggagcttcctacactcctttagtcgaatcccaagaatgttctggatttgatatattgaccagtgtggctttctccattccagcctgtctgcggtacttaggaccaactttatcttggcctatcaccaaggctctgaggagatctacacatcctcatacaaaacaattccaacattgtgattccagcctgtctgcggtattgagaactttgtgccctgtccttgttgtctctcatgggcacctcaaaatgtttcttgtttatgaggatccttatcttgactaccatggctatatcagctgccatgaatgctacaatcattgggacactagtaactaagagggactacaagtttgctgagctcatgagactccctgacacatttcttatgttgtttgttctgctgtgctttgacttttcaatatatttgtcattcaagatattgtggtctgcaagaacttcagtagatcagaaaatatgttcacaggtcttgttggagagtggtcatggttacaaagttgggaacaaaaggaaccccctaacagatcatttacttggagagttagaggatactaccaaaacaacaggaattgggcgtgacccagttatggactctgaatgtgaaactaccttacaaaagcaagtcatggtcttcgatcagcaggatgaaacatttgacatcggagagacacccttgtccaagacatccaaggatcatttgggtcaaactgttggtaaagaaactccagtttctgaggccttacatgttgacactactgattcattgtcgttccatgattcacttttcctctctaagcatggatgtattgcaaggaatcccattcttccttatagacaagtttcaactcctaagttccattcagtcaagaatatgcttgacatgatagattatcttgctgttgaaggttttgctaatggagaagttgtaagggatgatgtttctgctgccttaagtcaacaagttgccgaattgatatccataagatgtaatgagataaacaacacagtgagattttgtaatgaatatgctagtagcatgaaatcgaaagttcaagtggtttttccttcacaccaccagtttgctgacattcttgatgacttctgggggaatttgtttgacctgcatggtaatttgacagaaaaaggaaatgccataaggttggaccttcttattgggctggatgttgaggagatcaaaagctgcccgtgctattttgatgtactacctgggggactatgtgatcctttgaagctaaatttaggtaacatggggctaccacctttgtttagaatcattaataacatgtgccctgaacatggaaattgcacattgcctgctgttgtggcattcagaaggcgcatcatggacacattcctcacggaggatcctagtctgttgaaggatgagaaggtatcatattttcctatggacaatgaagtacaatatgaagttcccatatacaaaaacttggacatggttgctcaatccattggcatgggaagtccattggaggagttgaacaaaatggaagttttggttcaaaaatgtccatcacagcaagtagctcatcaggcttccaagacaaatgtttatttctcctacaatgaattgaaagggctactcttgaattcttttcgggtttgtattctgaatatatcggaaattgagaaagctgattggctgtttcagaatagaggcgggtatgacgagaagctagtgggcttggctgctgaaatggtgatatttggagatatacatccaagcggggtattctgtccgaatgcagtagttggtcccgatggtaaaatattcaacctgtgcacctcaacccttggttgtggagatggatgtatgtggctacctactctccttattagctttggtgtttggtgcatttctagaatgcttgaagtgcttccttcggcaaagaaacctttgctttttgggaagtatagtagggttctcaatcgacttcagggcattctggatccagcattcttgaagcctgttcaacctgtctccatatgcccgtgcaccaagagcgtcccagtcgtgagactgcctgatggaagccaacgtatcagcgtggaagctgtgctggagatgctgatggaagttgaggccaccatctacggtgtgaggcacgctggagtctatggcagggagaagaaaagcctgaaatctgttctggaccgctataagctccggctctccgaggtggcatctcaggagtaggatttccttcatattagatcgacataataataataaaataaaaagctgaactctccagctatggtcacagatttctgtatgtctcttatctataagctatggtaataatgttatgctacatggtatgggcttgtgaaccgagactaataatttgacaattcctgaaattctccttgatgctcgtgctttatgatgggtggaatcatggaactgaataaaat

SEQ ID NO: 50797 - DNA, 1808 bp, Zea Mays
cgcgttcgttcctgccctctctctgtattgggagctagacgaggaccgagccatccaagagcttggccacggggacgggggaagctctcgaggctcgagggaaagagacagccccccaaaggcccaaaccctctcctcttcttcttcccttccattcgggtcgcgtccagttgctggcagccatctctcgcggtcgcggcctcgcgggcaacctcctgtcttctccccatcggatccagtgctgcggatccgcatttccgcaaggtagtcaatggcggcttccccggcggaggcgggggcacaggcgctgcccgaggcgacggaggcgaaggagaagggcaagcggggcggggtgctgaggagggtgtggcgggcgctcttcggtggccgcgaggacttcgagaagcggctgcagtacctatccaaggaggaggccgccgtgcacgcgcggatgcgccggcggacgcagttctcgcgccgcaccgtgcgaaacctcatcgtactctccgtcctcgccgagttgagcggaaagatcagaagacccttgaaaaattgagggctgagagaaaagccaagattgatgagcttaaagagagaacaaactattatcttacccaacagcttattcagaaatatgatcttgatcctgccgcaaaggctgcagcagcttcagttttggcatctaagcttggggaggacactggcttaaaagttcatgttggagaagaaccaaagctggatgctgcagtggctagaagcaatgatgttgagatagtaccatcagatggtttgagaaacaggaaacaacccaatgcaagaggaagcaggaccgggagccctactgctgataccccagcacggggaactgaatccagtctaactgctggtgcagacctggaaactgctccagctcctttggtggtagaacatcatcaaggcttaggggctagtgatggtggtggatggattgcaaagattgctgccttacttgtggcagaggacccatcacagtcatatgctttgatatgtggcaactgccatatgcataatggcttggcccgaaaggaagattatccgcatgttacctactactgcccacattgtcatgcattaaacacatcaaagcagtccatgtggcaatactcgggctccaactcagggcggtcatcccctgttgttctggatgatggtctatccacttccagttcagtacaagagactgaattgagtaacctgacacacactgcaggagctacctgaggaaggaaatgcagagaagcaagaaaaggcaagttgatggttcacagaacttctattgatgtgtgtggaactacttaatctttagacgtatatcgtcatgtgttctggtggagccacagatttagcactgttgtaaattggaaatagtgactgatatgatccctcagatacttagcacacacccaaaagaagaaactagccatggtgacatccttgagtggatgattttttgttgtcaatagagcgcgaagacttcctgctgcatgacaagagtcacaagatggtgctgaaaagctatatatgataaatgaggcaatctaacaggtcagatgtgtaacgttcatacaagatggtgtaggatataacataatatcattgcttcgttttctatttctatcatttttatatgcacacgcttgttcagagaccagaaacgtggataatttttgcgtttattttgaccttcgatctttcctattatgtttgttacttcactgattccaaattgtgtaagtttgttcagattttgatacagctaaatatgcatt

SEQ ID NO: 50798 - DNA, 1747 bp, Zea Mays
gacgaggaccgagccatccaagagcttggccacggggacgggggaagctctcgaggctcgagggaaagagacagccccccaaaggcccaaaccctctcctcttcttcttcccttccattcgggtcgcgtccagttgctggcagccatctctcgcggtcgcggcctcgcgggcaacctcctgtcttctccccatcggatccagtgctgcggatccgcatttccgcaaggccgccgtgcacgcgcggatgcgccggcggacgcagttctcgcgccgcaccgtgcgaaacctcatcgtactctccgtcctcgccgaggtgttagctgttgtttatgccatcatgatgacaagaaatgaggatctaacttggcaaatgagggcaatacgggtgctacctatgttcgttcttcctgttgtatcctctgtcatatattcaacagttgttaacttcacaagaatgcttgagcggaaagatcagaagacccttgaaaaattgagggctgagagaaaagccaagattgatgagcttaaagagagaacaaactattatcttacccaacagcttattcagaaatatgatcttgatcctgccgcaaaggctgcagcagcttcagttttggcatctaagcttggggaggacactggcttaaaagttcatgttggagaagaaccaaagctggatgctgcagtggctagaagcaatgatgttgagatagtaccatcagatggtttgagaaacaggaaacaacccaatgcaagaggaagcaggaccgggagccctactgctgataccccagcacggggaactgaatccagtctaactgctggtgcagacctggaaactgctccagctcctttggtggtagaacatcatcaaggcttaggggctagtgatggtggtggatggattgcaaagattgctgccttacttgtggcagaggacccatcacagtcatatgctttgatatgtggcaactgccatatgcataatggcttggcccgaaaggaagattatccgcatgttacctactactgcccacattgtcatgcattaaacacatcaaagcagtccatgtggcaatactcgggctccaactcagggcggtcatcccctgttgttctggatgatggtctatccacttccagttcagtacaagagactgaattgagtaacctgacacacactgcaggagctacctgaggaaggaaatgcagagaagcaagaaaaggcaagttgatggttcacagaacttctattgatgtgtgtggaactacttaatctttagacgtatatcgtcatgtgttctggtggagccacagatttagcactgttgtaaattggaaatagtgactgatatgatccctcagatacttagcacacacccaaaagaagaaactagccatggtgacatccttgagtggatgattttttgttgtcaatagagcgcgaagacttcctgctgcatgacaagagtcacaagatggtgctgaaaagctatatatgataaatgaggcaatctaacaggtcagatgtgtaacgttcatacaagatggtgtaggatataacataatatcattgcttcgttttctatttctatcatttttatatgcacacgcttgttcagagaccagaaacgtggataatttttgcgtttattttgaccttcgatctttcctattatgtttgttacttcactgattccaaattgtgtaagtttgttcagattttgatacagctaaatatgcatt

SEQ ID NO: 50799 - DNA, 1889 bp, Zea Mays
gacgaggaccgagccatccaagagcttggccacggggacgggggaagctctcgaggctcgagggaaagagacagccccccaaaggcccaaaccctctcctcttcttcttcccttccattcgggtcgcgtccagttgctggcagccatctctcgcggtcgcggcctcgcgggcaacctcctgtcttctccccatcggatccagtgctgcggatccgcatttccgcaaggtagtcaatggcggcttccccggcggaggcgggggcacaggcgctgcccgaggcgacggaggcgaaggagaagggcaagcggggcggggtgctgaggagggtgtggcgggcgctcttcggtggccgcgaggacttcgagaagcggctgcagtacctatccaaggaggaggccgccgtgcacgcgcggatgcgccggcggacgcagttctcgcgccgcaccgtgcgaaacctcatcgtactctccgtcctcgccgaggtgttagctgttgtttatgccatcatgatgacaagaaatgaggatctaacttggcaaatgagggcaatacgggtgctacctatgttcgttcttcctgttgtatcctctgtcatatattcaacagttgttaacttcacaagaatgcttgagcggaaagatcagaagacccttgaaaaattgagggctgagagaaaagccaagattgatgagcttaaagagagaacaaactattatcttacccaacagcttattcaggctgcagcagcttcagttttggcatctaagcttggggaggacactggcttaaaagttcatgttggagaagaaccaaagctggatgctgcagtggctagaagcaatgatgttgagatagtaccatcagatggtttgagaaacaggaaacaacccaatgcaagaggaagcaggaccgggagccctactgctgataccccagcacggggaactgaatccagtctaactgctggtgcagacctggaaactgctccagctcctttggtggtagaacatcatcaaggcttaggggctagtgatggtggtggatggattgcaaagattgctgccttacttgtggcagaggacccatcacagtcatatgctttgatatgtggcaactgccatatgcataatggcttggcccgaaaggaagattatccgcatgttacctactactgcccacattgtcatgcattaaacacatcaaagcagtccatgtggcaatactcgggctccaactcagggcggtcatcccctgttgttctggatgatggtctatccacttccagttcagtacaagagactgaattgagtaacctgacacacactgcaggagctacctgaggaaggaaatgcagagaagcaagaaaaggcaagttgatggttcacagaacttctattgatgtgtgtggaactacttaatctttagacgtatatcgtcatgtgttctggtggagccacagatttagcactgttgtaaattggaaatagtgactgatatgatccctcagatacttagcacacacccaaaagaagaaactagccatggtgacatccttgagtggatgattttttgttgtcaatagagcgcgaagacttcctgctgcatgacaagagtcacaagatggtgctgaaaagctatatatgataaatgaggcaatctaacaggtcagatgtgtaacgttcatacaagatggtgtaggatataacataatatcattgcttcgttttctatttctatcatttttatatgcacacgcttgttcagagaccagaaacgtggataatttttgcgtttattttgaccttcgatctttcctattatgtttgttacttcactgattccaaattgtgtaagtttgttcagattttgatacagctaaatatgcatt

SEQ ID NO: 50800 - DNA, 1925 bp, Zea Mays
gacgaggaccgagccatccaagagcttggccacggggacgggggaagctctcgaggctcgagggaaagagacagccccccaaaggcccaaaccctctcctcttcttcttcccttccattcgggtcgcgtccagttgctggcagccatctctcgcggtcgcggcctcgcgggcaacctcctgtcttctccccatcggatccagtgctgcggatccgcatttccgcaaggccgccgtgcacgcgcggatgcgccggcggacgcagttctcgcgccgcaccgtgcgaaacctcatcgtactctccgtcctcgccgaggtgttagctgttgtttatgccatcatgatgacaagaaatgaggatctaacttggcaaatgagggcaatacgggtgctacctatgttcgttcttcctgttgtatcctctgtcatatattcaacagttgttaacttcacaagaatgcttgagcggaaagatcagaagacccttgaaaaattgagggctgagagaaaagccaagattgatgagcttaaagagagaacaaactattatcttacccaacagcttattcagaaatatgatcttgatcctgccgcaaaggctgcagcagcttcagttttggcatctaagcttggggaggacactggcttaaaagttcatgttggagaagaaccaaagctggatgctgcagtggctagaagcaatgatgttgagatagtaccatcagatggtttgagaaacaggaaacaacccaatgcaagaggaagcaggaccgggagccctactgctgataccccagcacggggaactgaatccagtctaactgctggtgcagacctggaaactgctccagctcctttggtggtagaacatcatcaaggcttaggggctagtgatggtggtggatggattgcaaagattgctgccttacttgtggcagaggacccatcacagtcatatgctttgatatgtggcaactgccatatgcataatggcttggcccgaaaggaagattatccgcatgttacctactactgcccacattgtcatgcattaaacacatcaaagcagtccatgtggcaatactcgggctccaactcagggcggtcatcccctgttgttctggatgatggtctatccacttccagttcagtacaagagactgaattgagtaacctgacacacactgcaggagctacctgaggaaggaaatgcagagaagcaagaaaaggcaagttgatggttcacagaacttctattgatgtgtgtggaactacttaatctttagacgtatatcgtcatgtgttctggtggagccacagatttagcactgttgtaaattggaaatagtgactgatatgatccctcagatacttagcacacacccaaaagaagaaactagccatggtgacatccttgagtggatgattttttgttgtcaatagagcgcgaagacttcctgctgcatgacaagagtcacaagatggtgctgaaaagctatatatgataaatgaggcaatctaacagaagatatagcagagctgcagaaggcactgccaggatcaagggatggagttgaggggatgcgtctgccggatcaagagctcggcgcttgagcttctgtccatggaggaggatctgacgactgatctggatgatgacctatgggatctggtcatgagggatctccagctaaaggccagcttcctgtacattgacctgtaccgtttgattgcctgcaagtgcaacgaatgagaggagcgcagggaggagatcacgcttctcgccaacgatatcttctactccatggatgagctaggtgatactgtggcgaaccggagcgtctccgtcgtcaagtcgagctacggtgagggcgtgaggcgactcaggcgctccgcctccgcgaggtggtcgccgccggcagcagcc

SEQ ID NO: 50801 - DNA, 1740 bp, Zea Mays
ctactactctataaggacgcaacgagggcgtccaccacgcttcaccacggctccgcctacatccgcgacccgtccgcgtccgcgttgccattctcgccggcatcgtcgcgcccccaccccatacgagccgcccccgcgacgctgaccccactgccgtccagcaggatctctcccttcccccgccccacgcctagcaggatctctcccttccctcgcgcgtccgagacgacatggacgaaggtgggaggctcccaacgcatccccgccgacctcaacgccgacggtcctttcctaacccgcagcccccggccacagtctctctcttccggtccagtgggggctgctagcttccaggaatattggagatgtgccttcaacactctagggctcgattgcctccagataagcaacttgctgcagaaaaaagttttgccttgtattgcaagccagttgaattgtacaatattatccagaggcgagctattaaaaatccaccttttgttcaaagatcccttctatataagatacaggcaaggagaaaaaagaggctccaaccgcgcctcctcaagttacttcgcagcaatgccttcaaggcgaagcccgcgctcatcaccctcatcggcgcctgcgcggccatgggcgccaatgccgaagtcaccgcctccatcacgtgcctccgcgatgcaatcgctagcgatgactgggcagcgaggaaggccgcggcggaggcgcttgctgcattggccctagagcacacggatcttctcacgacctacaaatcctcttgcgtcaccttcttcgaggccagaaggtttgacaaggtcaaggttgtgcaagagtcgatgaaccagatgattgaggcggggaaggagatcccaggtgctgaagaggacgagtgctcctcgctctgccaccagcgtcccagtcacaacgaagatcttctcttacagggagtgcaagtgatgggcgatatccagctgcttcgctgggctcaaactcagttcctttagcaacaaggaagagcatattatctgtaagcagatcatctctgtctgacgtgtctaccagtgtaattttctggaccttctccagtctattgtgtagttgcaaaagaatatgtgaattaccagtcagtggagattgagagggattccccggctagaagctcaagcggattaggaagtggctcatcttcatccagtgtaaccagaggatgacaagcctactacaagagttggtcctaagttataaaataagcctaactttttttacagagtacacaaatgtcaggttttcctgtttgggctagcaccacaaatggaaacaaaaaattggactcagcccatcgtgaagatatgaaggaagagcactgtcccattattctgtttttcgaccatgtttctagcatgaacatgccagcatggtgccatcaacaacttccctgttagctcacggtacaccatgctccagcctgtcccctggttatcactgtggtgctgattgtgttcccaagatgcactgaaatagagcaagatcaaatgaggatgaagttactgtgtagagatttttgttccccctttgtagcagcacccatggatttttatttgcacagaattactctcttttactggttcattcaataattcaatttgttgcttggaaaccactgtataataaatacaaatgctatggtatgattttgtgaattctgatcgctccttttcttgtaagcatgaattc

SEQ ID NO: 50802 - DNA, 1634 bp, Zea Mays
cacgcttcaccacggctccgcctacatccgcgacccgtccgcgtccgcgttgccattctcgccggcatcgtcgcgcccccaccccatacgagccgcccccgcgacgctgaccccactgccgtccagcaggatctctcccttcccccgccccacgcctagcaggatctctcccttccctcgcgcgtccgagacgacatggacgaaggtgggaggctcccaacgcatccccgccgacctcaacgccgacggtcctttcctaacccgcagcccccggccacagtctctctcttccggtccagtgggggctgctagcttccaggaatattggagatgtgccttcaacactctagggctcgattgcctccagataagcaacttgctgcagaaaaaagttttgccttgtattgcaagccagttgaattgtacaatattatccagaggcgagctattaaaaatccaccttttgttcaaagatcccttctatataagatacaggcaaggagaaaaaagaggctccaaccgcgcctcctcaagttacttcgcagcaatgccttcaaggcgaagcccgcgctcatcaccctcatcggcgcctgcgcggccatgggcgccaatgccgaagtcaccgcctccatcacgtgcctccgcgatgcaatcgctagcgatgactgggcagcgaggaaggccgcggcggaggcgcttgctgcattggccctagagcacacggatcttctcacgacctacaaatcctcttgcgtcaccttcttcgaggccagaaggtttgacaaggtcaaggttgtgcaagagtcgatgaaccagatgattgaggcggggaaggagatcccaggtgctgaagaggacgagtgctcctcgctctgccaccagcgtcccagtcacaacgaagatcttctcttacagggagtgcaagtgatgggcgatatccagctgcttcgctgggctcaaactcagttcctttagcaacaaggaagagcatattatctgtaagcagatcatctctgtctgacgtgtctaccagtgtaattttctggaccttctccagtctattgtgtagttgcaaaagaatatgtgaattaccagtcagtggagattgagagggattccccggctagaagctcaagcggattaggaagtggctcatcttcatccagtgagtacacaaatgtcaggttttcctgtttgggctagcaccacaaatggaaacaaaaaattggactcagcccatcgtgaagatatgaaggaagagcactgtcccattattctgtttttcgaccatgtttctagcatgaacatgccagcatggtgccatcaacaacttccctgttagctcacggtacaccatgctccagcctgtcccctggttatcactgtggtgctgattgtgttcccaagatgcactgaaatagagcaagatcaaatgaggatgaagttactgtgtagagatttttgttccccctttgtagcagcacccatggatttttatttgcacagaattactctcttttactggttcattcaataattcaatttgttgcttggaaaccactgtataataaatacaaatgctatggtatgattttgtgaattctgatcgctccttttcttgtaagcatgaattc

SEQ ID NO: 50803 - DNA, 2186 bp, Zea Mays
cacggctccgcctacatccgcgacccgtccgcgtccgcgttgccattctcgccggcatcgtcgcgcccccaccccatacgagccgcccccgcgacgctgaccccactgccgtccagcaggatctctcccttcccccgccccacgcctagcaggatctctcccttccctcgcgcgtccgagacgacatggacgaaggtgggaggctcccaacgcatccccgccgacctcaacgccgacggtcctttcctaacccgcagcccccggccacagtctctctcttccggtccagtgggggctgctagcttccaggaatattggagatgtgccttcaacactctagggctcgattgcctccagataagcaacttgctgcagaaaaaagttttgccttgtattgcaagccagttgaattgtacaatattatccagaggcgagctattaaaaatccaccttttgttcaaagatcccttctatataagatacaggcaaggagaaaaaagaggctccaaccgcgcctcctcaagttacttcgcagcaatgccttcaaggcgaagcccgcgctcatcaccctcatcggcgcctgcgcggccatgggcgccaatgccgaagtcaccgcctccatcacgtgcctccgcgatgcaatcgctagcgatgactgggcagcgaggaaggccgcggcggaggcgcttgctgcattggccctagagcacacggatcttctcacgacctacaaatcctcttgcgtcaccttcttcgaggccagaaggtttgacaaggtcaaggttgtgcaagagtcgatgaaccagatgattgaggcggggaaggagatcccaggtgctgaagaggacgagtgctcctcgctctgccaccagcgtcccagtcacaacgaagatcttctcttacagggagtgcaagtgatgggcgatatccagctgcttcgctgggctcaaactcagttcctttagcaacaaggaagagcatattatctgtaagcagatcatctctgtctgacgtgtctaccagtgtaattttctggaccttctccaggtacacctcgtgtagcgattttctgactttcctgagtgaggcggcgctattggctttggtaggtctttctcatgatcatgttgtttgggtctgaaaatgctctgagtcgtagtctcgtaatgttatagtaacaataacatcatttttgtgaggatttgtctgaaaggagaacaactcaacatcaatcttggttatcaaccaagagtctaaactcctttgtcatgtgttatcgtttcaatcctgaactatgcattgttgtgggtcttgaagatctggttacaagcctacaacttaactgatatatatcacatgatgatgataatatgtatattcatggtgacacctttgctctttgaacatgttgtagtctattgtgtagttgcaaaagaatatgtgaattaccagtcagtggagattgagagggattccccggctagaagctcaagcggattaggaagtggctcatcttcatccagtggtacagtacagtggagcaaatgagtatctatcaccattaatgctgagttatcgatcaagtagctcgttaattcgttaaaattccttgcagattctgactctgatgttacagtttattttttcagtaaccagaggatgacaagcctactacaagagttggtcctaagttataaaataagcctaactttttttacagagtacacaaatgtcaggttttcctgtttgggctagcaccacaaatggaaacaaaaaattggactcagcccatcgtgaagatatgaaggaagagcactgtcccattattctgtttttcgaccatgtttctagcatgaacatgccagcatggtgccatcaacaacttccctgttagctcacggtacaccatgctccagcctgtcccctggttatcactgtggtgctgattgtgttcccaagatgcactgaaatagagcaagatcaaatgaggatgaagttactgtgtagagatttttgttccccctttgtagcagcacccatggatttttatttgcacagaattactctcttttactggttcattcaataattcaatttgttgcttggaaaccactgtataataaatacaaatgctatggtatgattttgtgaattctgatcgctccttttcttgtaagcatgaattc

SEQ ID NO: 50804 - DNA, 1889 bp, Zea Mays
cctacatccgcgacccgtccgcgtccgcgttgccattctcgccggcatcgtcgcgcccccaccccatacgagccgcccccgcgacgctgaccccactgccgtccagcaggatctctcccttcccccgccccacgcctagcaggatctctcccttccctcgcgcgtccgagacgacatggacgaaggtgggaggctcccaacgcatccccgccgacctcaacgccgacggtcctttcctaacccgcagcccccggccacagtctctctcttccggtccagtgggggctgctagcttccaggaatattggagatgtgccttcaacactctagggctcgattgcctccagataagcaacttgctgcagaaaaaagttttgccttgtattgcaagccagttgaattgtacaatattatccagaggcgagctattaaaaatccaccttttgttcaaagatcccttctatataagatacaggcaaggagaaaaaagaggctccaaccgcgcctcctcaagttacttcgcagcaatgccttcaaggcgaagcccgcgctcatcaccctcatcggcgcctgcgcggccatgggcgccaatgccgaagtcaccgcctccatcacgtgcctccgcgatgcaatcgctagcgatgactgggcagcgaggaaggccgcggcggaggcgcttgctgcattggccctagagcacacggatcttctcacgacctacaaatcctcttgcgtcaccttcttcgaggccagaaggtttgacaaggtcaaggttgtgcaagagtcgatgaaccagatgattgaggcggggaaggagatcccaggtgctgaagaggacgagtgctcctcgctctgccaccagcgtcccagtcacaacgaagatcttctcttacagggagtgcaagtgatgggcgatatccagctgcttcgctgggctcaaactcagttcctttagcaacaaggaagagcatattatctgtaagcagatcatctctgtctgacgtgtctaccagtgtaattttctggaccttctccagttgcaaaagaatatgtgaattaccagtcagtggagattgagagggattccccggctagaagctcaagcggattaggaagtggctcatcttcatccagtggtacagtacagtggagcaaatgagtatctatcaccattaatgctgagttatcgatcaagtagctcgttaattcgttaaaattccttgcagattctgactctgatgttacagtttattttttcagtaaccagaggatgacaagcctactacaagagttggtcctaagttataaaataagcctaactttttttacagagtacacaaatgtcaggttttcctgtttgggctagcaccacaaatggaaacaaaaaattggactcagcccatcgtgaagatatgaaggaagagcactgtcccattattctgtttttcggtaattaaagcatcatctccattcttggttgttcccatttttctattatttactaagtagcttatttggctaatgttaaaaactggaagaagaccatgtttctagcatgaacatgccagcatggtgccatcaacaacttccctgttagctcacggtacaccatgctccagcctgtcccctggttatcactgtggtgctgattgtgttcccaagatgcactgaaatagagcaagatcaaatgaggatgaagttactgtgtagagatttttgttccccctttgtagcagcacccatggatttttatttgcacagaattactctcttttactggttcattcaataattcaatttgttgcttggaaaccactgtataataaatacaaatgctatggtatgattttgtgaattctgatcgctccttttcttgtaagcatgaattc

SEQ ID NO: 50805 - DNA, 3582 bp, Zea Mays
cctacatccgcgacccgtccgcgtccgcgttgccattctcgccggcatcgtcgcgcccccaccccatacgagccgcccccgcgacgctgaccccactgccgtccagcaggatctctcccttcccccgccccacgcctagcaggatctctcccttccctcgcgcgtccgagacgacatggacgaaggtgggaggctcccaacgcatccccgccgacctcaacgccgacggtcctttcctaacccgcagcccccggccacagtctctctcttccggtccagtgggggctgctagcttccaggaatattggagatgtgccttcaacactctagggctcgattgcctccagataagcaacttgctgcagaaaaaagttttgccttgtattgcaagccagttgaattgtacaatattatccagaggcgagctattaaaaatccaccttttgttcaaagatcccttctatataagatacaggcaaggagaaaaaagaggctccaaccgcgcctcctcaagttacttcgcagcaatgccttcaaggcgaagcccgcgctcatcaccctcatcggcgcctgcgcggccatgggcgccaatgccgaagtcaccgcctccatcacgtgcctccgcgatgcaatcgctagcgatgactgggcagcgaggaaggccgcggcggaggcgcttgctgcattggccctagagcacacggatcttctcacgacctacaaatcctcttgcgtcaccttcttcgaggccagaaggtttgacaaggtcaaggttgtgcaagagtcgatgaaccagatgattgaggcggggaaggagatcccaggtgctgaagaggacgagtgctcctcgctctgccaccagcgtcccagtcacaacgaagatcttctcttacagggagtgcaagtgatgggcgatatccagctgcttcgctgggctcaaactcagttcctttagcaacaaggaagagcatattatctgtaagcagatcatctctgtctgacgtgtctaccagtgtaattttctggaccttctccaggtaattttcctttagtgtgtttattgttactgtatatttttacagttctcttgcgagacgtagtagtatagggcttgtagtcgttaccttttcttccagaaataagtaatcattaacttctctgctgattactaaacacaagagaaaacattctgtaactgtaagtccacgttggaagtggaagtagttagtttttggatacttggttgcaacttgagctgtggcttcaatgctggagcagattatctggtgaagctgaggttgttttgagaaaacgtttggttgaacagcttctgatatctcttataaatagctgagaggggcaatgtccaagatgcccttgggtattgtaaaatttgattatatggttgcagatgttcttttatatttgagtacttttcaaattttaaaataaaaattatcaacaaccaataactttgccaagaaacgagcagataaggaattggggttatggcggattctttctaatttcttgtgaactttaggggtgaaaatgtactttgtgtggtgggccgtgggcctgtccatgtagcgcgtggaagctcctttttccaactccaccatgcacctgtccctcgtgaaagcgcactttatggtttatggagctccatgaatggagctgctacagcagcaccttcttggtacaaggagctaaaaacagctccaggagctgtaatggaatccccaccaaaggggggcatatgttggtcgtaagaagagggtactattgactcctgtttgagaatactgaaaagggactgctacttaaaatttgatgtttccatccagcattaacttttcagtatcagtgacacgatgggtcagatttgaacatgattattgcaagccaagacattgtcaattacatatagaagcacatgtcatgttgctttccatgttccccgcataatattacattgctaaacttaactatgcactaatgttttagtagtgacttgtaggtatacatattaccaccttgttgagtttgctgcaccagtcatgtgcaattaacgttccgtatcatcacttgtaaaaaaaaggtttatgttgggggcatctcctctgatgtctcttatgatgatctcaaaaactctgccagtcttttggacaagtagtggaagtgattactcctagatttctttgtgctagcttttgtttttgctttcttctaaattcagagttttttcttttcttttctgtaggttgaactcatagctgatcttcatgttatccatgctagcaatgtattgcgtttattcatatttctcttttatagtagggtgggtatatgtgataaagcatgtattcgataaagcagatctttccaagtagggaactaaattgaaaattgtattttatgaactttatgtttagtttcatggatcagtttgaggcatagctaagtataatttatatgattacactcacatccacttggtgtttttaaaatgtttgcaacggtccactattgagttcgaaatactgaacctcaaactccttgtcaaggtacacctcgtgtagcgattttctgactttcctgagtgaggcggcgctattggctttggtaggtctttctcatgatcatgttgtttgggtctgaaaatgctctgagtcgtagtctcgtaatgttatagtaacaataacatcatttttgtgaggatttgtctgaaaggagaacaactcaacatcaatcttggttatcaaccaagagtctaaactcctttgtcatgtgttatcgtttcaatcctgaactatgcattgttgtgggtcttgaagatctggttacaagcctacaacttaactgatatatatcacatgatgatgataatatgtatattcatggtgacacctttgctctttgaacatgttgtagtctattgtgtagttgcaaaagaatatgtgaattaccagtcagtggagattgagagggattccccggctagaagctcaagcggattaggaagtggctcatcttcatccagtgtaaccagaggatgacaagcctactacaagagttggtcctaagttataaaataagcctaactttttttacagagtacacaaatgtcaggttttcctgtttgggctagcaccacaaatggaaacaaaaaattggactcagcccatcgtgaagatatgaaggaagagcactgtcccattattctgtttttcgaccatgtttctagcatgaacatgccagcatggtgccatcaacaacttccctgttagctcacggtacaccatgctccagcctgtcccctggttatcactgtggtgctgattgtgttcccaagatgcactgaaatagagcaagatcaaatgaggatgaagttactgtgtagagatttttgttccccctttgtagcagcacccatggatttttatttgcacagaattactctcttttactggttcattcaataattcaatttgttgcttggaaaccactgtataataaatacaaatgctatggtatgattttgtgaattctgatcgctccttttcttgtaagcatgaattc

SEQ ID NO: 50806 - DNA, 1734 bp, Zea Mays
gtccgcgttgccattctcgccggcatcgtcgcgcccccaccccatacgagccgcccccgcgacgctgaccccactgccgtccagcaggatctctcccttcccccgccccacgcctagcaggatctctcccttccctcgcgcgtccgagacgacatggacgaaggtgggaggctcccaacgcatccccgccgacctcaacgccgacggtcctttcctaacccgcagcccccggccacagtctctctcttccggtccagtgggggctgctagcttccaggaatattggagatgtgccttcaacactctagggctcgattgcctccagataagcaacttgctgcagaaaaaagttttgccttgtattgcaagccagttgaattgtacaatattatccagaggcgagctattaaaaatccaccttttgttcaaagatcccttctatataagatacaggcaaggagaaaaaagaggctccaaccgcgcctcctcaagttacttcgcagcaatgccttcaaggcgaagcccgcgctcatcaccctcatcggcgcctgcgcggccatgggcgccaatgccgaagtcaccgcctccatcacgtgcctccgcgatgcaatcgctagcgatgactgggcagcgaggaaggccgcggcggaggcgcttgctgcattggccctagagcacacggatcttctcacgacctacaaatcctcttgcgtcaccttcttcgaggccagaaggtttgacaaggtcaaggttgtgcaagagtcgatgaaccagatgattgaggcggggaaggagatcccaggtgctgaagaggacgagtgctcctcgctctgccaccagcgtcccagtcacaacgaagatcttctcttacagggagtgcaagtgatgggcgatatccagctgcttcgctgggctcaaactcagttcctttagcaacaaggaagagcatattatctgtaagcagatcatctctgtctgacgtgtctaccagtgtaattttctggaccttctccaggtacacctcgtgtagcgattttctgactttcctgagtgaggcggcgctattggctttgtctattgtgtagttgcaaaagaatatgtgaattaccagtcagtggagattgagagggattccccggctagaagctcaagcggattaggaagtggctcatcttcatccagtgtttattttttcagtaaccagaggatgacaagcctactacaagagttggtcctaagttataaaataagcctaactttttttacagagtacacaaatgtcaggttttcctgtttgggctagcaccacaaatggaaacaaaaaattggactcagcccatcgtgaagatatgaaggaagagcactgtcccattattctgtttttcgaccatgtttctagcatgaacatgccagcatggtgccatcaacaacttccctgttagctcacggtacaccatgctccagcctgtcccctggttatcactgtggtgctgattgtgttcccaagatgcactgaaatagagcaagatcaaatgaggatgaagttactgtgtagagatttttgttccccctttgtagcagcacccatggatttttatttgcacagaattactctcttttactggttcattcaataattcaatttgttgcttggaaaccactgtataataaatacaaatgctatggtatgattttgtgaattctgatcgctccttttcttgtaagcatgaattc

SEQ ID NO: 50807 - DNA, 1665 bp, Zea Mays
tctcgccggcatcgtcgcgcccccaccccatacgagccgcccccgcgacgctgaccccactgccgtccagcaggatctctcccttcccccgccccacgcctagcaggatctctcccttccctcgcgcgtccgagacgacatggacgaaggtgggaggctcccaacgcatccccgccgacctcaacgccgacggtcctttcctaacccgcagcccccggccacagtctctctcttccggtccagtgggggctgctagcttccaggaatattggagatgtgccttcaacactctagggctcgattgcctccagataagcaacttgctgcagaaaaaagttttgccttgtattgcaagccagttgaattgtacaatattatccagaggcgagctattaaaaatccaccttttgttcaaagatcccttctatataagatacaggcaaggagaaaaaagaggctccaaccgcgcctcctcaagttacttcgcagcaatgccttcaaggcgaagcccgcgctcatcaccctcatcggcgcctgcgcggccatgggcgccaatgccgaagtcaccgcctccatcacgtgcctccgcgatgcaatcgctagcgatgactgggcagcgaggaaggccgcggcggaggcgcttgctgcattggccctagagcacacggatcttctcacgacctacaaatcctcttgcgtcaccttcttcgaggccagaaggtttgacaaggtcaaggttgtgcaagagtcgatgaaccagatgattgaggcggggaaggagatcccaggtgctgaagaggacgagtgctcctcgctctgccaccagcgtcccagtcacaacgaagatcttctcttacagggagtgcaagtgatgggcgatatccagctgcttcgctgggctcaaactcagttcctttagcaacaaggaagagcatattatctgtaagcagatcatctctgtctgacgtgtctaccagtgtaattttctggaccttctccagtctattgtgtagttgcaaaagaatatgtgaattaccagtcagtggagattgagagggattccccggctagaagctcaagcggattaggaagtggctcatcttcatccagtgtttattttttcagtaaccagaggatgacaagcctactacaagagttggtcctaagttataaaataagcctaactttttttacagagtacacaaatgtcaggttttcctgtttgggctagcaccacaaatggaaacaaaaaattggactcagcccatcgtgaagatatgaaggaagagcactgtcccattattctgtttttcgaagaccatgtttctagcatgaacatgccagcatggtgccatcaacaacttccctgttagctcacggtacaccatgctccagcctgtcccctggttatcactgtggtgctgattgtgttcccaagatgcactgaaatagagcaagatcaaatgaggatgaagttactgtgtagagatttttgttccccctttgtagcagcacccatggatttttatttgcacagaattactctcttttactggttcattcaataattcaatttgttgcttggaaaccactgtataataaatacaaatgctatggtatgattttgtgaattctgatcgctccttttcttgtaagcatgaattc

SEQ ID NO: 50808 - DNA, 1714 bp, Zea Mays
catcgtcgcgcccccaccccatacgagccgcccccgcgacgctgaccccactgccgtccagcaggatctctcccttcccccgccccacgcctagcaggatctctcccttccctcgcgcgtccgagacgacatggacgaaggtgggaggctcccaacgcatccccgccgacctcaacgccgacggtcctttcctaacccgcagcccccggccacagtctctctcttccggtccagtgggggctgctagcttccaggaatattggagatgtgccttcaacactctagggctcgattgcctccagataagcaacttgctgcagaaaaaagttttgccttgtattgcaagccagttgaattgtacaatattatccagaggcgagctattaaaaatccaccttttgttcaaagatcccttctatataagatacaggcaaggagaaaaaagaggctccaaccgcgcctcctcaagttacttcgcagcaatgccttcaaggcgaagcccgcgctcatcaccctcatcggcgcctgcgcggccatgggcgccaatgccgaagtcaccgcctccatcacgtgcctccgcgatgcaatcgctagcgatgactgggcagcgaggaaggccgcggcggaggcgcttgctgcattggccctagagcacacggatcttctcacgacctacaaatcctcttgcgtcaccttcttcgaggccagaaggtttgacaaggtcaaggttgtgcaagagtcgatgaaccagatgattgaggcggggaaggagatcccaggtgctgaagaggacgagtgctcctcgctctgccaccagcgtcccagtcacaacgaagatcttctcttacagggagtgcaagtgatgggcgatatccagctgcttcgctgggctcaaactcagttcctttagcaacaaggaagagcatattatctgtaagcagatcatctctgtctgacgtgtctaccagtgtaattttctggaccttctccaggtacacctcgtgtagcgattttctgactttcctgagtgaggcggcgctattggctttgtctattgtgtagttgcaaaagaatatgtgaattaccagtcagtggagattgagagggattccccggctagaagctcaagcggattaggaagtggctcatcttcatccagtgtttattttttcagtaaccagaggatgacaagcctactacaagagttggtcctaagttataaaataagcctaactttttttacagagtacacaaatgtcaggttttcctgtttgggctagcaccacaaatggaaacaaaaaattggactcagcccatcgtgaagatatgaaggaagagcactgtcccattattctgtttttcgaagaccatgtttctagcatgaacatgccagcatggtgccatcaacaacttccctgttagctcacggtacaccatgctccagcctgtcccctggttatcactgtggtgctgattgtgttcccaagatgcactgaaatagagcaagatcaaatgaggatgaagttactgtgtagagatttttgttccccctttgtagcagcacccatggatttttatttgcacagaattactctcttttactggttcattcaataattcaatttgttgcttggaaaccactgtataataaatacaaatgctatggtatgattttgtgaattctgatcgctccttttcttgtaagcatgaattc

SEQ ID NO: 50809 - DNA, 1620 bp, Zea Mays
catcgtcgcgcccccaccccatacgagccgcccccgcgacgctgaccccactgccgtccagcaggatctctcccttcccccgccccacgcctagcaggatctctcccttccctcgcgcgtccgagacgacatggacgaaggtgggaggctcccaacgcatccccgccgacctcaacgccgacggtcctttcctaacccgcagcccccggccacagtctctctcttccggtccagtgggggctgctagcttccaggaatattggagatgtgccttcaacactctagggctcgattgcctccagataagcaacttgctgcagaaaaaagttttgccttgtattgcaagccagttgaattgtacaatattatccagaggcgagctattaaaaatccaccttttgttcaaagatcccttctatataagatacaggcaaggagaaaaaagaggctccaaccgcgcctcctcaagttacttcgcagcaatgccttcaaggcgaagcccgcgctcatcaccctcatcggcgcctgcgcggccatgggcgccaatgccgaagtcaccgcctccatcacgtgcctccgcgatgcaatcgctagcgatgactgggcagcgaggaaggccgcggcggaggcgcttgctgcattggccctagagcacacggatcttctcacgacctacaaatcctcttgcgtcaccttcttcgaggccagaaggtttgacaaggtcaaggttgtgcaagagtcgatgaaccagatgattgaggcggggaaggagatcccaggtgctgaagaggacgagtgctcctcgctctgccaccagcgtcccagtcacaacgaagatcttctcttacagggagtgcaagtgatgggcgatatccagctgcttcgctgggctcaaactcagttcctttagcaacaaggaagagcatattatctgtaagcagatcatctctgtctgacgtgtctaccagttctattgtgtagttgcaaaagaatatgtgaattaccagtcagtggagattgagagggattccccggctagaagctcaagcggattaggaagtggctcatcttcatccagtgtaaccagaggatgacaagcctactacaagagttggtcctaagttataaaataagcctaactttttttacagagtacacaaatgtcaggttttcctgtttgggctagcaccacaaatggaaacaaaaaattggactcagcccatcgtgaagatatgaaggaagagcactgtcccattattctgtttttcgaagaccatgtttctagcatgaacatgccagcatggtgccatcaacaacttccctgttagctcacggtacaccatgctccagcctgtcccctggttatcactgtggtgctgattgtgttcccaagatgcactgaaatagagcaagatcaaatgaggatgaagttactgtgtagagatttttgttccccctttgtagcagcacccatggatttttatttgcacagaattactctcttttactggttcattcaataattcaatttgttgcttggaaaccactgtataataaatacaaatgctatggtatgattttgtgaattctgatcgctccttttcttgtaagcatgaattc

SEQ ID NO: 50810 - DNA, 1677 bp, Zea Mays
catcgtcgcgcccccaccccatacgagccgcccccgcgacgctgaccccactgccgtccagcaggatctctcccttcccccgccccacgcctagcaggatctctcccttccctcgcgcgtccgagacgacatggacgaaggtgggaggctcccaacgcatccccgccgacctcaacgccgacggtcctttcctaacccgcagcccccggccacagtctctctcttccggtccagtgggggctgctagcttccaggaatattggagatgtgccttcaacactctagggctcgattgcctccagataagcaacttgctgcagaaaaaagttttgccttgtattgcaagccagttgaattgtacaatattatccagaggcgagctattaaaaatccaccttttgttcaaagatcccttctatataagatacaggcaaggagaaaaaagaggctccaaccgcgcctcctcaagttacttcgcagcaatgccttcaaggcgaagcccgcgctcatcaccctcatcggcgcctgcgcggccatgggcgccaatgccgaagtcaccgcctccatcacgtgcctccgcgatgcaatcgctagcgatgactgggcagcgaggaaggccgcggcggaggcgcttgctgcattggccctagagcacacggatcttctcacgacctacaaatcctcttgcgtcaccttcttcgaggccagaaggtttgacaaggtcaaggttgtgcaagagtcgatgaaccagatgattgaggcggggaaggagatcccaggtgctgaagaggacgagtgctcctcgctctgccaccagcgtcccagtcacaacgaagatcttctcttacagggagtgcaagtgatgggcgatatccagctgcttcgctgggctcaaactcagttcctttagcaacaaggaagagcatattatctgtaagcagatcatctctgtctgacgtgtctaccagtgtaattttctggaccttctccagtctattgtgtagttgcaaaagaatatgtgaattaccagtcagtggagattgagagggattccccggctagaagctcaagcggattaggaagtggctcatcttcatccagtgattctgactctgatgttacagtttattttttcagtaaccagaggatgacaagcctactacaagagttggtcctaagttataaaataagcctaactttttttacagagtacacaaatgtcaggttttcctgtttgggctagcaccacaaatggaaacaaaaaattggactcagcccatcgtgaagatatgaaggaagagcactgtcccattattctgtttttcgaagaccatgtttctagcatgaacatgccagcatggtgccatcaacaacttccctgttagctcacggtacaccatgctccagcctgtcccctggttatcactgtggtgctgattgtgttcccaagatgcactgaaatagagcaagatcaaatgaggatgaagttactgtgtagagatttttgttccccctttgtagcagcacccatggatttttatttgcacagaattactctcttttactggttcattcaataattcaatttgttgcttggaaaccactgtataataaatacaaatgctatggtatgattttgtgaattctgatcgctccttttcttgtaagcatgaattc

SEQ ID NO: 50811 - DNA, 1976 bp, Zea Mays
catcgtcgcgcccccaccccatacgagccgcccccgcgacgctgaccccactgccgtccagcaggatctctcccttcccccgccccacgcctagcaggatctctcccttccctcgcgcgtccgagacgacatggacgaaggtgggaggctcccaacgcatccccgccgacctcaacgccgacggtcctttcctaacccgcagcccccggccacagtctctctcttccggtccagtgggggctgctagcttccaggaatattggagatgtgccttcaacactctagggctcgattgcctccagataagcaacttgctgcagaaaaaagttttgccttgtattgcaagccagttgaattgtacaatattatccagaggcgagctattaaaaatccaccttttgttcaaagatcccttctatataagatacaggcaaggagaaaaaagaggctccaaccgcgcctcctcaagttacttcgcagcaatgccttcaaggcgaagcccgcgctcatcaccctcatcggcgcctgcgcggccatgggcgccaatgccgaagtcaccgcctccatcacgtgcctccgcgatgcaatcgctagcgatgactgggcagcgaggaaggccgcggcggaggcgcttgctgcattggccctagagcacacggatcttctcacgacctacaaatcctcttgcgtcaccttcttcgaggccagaaggtttgacaaggtcaaggttgtgcaagagtcgatgaaccagatgattgaggcggggaaggagatcccaggtgctgaagaggacgagtgctcctcgctctgccaccagcgtcccagtcacaacgaagatcttctcttacaggtgaggggtatccccttcgtagttctaactgtacttggctactttctactacttccgcatgtacagatctgctaatctttttcctataccttgcaagaggtaaagaactaaataagagtctcttgttgtttacttataaactcttgatgaacagttgggtaaatgctacacctatttcttttttatatacaaattatcctgtaactactcagggagtgcaagtgatgggcgatatccagctgcttcgctgggctcaaactcagttcctttagcaacaaggaagagcatattatctgtaagcagatcatctctgtctgacgtgtctaccagtgtaattttctggaccttctccagtctattgtgtagttgcaaaagaatatgtgaattaccagtcagtggagattgagagggattccccggctagaagctcaagcggattaggaagtggctcatcttcatccagtggtacagtacagtggagcaaatgagtatctatcaccattaatgctgagttatcgatcaagtagctcgttaattcgttaaaattccttgcagattctgactctgatgttacagtttattttttcagtaaccagaggatgacaagcctactacaagagttggtcctaagttataaaataagcctaactttttttacagagtacacaaatgtcaggttttcctgtttgggctagcaccacaaatggaaacaaaaaattggactcagcccatcgtgaagatatgaaggaagagcactgtcccattattctgtttttcgaccatgtttctagcatgaacatgccagcatggtgccatcaacaacttccctgttagctcacggtacaccatgctccagcctgtcccctggttatcactgtggtgctgattgtgttcccaagatgcactgaaatagagcaagatcaaatgaggatgaagttactgtgtagagatttttgttccccctttgtagcagcacccatggatttttatttgcacagaattactctcttttactggttcattcaataattcaatttgttgcttggaaaccactgtataataaatacaaatgctatggtatgattttgtgaattctgatcgctccttttcttgtaagcatgaattc

SEQ ID NO: 50812 - DNA, 3318 bp, Zea Mays
catcgtcgcgcccccaccccatacgagccgcccccgcgacgctgaccccactgccgtccagcaggatctctcccttcccccgccccacgcctagcaggatctctcccttccctcgcgcgtccgagacgacatggacgaaggtgggaggctcccaacgcatccccgccgacctcaacgccgacggtcctttcctaacccgcagcccccggccacagtctctctcttccggtccagtgggggctgctagcttccagtacctaacttgactgagtctgggaactaggcaactataccactgccttagagatctgtacagcagcaccaacaaagccttttagtcccaagaatattggagatgtgccttcaacactctagggctcgattgcctccagataagcaacttgctgcagaaaaaagttttgccttgtattgcaagccagttgaattgtacaatattatccagaggcgagctattaaaaatccaccttttgttcaaagatcccttctatataagatacaggcaaggagaaaaaagaggctccaaccgcgcctcctcaagttacttcgcagcaatgccttcaaggcgaagcccgcgctcatcaccctcatcggcgcctgcgcggccatgggcgccaatgccgaagtcaccgcctccatcacgtgcctccgcgatgcaatcgctagcgatgactgggcagcgaggaaggccgcggcggaggcgcttgctgcattggccctagagcacacggatcttctcacgacctacaaatcctcttgcgtcaccttcttcgaggccagaaggtttgacaaggtcaaggttgtgcaagagtcgatgaaccagatgattgaggcggggaaggagatcccaggtgctgaagaggacgagtgctcctcgctctgccaccagcgtcccagtcacaacgaagatcttctcttacagggagtgcaagtgatgggcgatatccagctgcttcgctgggctcaaactcagttcctttagcaacaaggaagagcatattatctgtaagcagatcatctctgtctgacgtgtctaccagtgtaattttctggaccttctccaggtaattttcctttagtgtgtttattgttactgtatatttttacagttctcttgcgagacgtagtagtatagggcttgtagtcgttaccttttcttccagaaataagtaatcattaacttctctgctgattactaaacacaagagaaaacattctgtaactgtaagtccacgttggaagtggaagtagttagtttttggatacttggttgcaacttgagctgtggcttcaatgctggagcagattatctggtgaagctgaggttgttttgagaaaacgtttggttgaacagcttctgatatctcttataaatagctgagaggggcaatgtccaagatgcccttgggtattgtaaaatttgattatatggttgcagatgttcttttatatttgagtacttttcaaattttaaaataaaaattatcaacaaccaataactttgccaagaaacgagcagataaggaattggggttatggcggattctttctaatttcttgtgaactttaggggtgaaaatgtactttgtgtggtgggccgtgggcctgtccatgtagcgcgtggaagctcctttttccaactccaccatgcacctgtccctcgtgaaagcgcactttatggtttatggagctccatgaatggagctgctacagcagcaccttcttggtacaaggagctaaaaacagctccaggagctgtaatggaatccccaccaaaggggggcatatgttggtcgtaagaagagggtactattgactcctgtttgagaatactgaaaagggactgctacttaaaatttgatgtttccatccagcattaacttttcagtatcagtgacacgatgggtcagatttgaacatgattattgcaagccaagacattgtcaattacatatagaagcacatgtcatgttgctttccatgttccccgcataatattacattgctaaacttaactatgcactaatgttttagtagtgacttgtaggtatacatattaccaccttgttgagtttgctgcaccagtcatgtgcaattaacgttccgtatcatcacttgtaaaaaaaaggtttatgttgggggcatctcctctgatgtctcttatgatgatctcaaaaactctgccagtcttttggacaagtagtggaagtgattactcctagatttctttgtgctagcttttgtttttgctttcttctaaattcagagttttttcttttcttttctgtaggttgaactcatagctgatcttcatgttatccatgctagcaatgtattgcgtttattcatatttctcttttatagtagggtgggtatatgtgataaagcatgtattcgataaagcagatctttccaagtagggaactaaattgaaaattgtattttatgaactttatgtttagtttcatggatcagtttgaggcatagctaagtataatttatatgattacactcacatccacttggtgtttttaaaatgtttgcaacggtccactattgagttcgaaatactgaacctcaaactccttgtcaaggtacacctcgtgtagcgattttctgactttcctgagtgaggcggcgctattggctttgtctattgtgtagttgcaaaagaatatgtgaattaccagtcagtggagattgagagggattccccggctagaagctcaagcggattaggaagtggctcatcttcatccagtgtaaccagaggatgacaagcctactacaagagttggtcctaagttataaaataagcctaactttttttacagagtacacaaatgtcaggttttcctgtttgggctagcaccacaaatggaaacaaaaaattggactcagcccatcgtgaagatatgaaggaagagcactgtcccattattctgtttttcgaccatgtttctagcatgaacatgccagcatggtgccatcaacaacttccctgttagctcacggtacaccatgctccagcctgtcccctggttatcactgtggtgctgattgtgttcccaagatgcactgaaatagagcaagatcaaatgaggatgaagttactgtgtagagatttttgttccccctttgtagcagcacccatggatttttatttgcacagaattactctcttttactggttcattcaataattcaatttgttgcttggaaaccactgtataataaatacaaatgctatggtatgattttgtgaattctgatcgctccttttcttgtaagcatgaattc

SEQ ID NO: 50813 - DNA, 1698 bp, Zea Mays
catcgtcgcgcccccaccccatacgagccgcccccgcgacgctgaccccactgccgtccagcaggatctctcccttcccccgccccacgcctagcaggatctctcccttccctcgcgcgtccgagacgacatggacgaaggtgggaggctcccaacgcatccccgccgacctcaacgccgacggtcctttcctaacccgcagcccccggccacagtctctctcttccggtccagtgggggctgctagcttccaggaatattggagatgtgccttcaacactctagggctcgattgcctccagataagcaacttgctgcagaaaaaagttttgccttgtattgcaagccagttgaattgtacaatattatccagaggcgagctattaaaaatccaccttttgttcaaagatcccttctatataagatacaggcaaggagaaaaaagaggctccaaccgcgcctcctcaagttacttcgcagcaatgccttcaaggcgaagcccgcgctcatcaccctcatcggcgcctgcgcggccatgggcgccaatgccgaagtcaccgcctccatcacgtgcctccgcgatgcaatcgctagcgatgactgggcagcgaggaaggccgcggcggaggcgcttgctgcattggccctagagcacacggatcttctcacgacctacaaatcctcttgcgtcaccttcttcgaggccagaaggtttgacaaggtcaaggttgtgcaagagtcgatgaaccagatgattgaggcggggaaggagatcccaggtgctgaagaggacgagtgctcctcgctctgccaccagcgtcccagtcacaacgaagatcttctcttacagggagtgcaagtgatgggcgatatccagctgcttcgctgggctcaaactcagttcctttagcaacaaggaagagcatattatctgtaagcagatcatctctgtctgacgtgtctaccagtgtaattttctggaccttctccaggtacacctcgtgtagcgattttctgactttcctgagtgaggcggcgctattggctttgtctattgtgtagttgcaaaagaatatgtgaattaccagtcagtggagattgagagggattccccggctagaagctcaagcggattaggaagtggctcatcttcatccagtgtaaccagaggatgacaagcctactacaagagttggtcctaagttataaaataagcctaactttttttacagagtacacaaatgtcaggttttcctgtttgggctagcaccacaaatggaaacaaaaaattggactcagcccatcgtgaagatatgaaggaagagcactgtcccattattctgtttttcgaccatgtttctagcatgaacatgccagcatggtgccatcaacaacttccctgttagctcacggtacaccatgctccagcctgtcccctggttatcactgtggtgctgattgtgttcccaagatgcactgaaatagagcaagatcaaatgaggatgaagttactgtgtagagatttttgttccccctttgtagcagcacccatggatttttatttgcacagaattactctcttttactggttcattcaataattcaatttgttgcttggaaaccactgtataataaatacaaatgctatggtatgattttgtgaattctgatcgctccttttcttgtaagcatgaattc

SEQ ID NO: 50814 - DNA, 1390 bp, Zea Mays
ctaaattcagagttttttcttttcttttctgtaggttgaactcatagctgatcttcatgttatccatgctagcaatgtattgcgtttattcatatttctcttttatagtagggtgggtatatgtgataaagcatgtattcgataaagcagatctttccaagtagggaactaaattgaaaattgtattttatgaactttatgtttagtttcatggatcagtttgaggcatagctaagtataatttatatgattacactcacatccacttggtgtttttaaaatgtttgcaacggtccactattgagttcgaaatactgaacctcaaactccttgtcaaggtacacctcgtgtagcgattttctgactttcctgagtgaggcggcgctattggctttggtaggtctttctcatgatcatgttgtttgggtctgaaaatgctctgagtcgtagtctcgtaatgttatagtaacaataacatcatttttgtgaggatttgtctgaaaggagaacaactcaacatcaatcttggttatcaaccaagagtctaaactcctttgtcatgtgttatcgtttcaatcctgaactatgcattgttgtgggtcttgaagatctggttacaagcctacaacttaactgatatatatcacatgatgatgataatatgtatattcatggtgacacctttgctctttgaacatgttgtagtctattgtgtagttgcaaaagaatatgtgaattaccagtcagtggagattgagagggattccccggctagaagctcaagcggattaggaagtggctcatcttcatccagtgattctgactctgatgttacagtttattttttcagtaaccagaggatgacaagcctactacaagagttggtcctaagttataaaataagcctaactttttttacagagtacacaaatgtcaggttttcctgtttgggctagcaccacaaatggaaacaaaaaattggactcagcccatcgtgaagatatgaaggaagagcactgtcccattattctgtttttcgaagaccatgtttctagcatgaacatgccagcatggtgccatcaacaacttccctgttagctcacggtacaccatgctccagcctgtcccctggttatcactgtggtgctgattgtgttcccaagatgcactgaaatagagcaagatcaaatgaggatgaagttactgtgtagagatttttgttccccctttgtagcagcacccatggatttttatttgcacagaattactctcttttactggttcattcaataattcaatttgttgcttggaaaccactgtataataaatacaaatgctatggtatgattttgtgaattctgatcgctccttttcttgtaagcatgaattc

SEQ ID NO: 50815 - DNA, 1049 bp, Zea Mays
gttttttcttttcttttctgtaggttgaactcatagctgatcttcatgttatccatgctagcaatgtattgcgtttattcatatttctcttttatagtagggtgggtatatgtgataaagcatgtattcgataaagcagatctttccaagtagggaactaaattgaaaattgtattttatgaactttatgtttagtttcatggatcagtttgaggcatagctaagtataatttatatgattacactcacatccacttggtgtttttaaaatgtttgcaacggtccactattgagttcgaaatactgaacctcaaactccttgtcaaggtacacctcgtgtagcgattttctgactttcctgagtgaggcggcgctattggctttgtctattgtgtagttgcaaaagaatatgtgaattaccagtcagtggagattgagagggattccccggctagaagctcaagcggattaggaagtggctcatcttcatccagtgtttattttttcagtaaccagaggatgacaagcctactacaagagttggtcctaagttataaaataagcctaactttttttacagagtacacaaatgtcaggttttcctgtttgggctagcaccacaaatggaaacaaaaaattggactcagcccatcgtgaagatatgaaggaagagcactgtcccattattctgtttttcgaagaccatgtttctagcatgaacatgccagcatggtgccatcaacaacttccctgttagctcacggtacaccatgctccagcctgtcccctggttatcactgtggtgctgattgtgttcccaagatgcactgaaatagagcaagatcaaatgaggatgaagttactgtgtagagatttttgttccccctttgtagcagcacccatggatttttatttgcacagaattactctcttttactggttcattcaataattcaatttgttgcttggaaaccactgtataataaatacaaatgctatggtatgattttgtgaattctgatcgctccttttcttgtaagcatgaattc

SEQ ID NO: 50816 - DNA, 1637 bp, Zea Mays
ctaaaacctagcgaagaaaacccagccaaagccctcccccctgttcccctcgtctcgtcgccgcctacgaaaatggctgcgctcgcgacactcctccgccacagccgccgcagccatgcccacgtcctccccatctcccgtgcgctctccaccaccaccccgaccaccggcggcaccgatcccgttgccatcacgttgtcggacgccaagagacaactcctccgcgagcgcgatccggaccgcgtggtctccatcctcgacgccatcgacacggcgtccatctccgctgcttccacccggcacgcgctctccctcgccgcgcgccgcctttctcgctcccgccgcttcgctgacgcggaggccctcctctcctcccatctcaccgcgtccaccaccgaggcccacctcgccgccgtcctgtgctcctacgcctccgccaacctccccgagaaggccatcgacgcgttccgctccgctgcgccgtcccttccaacccccaactccccgctccccttcaacgccctcctctccaccttcatacgatgtcgccgctacagacgcgtccctgtcctcttcgctgagctctccaaggagttttccatcacccccaatgccacatcctatggcatccttgtcaaggcctactgcatggcccgcgatgatgctaaggccaagcaggccttggatctaatgcgcgagcaaggtatctcgccgaccaacaggatctacaccacgttgatcgattccatgtataagaggaagatgaccaatgaggctgagtctttgtggaaagagatggtagaaagtgaatgtgagcccgatgtggcaacttataatgtgaaggccatgtactacgcgctccatggaaagccagaagaggttatggaggtgatgacagagatggaagcggctggtgtgaagccggacaccaccacctacaatttcctcatgactagctattgcaagagtggcaaattggaggatgctaaggttctttaccactccctagctgagaaggggtgctcggcagatgctgccacgtacaagcacatgttagcagaactctgtgcctatggagactttgatgctggtttgggcatcttcaaggatagcttaaagaggcgtaaggtgccagattttagaacaatgaaagggttggttgagggattggcaaagggaggcagggtggctgatgccaaagaggttgttgcagaggtaaaaaagatgttcccagagaatttgctgtctggttggaagaaggttgagaaagagcttgggttggactcagatagtggagaaactcctctgttggaagttacatctggagaaactgttgctgaggttaggcccgatgctgcagaggtagaggcacttgagctcgaaggatctgccgctgaggaagttactgtatcagaagaatccagtgatgatgaagcttatgtgcctgaagcatcatctagtgaagaagtgccacaaggcatcctattaagatcgctagtcatctttggcgagcatgccgggctcaccatctcccttgccgctgctgtgagcttgcctgcctatacaatgaacacggattgctggtacaacagttcaaaaagctaaagaacaaaatgggtcatgacgccacgcacctt

SEQ ID NO: 50817 - DNA, 1201 bp, Zea Mays
cccacgcatagcagccagcgcgcagggagcttccctgtccatggcgtctcctccccttcctcgagcaagctccagcgtgcgcgggggggggggggggggcagcaacctcgacggtcggcctctctcccctgctgtcgctcgccctacagggatggagagcagccgtgcgctccctgcaggcaagcagaacctccagccgagcgcgctccctgtccttctcctgggcgtgtcccctgctccacggccagcagcaagccagcgcccctgcagcaaggcaccctcttcttctccctggccgccctgctctctgatccatggcgcccagaaaattccagccggctcccccttcttcttcctccagccagcagctcgtccacctctctctcccatggcatttccccctgcgagtagcgctttctccgttgtcttcaacctccggtcgctcccatctccctgcagcaccctgtccattttttttcacccagccgattccctctactgtccaaggcgcgggcgctattttcccatggccgagcagcccctcgcagcgagcttctccttttccccagcgctgcacagctcctccacggtgaaacgccgctgttcctgcagccccaacacctccccttgcttcctcgctgccagcgctgcgcgcgtgccacgtgctcggcaaactgtccaagtggggtgttgcgcagcgaacagcacgtcgggatgctcgtcgggtgtttgctgtttttgcgcagtgaacagcacgccatcgacgctcatcgagtgtttgctgttttttttgcgcagccccaacatcatcgtcgttcaccccggtgagaccgcgacgctccttgttcgattccgcatcaacattattttcctatgattaattatgtatgtgtgctgctttgttttatttttgtggaggagataaccccgtgttttgcgtggagaaggcaagccgctcgacgctcgtcgatgtcgtagcgatgcacaaatcggaatcaccgtcgttcttgcaaacgctgattgggtttgtttatggtgagccatgtcgctctcgattgcctcgattaataaattatatagatgcggttgaaatgttttggcggtaggtcgtaatatggtcgtgctcatgatttcgagttagagattggtggtcgtcgattcgtataaattggtcgatgtggtgcgtgtttaaaaattgtat

SEQ ID NO: 50818 - DNA, 988 bp, Zea Mays
cttctcctgggcgtgtcccctgctccacggccagcagcaagccagcgcccctgcagcaaggcaccctcttcttctccctggccgccctgctctctgatccatggcgcccagaaaattccagccggctcccccttcttcttcctccagccagcagctcgtccacctctctctcccatggcatttccccctgcgagtagcgctttctccgttgtcttcaacctccggtcgctcccatctccctgcagcaccctgtccattttttttcacccagccgattccctctactgtccaaggcgcgggcgctattttcccatggccgagcagcccctcgcagcgagcttctccttttccccagcgctgcacagctcctccacggtgaaacgccgctgttcctgcagccccaacacctccccttgcttcctcgctgccagcgctgcgcgcgtgccacgtgctcggcaaactgtccaagtggggtgttgcgcagcgaacagcacgtcgggatgctcgtcgggtgtttgctgtttttgcgcagtgaacagcacgccatcgacgctcatcgagtgtttgctgttttttttgcgcagccccaacatcatcgtcgttcaccccggaccgagagatggtgatcgtgcacgtgatatggtgccaaccacaggatgccgttggtggacgacccaaggaaggatggacgtaaccagtggatgctcgccaagcgagtacctccccagcaaacactgtctaagtgttaaattaaaggcaagccccggttttatgcataaccgttatatatgctattttactgcacttaatgtttgtaggcttgtactgtgcacttaagtgtaggagttaactgaaaccctagttgcatgaactcaggattcctattgagatgaatactagtatgctaggtcgagtagctgcttatttaattaggatctcggtagaagtcgagtgatttttctagcactcgcgcgaggtcaggacattg

SEQ ID NO: 50819 - DNA, 579 bp, Zea Mays
atttgtgttgcgtaaataaataagatatggtcgtcttgttaatggtgttaatgatgaacgctgataacgtacgaatagctagcgcttgtgtatagtcgttgcggtgtcttactacttggtgtttagttcgctaccgtgtattgtatatcttgtgataacttttcattatattcatacatatgcatcttgcatctcatttaggaccgagagatggtgatcgtgcacgtgatatggtgccaaccacaggatgccgttggtggacgacccaaggaaggatggacgtaaccagtggatgctcgccaagcgagtacctccccagcaaacactgtctaagtgttaaattaaaggcaagccccggttttatgcataaccgttatatatgctattttactgcacttaatgtttgtaggcttgtactgtgcacttaagtgtaggagttaactgaaaccctagttgcatgaactcaggattcctattgagatgaatactagtatgctaggtcgagtagctgcttatttaattaggatctcggtagaagtcgagtgatttttctagcactcgcgcgaggtcaggacattg

SEQ ID NO: 50820 - DNA, 3542 bp, Zea Mays
ccaaaagatccaaacttgcaaagccgtggcgtccgaaacggagcggcagtgcagcgcacaacgcaccgttctcgaaactcacgacccctctgtctcgtctcgccgcaacctcatcctatccgtctcaccctcatccccgtttaatatataccgttccgccgttcgtctcctctggccctctctccatccccagcccacgaccctccgccaccagccatcgtctgcatcagatctcccgcccgtccgttacatcccagggcgacgcggccgcggccatgacgccatcctcagctctcgccctcgcgcaccacgccgcggtatccccgctcccgtcctccacgccgcggccctcccccaggtccagctctctgagcctgggcccgggctccgccgggctcgggccgcgccggctcgtcgcggcggcgcccccacgggcgttcttctcctcgtccccctaccagccgccccagccggaggggttctcgcagcaccgcgagtacggtctggtccccatggtcatcgagaccacctcccgcggggagcgcgcctacgacatcttctcgcgcctgctcaaggagcgcatcgtctgcatccacgggcccatcgccgacgacacggcctcgcttgtcgtcgcgcagctgctcttcctcgagtccgagaacccgctcaagcccgtccacctctacatcaactcccccgggggcgtcgtcaccgcggggctcgccatctacgacaccatgcagtacatccgctgccccgtcaccaccctctgcatcggccaggcggcctccatgggctcgctcctcctcgcggctggggcgccgggtgagaggcgcgcgcttcccaacgccagggtcatgatccaccagccctcgggcggcgcgcaggggcaagccaccgacatcgccatccaggccaaggagatcctcaaaatgcgcgaccgcctcaacaagatctaccagaagcacacgcgccagcccatcgataagattgagcagtgcatggagagggacctcttcatggaccctgaagaggcgcgcgactggggcctcatcgacgaggtcatcgagaatcgacctgcctcgttcatgcccgacggaatcggtggaggcctcgatgtgcccaggctcggtggcgttggcggcggacgggggagggacgtcgaggaaccttccgcggtgtgaggattggcctcaaaggtgaaatccttcctcatccggtggatgtgttgtttgttgttagatccaaaggttcaattcttactatacaaggttaaccttgttattatggttatggaaacgtccggctccccattgtccttgttgcttaaattgcttcaattgagctattggggatataattattgcaactctaaggaaattctgcactgttgatactgataaattgacacagtattgtgtatgttgtactatatttgtatcaattccatgccaggacattcaaactttttcctcttttgtttctttctcacagtaattgctcttgcctttttgtttctatcagggactagatcttaatatgtttttggtttcatgttctttcatgtgtattggtgttcagccttgttgctaacctaagtatgtgtgtgtgtgtgtgttaaaatatgcagggatgttattctgatccgctgtataatgcatttcaagttgagaccttagaatgactactttctgcacaattgattgcttgcttcgattttttatttattctgtgggttggttaaattccaagacaatggttagcgtttctgaagtgttgttgtttggttgggcggtaaaacatacaatttgcaaaacgaacttttaactgctgtagtctataattcttaccccaaagagcatcttgtaaggtagttaagcgtgagatagtgtgttctagcataggaattgttcatatgaactatgaagaatttatttgtgaccttgttaattcattgctcaagtttgatgcaaattgtactcaatatagtctatagttcaaccaagtcttaatagaccatgggattaagctttgatggctcagacttcttagagcaggtttagaatcattattatctggttgggctctgaactctttgatcacgtttctgatggcaatattacattgttggagttactccacctaatgaactgtatgtaacctttcgcaacagggtggataaagttggtgtatgtataatttcaagaaatatttactgtcagttctcaaagctgccacagttgcagtctaacatatctctttggattttcataaagcttgcttggcatgtgcccaaaaaatggttttgtatagatccatataaggtcctagtttgtaagtgaacggatgatgaatgaagcgggtttaataatttgggcaatatccttggtcctgccaggctgcattctcgactgattgtgaaactgccagcctgtattgcagttcaatgacaccagtgttcagtagaactgtagaattttgaaattatttcatgctctaagtgtctagtaaaccaccggtggccattttttagggtaccaggttgggtctcgtactgtttttttatgtgtttgaatgcagaagagctaatagttagttgataaaattagctggagatgttgctaaaattagctggagacatccaaatagcctagctaatagttcagctattaacttaactgcttttaactggagacatccaaacacagtcagctaatagtccaactaagaccttgattggaacctctagcgctaaaactaaaagctagctgctaaaattagttttaggctattcacaatggtggtttcatttcataatgatttcatccatatttaatagtgtgtcacatcagatttttttgatgatatggcatagcatttaagaggattgagtttaatgggataaaattagtttcatagggatgaaactatgttaacttgtttcgaaggtcttggaaaccatgtgaaacctctattgagattgatttgtttcatcttcacatattttactaacttctattggccattgagttgcaacatttaattggtatgttagcatgtaaaacagtgaagtgaaatattgcatcgagagacattgtttcattcatagtttcatagcccttttgatgatgtggcataattggaaagagcgctacaaaattcccattgaaaatagccttagaggttccaaatgccctcagctaattactagctaactcacagctaacaattaatttattagctggcttaacccatctaataatttgttagccggctaactattagctctaaggtttcaaacagggcctaactattagttgtgctctcaattgcccattagttattagctggtttaaccagctaaaattagctaatagttagccaactaattccactaatattttttagccagctaaccattagtctagtgtgttcaaataggatcttagtttacgagtggtaagtgagaggtgtgcttgtctcaggtttcagtactaaaattatggatgaaccactgaagttcctgtttaggaagactagga

SEQ ID NO: 50821 - DNA, 1128 bp, Zea Mays
ggccaccggtacctattggacaggcaacgtcctcatcttcatctcccaggttttcccctccaatcacccccaggtcttcctctcgcgagttgcggtctcgcggccccctccgccgaccgccgcctcctcacaaccgcggaagctgcttccctctccattggacgcggccagcttccatctctcggtcacctccctctacatcccacggccgctaccaccttccctctacctcacacggcagccggcctctccaagcattcagcgacgcatttgcctatatcagcactgtggtcataactctagtagagaaaggagaagatgcaggcatctagggcaaggcttttcaaggagtacaaggaggtacaacgagagaagtcagctgaccctgatatccagttaatatgtgatgattccaacatattcaagtggactgctcttatcaagggcccttctgaaacaccttatgaaggtggtgtgtttcaacttgcgttcgcaattccagagcagtatcctctactgcctcctcaagttcgatttttaaccaaaattttccacccaaatgtgcatttcaagacaggtgaaatttgtcttgatatattgaagaatgcatggagccctgcatggacctttcagtctgtttgtagagcgataattgctctgatggcccatcctgaaccagacagcccacttaactgtgattcaggcaatctcctgcggtcgggtgacatcagaggctatcaatcaatggcccgcatgtatacaaggctggctgccatgccaaagaaaggttagatgtagaacatgtgccaagccaagagcctatgtcagtccatatgttgtcaggtttgctgtgtgctgtctgtctgtgaacttggtggttcttgtttcctaataagtcctaaccattcatgtgtgtgtattctgtattctgtatcccggattcccgatgcttggtctgtgatgtaataaatcctggaattcaacagttgttacttctgatctatttatttagttgctcagtatttccgtcagtttctgctgcgcaacactacggaggtgtcttgtttaatgtttcatatgctgtcagctactgcgacagtcttggaggacacattcaagagacagcac

SEQ ID NO: 50822 - DNA, 873 bp, Zea Mays
gcacacgcgacgcatttgcctatatcagcactgtggtcataactctagtagagaaaggagaagatgcaggcatctagggcaaggcttttcaaggagtacaaggaggtacaacgagagaagtcagctgaccctgatatccagttaatatgtgatgattccaacatattcaagtggactgctcttatcaagggcccttctgaaacaccttatgaaggtggtgtgtttcaacttgcgttcgcaattccagagcagtatcctctactgcctcctcaagttcgatttttaaccaaaattttccacccaaatgtgcatttcaagacaggtgaaatttgtcttgatatattgaagaatgcatggagccctgcatggacctttcagtctgtttgtagagcgataattgctctgatggcccatcctgaaccagacagcccacttaactgtgattcaggcaatctcctgcggtcgggtgacatcagaggctatcaatcaatggcccgcatgtatacaaggctggctgccatgccaaagaaaggttagatgtagaacatgtgccaagccaagagcctatgtcagtccatatgttgtcaggtttgctgtgtgctgtctgtctgtgaacttggtggttcttgtttcctaataagtcctaaccattcatgtgtgtgtattctgtattctgtatcccggattcccgatgcttggtctgtgatgtaataaatcctggaattcaacagttgttacttctgatctatttatttagttgctcagtatttccgtcagtttctgctgcgcaacactacggaggtgtcttgtttaatgtttcatatgctgtcagctactgcgacagtcttggaggacacattcaagagacagcac

SEQ ID NO: 50823 - DNA, 919 bp, Zea Mays
aaaatttagggggtcacgtgctgctcggctgctcggcttcattcatcattcagcgacgcatttgcctatatcagcactgtggtcataactctagtagagaaaggagaagatgcaggcatctagggcaaggcttttcaaggagtacaaggaggtacaacgagagaagtcagctgaccctgatatccagttaatatgtgatgattccaacatattcaagtggactgctcttatcaagggcccttctgaaacaccttatgaaggtggtgtgtttcaacttgcgttcgcaattccagagcagtatcctctactgcctcctcaagttcgatttttaaccaaaattttccacccaaatgtgcatttcaagacaggtgaaatttgtcttgatatattgaagaatgcatggagccctgcatggacctttcagtctgtttgtagagcgataattgctctgatggcccatcctgaaccagacagcccacttaactgtgattcaggcaatctcctgcggtcgggtgacatcagaggctatcaatcaatggcccgcatgtatacaaggctggctgccatgccaaagaaaggttagatgtagaacatgtgccaagccaagagcctatgtcagtccatatgttgtcaggtttgctgtgtgctgtctgtctgtgaacttggtggttcttgtttcctaataagtcctaaccattcatgtgtgtgtattctgtattctgtatcccggattcccgatgcttggtctgtgatgtaataaatcctggaattcaacagttgttacttctgatctatttatttagttgctcagtatttccgtcagtttctgctgcgcaacactacggaggtgtcttgtttaatgtttcatatgctgtcagctactgcgacagtcttggaggacacattcaagagacagcac

SEQ ID NO: 50824 - DNA, 851 bp, Zea Mays
ctcggctgctcggcttcattcatcattcagcgacgcatttgcctatatcagcactgtggtcataactctagtagagaaaggagaagatgcaggcatctagggcaaggcttttcaaggagtacaaggaggtacaacgagagaagtcagctgaccctgatatccagttaatatgtgatgattccaacatattcaagtggactgctcttatcaagggcccttctgaaacaccttatgaaggtggtgtgtttcaacttgcgttcgcaattccagagcagtatcctctactgcctcctcaaacaggtgaaatttgtcttgatatattgaagaatgcatggagccctgcatggacctttcagtctgtttgtagagcgataattgctctgatggcccatcctgaaccagacagcccacttaactgtgattcaggcaatctcctgcggtcgggtgacatcagaggctatcaatcaatggcccgcatgtatacaaggctggctgccatgccaaagaaaggttagatgtagaacatgtgccaagccaagagcctatgtcagtccatatgttgtcaggtttgctgtgtgctgtctgtctgtgaacttggtggttcttgtttcctaataagtcctaaccattcatgtgtgtgtattctgtattctgtatcccggattcccgatgcttggtctgtgatgtaataaatcctggaattcaacagttgttacttctgatctatttatttagttgctcagtatttccgtcagtttctgctgcgcaacactacggaggtgtcttgtttaatgtttcatatgctgtcagctactgcgacagtcttggaggacacattcaagagacagcac

SEQ ID NO: 50825 - DNA, 1684 bp, Zea Mays
agcaagccgccagaagggcccaacgttgcagagtgttgtagatgcgggccgcgctgtatggtcttagcaagaaacgaaggatatatgcggcccaagttcgggctaaacccctccttctcccacgacgccgatccccgtcgccgccgcctcatttcctatcagtccgaaccgttcttccgtcctgctcaggcgttccgaccagcgttgctcgcttctcgtcactcccgccggctgctgctcttgtctacgccacggtagaatggctttcctcttcaacaagttccaagagctattatcgtctcggggagaatgctgacgagaaggacgctgaggagattattgacttggctagcaaagcttctattgctgatcagcagaaacaagtgcaggataatgttcattatgaacttacgcatatgtgccaagcaatggatagcattttatgtcctgatacaataaacgacccatcaaaaggaccttcagaagcacataatcattctcagcgtagtggcttaagttttgccgttggtggtgctgcatctgcaaacaagcaaagtgcaattatccctgctacacgacctttaactcgagcagaattgtcaaagaaattcagggatcattttgggtacacacttgacatcggaccatctggaattcctcataaagacgcaggtcaaggtttattcttatcaggacaagcaaatgccggtgctgtcctagccatctatcctggtgttatatattcacctgcttactatcgatatatacctggatacccaagaattgatgtttgcaacaactatctaatcacaagatatgatgggacaataattgatgcaaaaccatggtgttttggtggtgaaacaagagcattatgggatggttcagatttggtggattacaatgctatggcacctaaaggctcagagaacaactctgatcgggtgtggagaatgctaagcaagcctctagaaaaaggtgtaagggaaaattttggtgaagtgcttgaacgacgaaatccccttgcttttggtcattttgcaaatcatccacccaaaggttcaagtcctaatgtcatgatctgcccatacgattttcctttgacagagaaggacatgagagtatacatccctaacattacgtttggtggtcaagagaccattaggatgaagaggtttggctccttctatttcaagtctggaggttctgataatcaggctggtgattctctagtactgaagacgctagtgctggtgagcacaaggtccatatgtgatgaagagctctttcttaattaccgttacagtaactcaaaaagacgaccagagtggtacagccctgtcgatgaagaagaggataagaggagatggagctagtttagcacttctgtatcattctggttgtgcatttttttggctaacttttttagttctttcccccctggaaattgcaactgagcattggtaagctcctgagatcgagatgacagttttgacttaattcgtcatttggtattacatactttggtgtcccaattaccatcatgataaaagttaagctactcatgtaagttctactctcaggtcctttgtggtgcttaaaggattacatttgttactccttttatgtgtgtctatcccaatgattatctatgaaagataaataatttatgcatatattgcct

SEQ ID NO: 50826 - DNA, 2149 bp, Zea Mays
gtagatgcgggccgcgctgtatggtcttagcaagaaacgaaggatatatgcggcccaagttcgggctaaacccctccttctcccacgacgccgatccccgtcgccgccgcctcatttcctatcagtccgaaccgttcttccgtcctgctcaggcgttccgaccagcgttgctcgcttctcgtcactcccgccggctgctgctcttgtctacgccacggtagaatggctttcctcttcaacaagttccaagaggcaatcagaacaattgccaagagccccatgtttgctcgtgatccaaggcatcttcaatttgaagctgatgtgaatcgtttgtttctctatacaaggtttgctaatatccaaagaaaaagcagatctggttttccactttttattgttgtcatttctttttacgaagtattgtgcttcttgcctgtgattggcggagaactcaaattagcacatcagcacttgcaattttgtgtacttggattctttcaagcttttgcctgccaatttgtttcttttaaatagttgtcatttcattctggttgttcataagtgaaagccatttgtgtgaatgtctggttagatgagttacatcttctcaactcttcatttaggctggtacccctaatcaaactgcaggaagtgtcgggatctccgagctcatggagattttgttatacctagttctcttgcaaaaccatttgtgaaggtaccatttcctgaatttcttctgctatgcacttagctattatcgtctcggggagaatgctgacgagaaggacgctgaggagattattgacttggctagcaaagcttctattgctgatcagcagaaacaagtgcaggataatgttcattatgaacttacgcatatgtgccaagcaatggatagcattttatgtcctgatacaataaacgacccatcaaaaggaccttcagaagcacataatcattctcagcgtagtggcttaagttttgccgttggtggtgctgcatctgcaaacaagcaaagtgcaattatccctgctacacgacctttaactcgagcagaattgtcaaagaaattcagggatcattttgggtacacacttgacatcggaccatctggaattcctcataaagacgcaggtcaaggtttattcttatcaggacaagcaaatgccggtgctgtcctagccatctatcctggtgttatatattcacctgcttactatcgatatatacctggatacccaagaattgatgtttgcaacaactatctaatcacaagatatgatgggacaataattgatgcaaaaccatggtgttttggtggtgaaacaagagcattatgggatggttcagatttggtggattacaatgctatggcacctaaaggctcagagaacaactctgatcgggtgtggagaatgctaagcaagcctctagaaaaaggtgtaagggaaaattttggtgaagtgcttgaacgacgaaatccccttgcttttggtcattttgcaaatcatccacccaaaggttcaagtcctaatgtcatgatctgcccatacgattttcctttgacagagaaggacatgagagtatacatccctaacattacgtttggtggtcaagagaccattaggatgaagaggtttggctccttctatttcaagtctggaggttctgataatcaggctggtgattctctagtactgaagacgctagtgctggtgagcacaaggtccatatgtgatgaagagctctttcttaattaccgttacagtaactcaaaaagacgaccagagtggtacagccctgtcgatgaagaagaggataagaggagatggagctagtttagcacttctgtatcattctggttgtgcatttttttggctaacttttttagttctttcccccctggaaattgcaactgagcattggtaagctcctgagatcgagatgacagttttgacttaattcgtcatttggtattacatactttggtgtcccaattaccatcatgataaaagttaagctactcatgtaagttctactctcaggtcctttgtggtgcttaaaggattacatttgttactccttttatgtgtgtctatcccaatgattatctatgaaagataaataatttatgcatatattgcct

SEQ ID NO: 50827 - DNA, 2478 bp, Zea Mays
ccgcgctgtatggtcttagcaagaaacgaaggatatatgcggcccaagttcgggctaaacccctccttctcccacgacgccgatccccgtcgccgccgcctcatttcctatcagtccgaaccgttcttccgtcctgctcaggcgttccgaccagcgttgctcgcttctcgtcactcccgccggctgctgctcttgtctacgccacggtagaatggctttcctcttcaacaagttccaagaggtacacgtcctgtctgttgctattcacaccaaccaaccatcacgggatctcgatctgcctgattcctcctcgtcgcgtgcgtcaaagccaatcatggcgttcgtcatgaatttgttgacacgaggaaaattctgtcctgtactgcactctttgccccgataggcagatgctcggcacgcagtgggaattttgcgctttcaatatgtggggattgattcagtgtttctcgtccttcttacctttgttcttagcttcgaagctgtctgcatcctcgttcagatgactatttgatttctcagtattttatgtagtgtaactgttacagcactagcccacgaaggcaatcagaacaattgccaagagccccatgtttgctcgtgatccaaggcatcttcaatttgaagctgatgtgaatcgtttgtttctctatacaaggtttgctaatatccaaagaaaaagcagatctggttttccactttttattgttgtcatttctttttacgaagtattgtgcttcttgcctgtgattggcggagaactcaaattagcacatcagcacttgcaattttgtgtacttggattctttcaagcttttgcctgccaatttgtttcttttaaatagttgtcatttcattctggttgttcataagtgaaagccatttgtgtgaatgtctggttagatgagttacatcttctcaactcttcatttaggctggtacccctaatcaaactgcaggaagtgtcgggatctccgagctcatggagattttgttatacctagttctcttgcaaaaccatttgtgaaggtaccatttcctgaatttcttctgctatgcacttagctattatcgtctcggggagaatgctgacgagaaggacgctgaggagattattgacttggctagcaaagcttctattgctgatcagcagaaacaagtgcaggataatgttcattatgaacttacgcatatgtgccaagcaatggatagcattttatgtcctgatacaataaacgacccatcaaaaggaccttcagaagcacataatcattctcagcgtagtggcttaagttttgccgttggtggtgctgcatctgcaaacaagcaaagtgcaattatccctgctacacgacctttaactcgagcagaattgtcaaagaaattcagggatcattttgggtacacacttgacatcggaccatctggaattcctcataaagacgcaggtcaaggtttattcttatcaggacaagcaaatgccggtgctgtcctagccatctatcctggtgttatatattcacctgcttactatcgatatatacctggatacccaagaattgatgtttgcaacaactatctaatcacaagatatgatgggacaataattgatgcaaaaccatggtgttttggtggtgaaacaagagcattatgggatggttcagatttggtggattacaatgctatggcacctaaaggctcagagaacaactctgatcgggtgtggagaatgctaagcaagcctctagaaaaaggtgtaagggaaaattttggtgaagtgcttgaacgacgaaatccccttgcttttggtcattttgcaaatcatccacccaaaggttcaagtcctaatgtcatgatctgcccatacgattttcctttgacagagaaggacatgagagtatacatccctaacattacgtttggtggtcaagagaccattaggatgaagaggtttggctccttctatttcaagtctggaggttctgataatcaggctggtgattctctagtactgaagacgctagtgctggtgagcacaaggtccatatgtgatgaagagctctttcttaattaccgttacagtaactcaaaaagacgaccagagtggtacagccctgtcgatgaagaagaggataagaggagatggagctagtttagcacttctgtatcattctggttgtgcatttttttggctaacttttttagttctttcccccctggaaattgcaactgagcattggtaagctcctgagatcgagatgacagttttgacttaattcgtcatttggtattacatactttggtgtcccaattaccatcatgataaaagttaagctactcatgtaagttctactctcaggtcctttgtggtgcttaaaggattacatttgttactccttttatgtgtgtctatcccaatgattatctatgaaagataaataatttatgcatatattgcct

SEQ ID NO: 50828 - DNA, 1862 bp, Zea Mays
ccgcgctgtatggtcttagcaagaaacgaaggatatatgcggcccaagttcgggctaaacccctccttctcccacgacgccgatccccgtcgccgccgcctcatttcctatcagtccgaaccgttcttccgtcctgctcaggcgttccgaccagcgttgctcgcttctcgtcactcccgccggctgctgctcttgtctacgccacggtagaatggctttcctcttcaacaagttccaagaggcaatcagaacaattgccaagagccccatgtttgctcgtgatccaaggcatcttcaatttgaagctgatgtgaatcgtttgtttctctatacaaggctggtacccctaatcaaactgcaggaagtgtcgggatctccgagctcatggagattttgttatacctagttctcttgcaaaaccatttgtgaaggtaccatttcctgaatttcttctgctatgcacttagctattatcgtctcggggagaatgctgacgagaaggacgctgaggagattattgacttggctagcaaagcttctattgctgatcagcagaaacaagtgcaggataatgttcattatgaacttacgcatatgtgccaagcaatggatagcattttatgtcctgatacaataaacgacccatcaaaaggaccttcagaagcacataatcattctcagcgtagtggcttaagttttgccgttggtggtgctgcatctgcaaacaagcaaagtgcaattatccctgctacacgacctttaactcgagcagaattgtcaaagaaattcagggatcattttgggtacacacttgacatcggaccatctggaattcctcataaagacgcaggtcaaggtttattcttatcaggacaagcaaatgccggtgctgtcctagccatctatcctggtgttatatattcacctgcttactatcgatatatacctggatacccaagaattgatgtttgcaacaactatctaatcacaagatatgatgggacaataattgatgcaaaaccatggtgttttggtggtgaaacaagagcattatgggatggttcagatttggtggattacaatgctatggcacctaaaggctcagagaacaactctgatcgggtgtggagaatgctaagcaagcctctagaaaaaggtgtaagggaaaattttggtgaagtgcttgaacgacgaaatccccttgcttttggtcattttgcaaatcatccacccaaaggttcaagtcctaatgtcatgatctgcccatacgattttcctttgacagagaaggacatgagagtatacatccctaacattacgtttggtggtcaagagaccattaggatgaagaggtttggctccttctatttcaagtctggaggttctgataatcaggctggtgattctctagtactgaagacgctagtgctggtgagcacaaggtccatatgtgatgaagagctctttcttaattaccgttacagtaactcaaaaagacgaccagagtggtacagccctgtcgatgaagaagaggataagaggagatggagctagtttagcacttctgtatcattctggttgtgcatttttttggctaacttttttagttctttcccccctggaaattgcaactgagcattggtaagctcctgagatcgagatgacagttttgacttaattcgtcatttggtattacatactttggtgtcccaattaccatcatgataaaagttaagctactcatgtaagttctactctcaggtcctttgtggtgcttaaaggattacatttgttactccttttatgtgtgtctatcccaatgattatctatgaaagataaataatttatgcatatattgcct

SEQ ID NO: 50829 - DNA, 1837 bp, Zea Mays
ccgcgctgtatggtcttagcaagaaacgaaggatatatgcggcccaagttcgggctaaacccctccttctcccacgacgccgatccccgtcgccgccgcctcatttcctatcagtccgaaccgttcttccgtcctgctcaggcgttccgaccagcgttgctcgcttctcgtcactcccgccggctgctgctcttgtctacgccacggtagaatggctttcctcttcaacaagttccaagaggcaatcagaacaattgccaagagccccatgtttgctcgtgatccaaggcatcttcaatttgaagctgatgtgaatcgtttgtttctctatacaaggaagtgtcgggatctccgagctcatggagattttgttatacctagttctcttgcaaaaccatttgtgaaggtaccatttcctgaatttcttctgctatgcacttagctattatcgtctcggggagaatgctgacgagaaggacgctgaggagattattgacttggctagcaaagcttctattgctgatcagcagaaacaagtgcaggataatgttcattatgaacttacgcatatgtgccaagcaatggatagcattttatgtcctgatacaataaacgacccatcaaaaggaccttcagaagcacataatcattctcagcgtagtggcttaagttttgccgttggtggtgctgcatctgcaaacaagcaaagtgcaattatccctgctacacgacctttaactcgagcagaattgtcaaagaaattcagggatcattttgggtacacacttgacatcggaccatctggaattcctcataaagacgcaggtcaaggtttattcttatcaggacaagcaaatgccggtgctgtcctagccatctatcctggtgttatatattcacctgcttactatcgatatatacctggatacccaagaattgatgtttgcaacaactatctaatcacaagatatgatgggacaataattgatgcaaaaccatggtgttttggtggtgaaacaagagcattatgggatggttcagatttggtggattacaatgctatggcacctaaaggctcagagaacaactctgatcgggtgtggagaatgctaagcaagcctctagaaaaaggtgtaagggaaaattttggtgaagtgcttgaacgacgaaatccccttgcttttggtcattttgcaaatcatccacccaaaggttcaagtcctaatgtcatgatctgcccatacgattttcctttgacagagaaggacatgagagtatacatccctaacattacgtttggtggtcaagagaccattaggatgaagaggtttggctccttctatttcaagtctggaggttctgataatcaggctggtgattctctagtactgaagacgctagtgctggtgagcacaaggtccatatgtgatgaagagctctttcttaattaccgttacagtaactcaaaaagacgaccagagtggtacagccctgtcgatgaagaagaggataagaggagatggagctagtttagcacttctgtatcattctggttgtgcatttttttggctaacttttttagttctttcccccctggaaattgcaactgagcattggtaagctcctgagatcgagatgacagttttgacttaattcgtcatttggtattacatactttggtgtcccaattaccatcatgataaaagttaagctactcatgtaagttctactctcaggtcctttgtggtgcttaaaggattacatttgttactccttttatgtgtgtctatcccaatgattatctatgaaagataaataatttatgcatatattgcct

SEQ ID NO: 50830 - DNA, 1654 bp, Zea Mays
gtcgccgccgcctcatttcctatcagtccgaaccgttcttccgtcctgctcaggcgttccgaccagcgttgctcgcttctcgtcactcccgccggctgctgctcttgtctacgccacggtagaatggctttcctcttcaacaagttccaagaggaagtgtcgggatctccgagctcatggagattttgttatacctagttctcttgcaaaaccatttgtgaaggtaccatttcctgaatttcttctgctatgcacttagctattatcgtctcggggagaatgctgacgagaaggacgctgaggagattattgacttggctagcaaagcttctattgctgatcagcagaaacaagtgcaggataatgttcattatgaacttacgcatatgtgccaagcaatggatagcattttatgtcctgatacaataaacgacccatcaaaaggaccttcagaagcacataatcattctcagcgtagtggcttaagttttgccgttggtggtgctgcatctgcaaacaagcaaagtgcaattatccctgctacacgacctttaactcgagcagaattgtcaaagaaattcagggatcattttgggtacacacttgacatcggaccatctggaattcctcataaagacgcaggtcaaggtttattcttatcaggacaagcaaatgccggtgctgtcctagccatctatcctggtgttatatattcacctgcttactatcgatatatacctggatacccaagaattgatgtttgcaacaactatctaatcacaagatatgatgggacaataattgatgcaaaaccatggtgttttggtggtgaaacaagagcattatgggatggttcagatttggtggattacaatgctatggcacctaaaggctcagagaacaactctgatcgggtgtggagaatgctaagcaagcctctagaaaaaggtgtaagggaaaattttggtgaagtgcttgaacgacgaaatccccttgcttttggtcattttgcaaatcatccacccaaaggttcaagtcctaatgtcatgatctgcccatacgattttcctttgacagagaaggacatgagagtatacatccctaacattacgtttggtggtcaagagaccattaggatgaagaggtttggctccttctatttcaagtctggaggttctgataatcaggctggtgattctctagtactgaagacgctagtgctggtgagcacaaggtccatatgtgatgaagagctctttcttaattaccgttacagtaactcaaaaagacgaccagagtggtacagccctgtcgatgaagaagaggataagaggagatggagctagtttagcacttctgtatcattctggttgtgcatttttttggctaacttttttagttctttcccccctggaaattgcaactgagcattggtaagctcctgagatcgagatgacagttttgacttaattcgtcatttggtattacatactttggtgtcccaattaccatcatgataaaagttaagctactcatgtaagttctactctcaggtcctttgtggtgcttaaaggattacatttgttactccttttatgtgtgtctatcccaatgattatctatgaaagataaataatttatgcatatattgcct

SEQ ID NO: 50831 - DNA, 1878 bp, Zea Mays
ctgattcctcctcgtcgcgtgcgtcaaagccaatcatggcgttcgtcatgaatttgttgacacgaggaaaattctgtcctgtactgcactctttgccccgataggcagatgctcggcacgcagtgggaattttgcgctttcaatatgtggggattgattcagtgtttctcgtccttcttacctttgttcttagcttcgaagctgtctgcatcctcgttcagatgactatttgatttctcagtattttatgtagtgtaactgttacagcactagcccacgaaggcaatcagaacaattgccaagagccccatgtttgctcgtgatccaaggcatcttcaatttgaagctgatgtgaatcgtttgtttctctatacaaggaagtgtcgggatctccgagctcatggagattttgttatacctagttctcttgcaaaaccatttgtgaaggtaccatttcctgaatttcttctgctatgcacttagctattatcgtctcggggagaatgctgacgagaaggacgctgaggagattattgacttggctagcaaagcttctattgctgatcagcagaaacaagtgcaggataatgttcattatgaacttacgcatatgtgccaagcaatggatagcattttatgtcctgatacaataaacgacccatcaaaaggaccttcagaagcacataatcattctcagcgtagtggcttaagttttgccgttggtggtgctgcatctgcaaacaagcaaagtgcaattatccctgctacacgacctttaactcgagcagaattgtcaaagaaattcagggatcattttgggtacacacttgacatcggaccatctggaattcctcataaagacgcaggtcaaggtttattcttatcaggacaagcaaatgccggtgctgtcctagccatctatcctggtgttatatattcacctgcttactatcgatatatacctggatacccaagaattgatgtttgcaacaactatctaatcacaagatatgatgggacaataattgatgcaaaaccatggtgttttggtggtgaaacaagagcattatgggatggttcagatttggtggattacaatgctatggcacctaaaggctcagagaacaactctgatcgggtgtggagaatgctaagcaagcctctagaaaaaggtgtaagggaaaattttggtgaagtgcttgaacgacgaaatccccttgcttttggtcattttgcaaatcatccacccaaaggttcaagtcctaatgtcatgatctgcccatacgattttcctttgacagagaaggacatgagagtatacatccctaacattacgtttggtggtcaagagaccattaggatgaagaggtttggctccttctatttcaagtctggaggttctgataatcaggctggtgattctctagtactgaagacgctagtgctggtgagcacaaggtccatatgtgatgaagagctctttcttaattaccgttacagtaactcaaaaagacgaccagagtggtacagccctgtcgatgaagaagaggataagaggagatggagctagtttagcacttctgtatcattctggttgtgcatttttttggctaacttttttagttctttcccccctggaaattgcaactgagcattggtaagctcctgagatcgagatgacagttttgacttaattcgtcatttggtattacatactttggtgtcccaattaccatcatgataaaagttaagctactcatgtaagttctactctcaggtcctttgtggtgcttaaaggattacatttgttactccttttatgtgtgtctatcccaatgattatctatgaaagataaataatttatgcatatattgcct

SEQ ID NO: 50832 - DNA, 1796 bp, Zea Mays
cggccgcgtcgctctgggtcagcgcggagcctgtgtatcagtgtatgccgtatgcttatatagatagccacacggccggggggcgatgtgacgacgcaccagcagcgaggagcagcggcagcggcggaccacgcatcctccctatcttcacgaaatcacgatggcgcccgcctgctccttgctcgcgctcgccctctcggtctgctccgtcgtcgcggtcgccgcggcgcagcaggtggacgccgtggccgcggcgcagcaggaggccgaccgcgtggctggtctgccggggcagccgcccgtggggttcgcgcagtacgccgggtacgtgaccgtgaacgagacgcacggccgcgcgctcttctactggttcttcgaggccaccgcgtcgcccgacaagaagccactggtgctctggctcaacggcgggcccggatgctcgtcgattgggtacggggaagcggaggagctggggcccttcctggtgcagaagggcaagccggagctcagatggaacaactactcctggaacacagaggccaaccttatgttcctggagtccccggtgggcgtcggattctcctacacaaacacgagctccgacctgctgcagctcggtgacaagatcaccgctgacgacgcttacaaattcctgctcaactggttcaagaggttcccgcagtacaagtcacacgatttctacatcgccggcgagagctacgccgggcactacgtcccgcagctgtcggagaagatcttcgacggcaacagggcggggcacaaggagagccacgtcaacttgaagggcctgatggtcgggaacgcgctcatggacgacgagacggaccagacgggcatgatcgactacgcctgggaccacgccgtcatctccgaccgggtgtacggcgacgtcaaggccaggtgcgacttcggcatggcgaacgtcaccgacgcctgcgacgccgcgctccaggagtacttcgccgtgtaccgcctcatcgacatgtacagcctctacaccccggtctgcaccgaccccgccagctcgtcggcgccctacgcgcggaaggttgccgttcacggcgccgcccccgggatcttctccagataccgaggatggatcatgaagccagcgggctacgacccctgcacggcggagtactcggaggtctacttcaatcggcccgacgtccaggcggcgctgcacgcgaacgtgacaaagatcggctacaactggacacgctgcagcgatgcgatctacacttggaacgacgccgccttctccaccctccccgtcatccgcaagctggtcgccggcggcctcaggttgtgggtgttcagcggcgacactgacggaaggatccccgtgacgtcgacgaggctcaccctccacaagctcgggctcaagaccgtccaggagtggacgccgtggttggtggatggacgatcgtgtacgagggcctgacattcgtcacgatccgcggcgctgggcatgaggtgcctttgtacgcgccgcggcaggcgcgtacgctcttcagcaacttcctggcaggcaccaagatgcccccaacggcgttcccctaactgctgtctccccctcttttctctctctctctctctctcgcttctaccaaagatgcatgtgtaattcgatcggaaaaaaaggaaaaggttcaggaataaaagtcagtcaggttttaatagagaagattcataatgctcaaaatcacaacgtactgtgctgtctcttgaatgtgtcctccaagactgtcgcagtagctgacagcatatgaaac

SEQ ID NO: 50833 - DNA, 1422 bp, Zea Mays
atatattgtcaatagaccaatagaattaccacttatataattaatattattaatacaaatagttccattggtctatttgtactttggagtgatacatgtttgccttgccccatctgtccttgcgccatgtttacggacacggggtgcactaactggttgtactggaaaataaaatttagacaatagggagtactcatgtgaggtcctagatttttgtacttctaacaacgccatatcattgttactaagcatgataacatggtgaacatatatttttagtagagctcagatcattttcattcaattcacacgacatagttgaacatataagaggaacgtatggctaaagctccgtctcggacggcttattatgcaaataatttgagctcgcaagagtaaatttacaaaagcataggattcaatgttctgaaatttacatgagacaaaacaaaaacaatgattgggtgaatattagaatccaaaaaagagacaatagttttgagaaagagagagcgcacacagtggatttgtcgattggattagctatacagaggggaaggttgtgtgtgcagtgtgcagtgatcgtctctagaatctgcattctataaggcaagaagataagatgcacacgacaagagttgttgagccgtccatttgagttttttctcctctgtacaccccctatcacacacacaacacactcctactctctctttgcggccggtctctgctttcagattcatttctaaccagggttcctccagcccagccgccgccactgttgaggagctcacatcgcctcgacacaacacggtataataactgggctgcgagcactatatggatgatggcttcacgaggcaccagtgccgtgctttcaagggctgctcggatgaggcaaaaactgcagtctgccttggaggccagtgccctagatattgaagacgtttcttaccaacatgccgggcatgcagccgtcaaggacaatgcgaacgagacgcacttcaacatcaaggttgtttcaccaaaatttgaggggcagaaccttgtgaagcgtcacaggatggtgtatgatcttctgagggatgagcttagctcaggcctccatgctgtctccattgttgcgaaaaccccgaaagagttagggtcttgattgtataacaatgttgaataagcactgtcctatgtttcgaaataagtctgtcgtagcagccatgacactgattgccaaaacaatgtcaccggcatgctcttcttattaagatctggctgcggagccagtttacctgcatttgctatgtggactttctgagctgaaagggaagcagaatatgggaggaaaatcgttgccagccatgagccatgtcgctgttgtacttgcatcgttgggtgggcaaaacgcaaaacatgtgaaattttttt

SEQ ID NO: 50834 - DNA, 2216 bp, Zea Mays
agactgacgctctaccactgagctataggggcatttcttacttaatgaagcataactacaatagtgaaccaatagagtaactgatgctactttccaccaaacataaacacataggttccctcagtaaaccacaagacacgtgtttccctcagtattcatctagtgccaggaatctctctagggtaggtaagacttggtcgagcaaggtgattcaaaaactttaaccccgacagtatgaaaattcggtagtacaagcaaagggccagaggccagcattttgaaatacgaaactattgcaaaaacgctacaggtaaaaagaagtagtcatgtgcattatgaagattttattccacatcttcctccttgtggacaacaagctcgccttcagtgaactcgcatggcttgatggccacatctaactgcttgcgcatttttcttacaacaaatccctcgctttcttcgcatattgtgaccacgatccctttccgcccaagacgtccagttcttccagctctgtgagcataatgtgtggagtcagttggaaggtccagattaaccacaaggtcacattctggcacgtccagtcctctggcagacagctcattcgtaacgagaactctgaattcaccatccttgaactttttcaaaactgtcgaccttgcaagctttccaaggtctccatgtagctcagtggctttgataccacgggcctccaacttaaacacaacatccttcagtggcttggtgttgttcataaatgcaatcactgtctgtgcttccagagcatggatgcacctccgtaatgtgtcaaccttgtgctgcgccttggccgtacaatagtagtgttccaaagatggcggcaagctgccaacagcagcttggttcactgactgcgatgacgaactggggttagcgtcactttgagataacgcaggtcttggcacagtgattgaatcaagtggaactacacttttagctctaatgagaactggatcatgaccccaactccttgctgctcgtataactgaaaatggtattgttgcagaaaccaggatagtctgacgctcagatcgtctcgcaagtgggccaagaatatccctagatgtgcctccaggtctccttccaacatgctccaaaattctatgcatatcttcacggtaattaaaagacagaagctggtcgacttcatctagtacaagaaaacggcagccatgagtgtgtagcttacctgctgcagaaatttcagaaatacggccaggtgttccgacaacaatgattggtttgttcttcttcaatgcttcttcctgcctggaacgattagctccgccaacaagttgctggaccagtcttttgtcattaggacccaaaatcttctccacttctcgcacaatctgcattcctaattctctcgaaggagcaacgatgactgcttctatacctgatcttttctcagaatggtcttgttccatagtcctcttcagagggcctatatcagaaagaattggaagaagataagcaagagttttccctgagccagtatatgactggatcacaacatcatgcttttgtgctattataggaattgctgcggattggacctcagttggggcagtcagaccttccttgttcaactggtcaacaagcaaaggtggcaaaccaagttcttcaaatgacttggccgaaaacagagcctcatctaccttcagtgtcttctttatcccagctggcttcatcaaggcactctttgctggtttgacatttgaagaaacctttggtttcacatagagggaagaagctcttgaacttggctttggacctccagttcgttccattttccccttttttccatattcaaccctgctttgcacttctaggctagcaagagtcaatggtcctcccctgttatcttccaaaatttgactaccacgccaagcagtctgatgaaatccagctacccgtggttgggacagcatcctgaacgaaacacgatctcccagaacaaaacatgaccgagaagatgccagcgcaagaacatttcgatggacttgcccaatacttagcctcatttcactcctcacagtgaaatcaatcacagcaccaaaattatcttttccttcgaagttcaaacctgttacaagttcacagcaaggtgctcttgtgtctgcggctggtaatcgctgagacgagctgcctaccctgcacaatttggatctggg

SEQ ID NO: 50835 - DNA, 1116 bp, Zea Mays
agatcgtttcttttcgttcaggattcccccttccgtcggctgcattcctacgcgcgtgttctgtctgtttctctcggccccctctcgctctccgacgactggtgggccgctgccggcgccgccgccttaacccaggtgttgaggctttcgttggtctcctcgccgtcgacgagcacccaccagaacttttcatgtaacaatcagtgatgcattttggttgtgttgccagtaaacatgatgtttggtgttaatactggtttatgcgcttcaaagtcctattaagttgctgttcaattgatcgacactcttaagtgtaggatgaattctaaacgtaggaggagtcatagcccagttgaatacaaggaaggccgtgacaaagattatgggacttctggaaagaaggataagtcaagagatctagatgacacatgtgatgctagaagaggtcatgaaaccgataggcactctgataagcattcctttggaacatcacgtgaatccaagaagcatgatgactatcggaggtaccatgataagtatggtgatgattatggtaggagccatccaagagcctctcggtcagaccgggaatcaagggctgatacttattatgatcgctcaaagcatgataacacatctggtagatcacgtggtgatcagcgagatgttggcagtaggtacggagaaaaatctgttaatcgagatcagaggagtataaatgaaggaaagcaggagtcccctcgtggctatcaaaagaatgatggcggagaatacaataaacatatggatgcaagaaagcaagagtacaaaggttatggagatgatagagatcattacagggttgttcgtaagaacaaggaaaccatcaaagaggaggaggactcgaagaggagaaatggaaaggaaattgagaaagaagctttggtggaaactagggataagaaaagaagtttattcagctctactgggccaaatgtggataatccaggcgatgtcaaactatcctcagccacaaatgaagccttggataacgctgcagaaaccgtagacggtgtgaatgcagctaaagttgcagctatgaaagctgctgaattagcaatgttgcatggtttaaag

SEQ ID NO: 50836 - DNA, 1166 bp, Zea Mays
agatcgtttcttttcgttcaggattcccccttccgtcggctgcattcctacgcgcgtgttctgtctgtttctctcggccccctctcgctctccgacgactggtgggccgctgccggcgccgccgccttaacccaggtgttgaggctttcgttggtctcctcgccgtcgacgagcacccaccaggatgaattctaaacgtaggaggagtcatagcccagttgaatacaaggaaggccgtgacaaagattatgggacttctggaaagaaggataagtcaagagatctagatgacacatgtgatgctagaagaggtcatgaaaccgataggcactctgataagcattcctttggaacatcacgtgaatccaagaagcatgatgactatcggaggtaccatgataagtatggtgatgattatggtaggagccatccaagagcctctcggtcagaccgggaatcaagggctgatacttattatgatcgctcaaagcatgataacacatctggtagatcacgtggtgatcagcgagatgttggcagtaggtacggagaaaaatctgttaatcgagatcagaggagtataaatgaaggaaagcaggagtcccctcgtggctatcaaaagaatgatggcggagaatacaataaacatatggatgcaagaaagcaagagtacaaaggttatggagatgatagagatcattacagggttgttcgtaagaacaaggaaaccatcaaagaggaggaggactcgaagaggagaaatggaaaggaaattgagaaagaagctttggtggaaactagggataagaaaagaagtttattcagctctactgggccaaatgtggataatccaggcgatgtcaaactatcctcagccacaaatgaagccttggataacgctgcagaaaccgtagacggtgtgaatgcagctaaagttgcagctatgaaagctgctgaattagtgaataggaacattgcagcatttggtgctggaactgggcgcctatcaactgatcagaagaaaaagcttctttggggtaacaaaacgagtaatccctctgaggagacaagtaaacgttgggacttattttctgaccgtgagcgccaagagaaatttaacaaactcatgttttagagtctgaggatgccttggtggctatggtatg

SEQ ID NO: 50837 - DNA, 1765 bp, Zea Mays
agatcgtttcttttcgttcaggattcccccttccgtcggctgcattcctacgcgcgtgttctgtctgtttctctcggccccctctcgctctccgacgactggtgggccgctgccggcgccgccgccttaacccaggtgttgaggctttcgttggtctcctcgccgtcgacgagcacccaccagaacttttcatgtaacaatcagtgatgcattttggttgtgttgccagtaaacatgatgtttggtgttaatactggtttatgcgcttcaaagtcctattaagttgctgttcaattgatcgacactcttaagtgtaggatgaattctaaacgtaggaggagtcatagcccagttgaatacaaggaaggccgtgacaaagattatgggacttctggaaagaaggataagtcaagagatctagatgacacatgtgatgctagaagaggtcatgaaaccgataggcactctgataagcattcctttggaacatcacgtgaatccaagaagcatgatgactatcggaggtaccatgataagtatggtgatgattatggtaggagccatccaagagcctctcggtcagaccgggaatcaagggctgatacttattatgatcgctcaaagcatgataacacatctggtagatcacgtggtgatcagcgagatgttggcagtaggtacggagaaaaatctgttaatcgagatcagaggagtataaatgaaggaaagcaggagtcccctcgtggctatcaaaagaatgatggcggagaatacaataaacatatggatgcaagaaagcaagagtacaaaggttatggagatgatagagatcattacagggttgttcgtaagaacaaggaaaccatcaaagaggaggaggactcgaagaggagaaatggaaaggaaattgagaaagaagctttggtggaaactagggataagaaaagaagtttattcagctctactgggccaaatgtggataatccaggcggttagttgattattttattcatgtactcttttttgtgcatacttttctatattcagtctcaggcagcgttaatttatggaattccacagatgtcaaactatcctcagccacaaatgaagccttggataacgctgcagaaaccgtagacggtgtgaatgcagctaaagttgcagctatgaaagctgctgaattagtgaataggaacattgcagcatttggtgctggaactgggcgcctatcaactgatcagaagaaaaagcttctttggggtaacaaaacgagtaatccctctgaggagacaagtaaacgttgggacttattttctgaccgtgagcgccaagagaaatttaacaaactcatgggtgtgaagagcagtgccccagttcaggaaaacacggtcgagaacaaggtcgggagctcggcggaagaagccaagaaactggaggagctcgacaccaacctggagaaacattacatagcaggcctccgcaggagagatggcaggacagtcggccttggcctgtagaaactctgcttgcagttgcagatgctgcggcattgaaaaatgcagagagcttgctctgtacaatctacagtgccttgtttattcttgcacttacaaaatttcctgtacggcttacgttgactgtttccgggttatcttgaagctctagaacatgtgtccctgattgacactcctgtactgcgtttgcataaccccgtcattcttgagtagtaattcaccggttattgttttctctttgcatccaaaga

SEQ ID NO: 50838 - DNA, 1524 bp, Zea Mays
agatcgtttcttttcgttcaggattcccccttccgtcggctgcattcctacgcgcgtgttctgtctgtttctctcggccccctctcgctctccgacgactggtgggccgctgccggcgccgccgccttaacccaggtgttgaggctttcgttggtctcctcgccgtcgacgagcacccaccaggaggagtcatagcccagttgaatacaaggaaggccgtgacaaagattatgggacttctggaaagaaggataagtcaagagatctagatgacacatgtgatgctagaagaggtcatgaaaccgataggcactctgataagcattcctttggaacatcacgtgaatccaagaagcatgatgactatcggaggtaccatgataagtatggtgatgattatggtaggagccatccaagagcctctcggtcagaccgggaatcaagggctgatacttattatgatcgctcaaagcatgataacacatctggtagatcacgtggtgatcagcgagatgttggcagtaggtacggagaaaaatctgttaatcgagatcagaggagtataaatgaaggaaagcaggagtcccctcgtggctatcaaaagaatgatggcggagaatacaataaacatatggatgcaagaaagcaagagtacaaaggttatggagatgatagagatcattacagggttgttcgtaagaacaaggaaaccatcaaagaggaggaggactcgaagaggagaaatggaaaggaaattgagaaagaagctttggtggaaactagggataagaaaagaagtttattcagctctactgggccaaatgtggataatccaggcgatgtcaaactatcctcagccacaaatgaagccttggataacgctgcagaaaccgtagacggtgtgaatgcagctaaagttgcagctatgaaagctgctgaattagtgaataggaacattgcagcatttggtgctggaactgggcgcctatcaactgatcagaagaaaaagcttctttggggtaacaaaacgagtaatccctctgaggagacaagtaaacgttgggacttattttctgaccgtgagcgccaagagaaatttaacaaactcatgggtgtgaagagcagtgccccagttcaggaaaacacggtcgagaacaaggtcgggagctcggcggaagaagccaagaaactggaggagctcgacaccaacctggagaaacattacatagcaggcctccgcaggagagatggcaggacagtcggccttggcctgtagaaactctgcttgcagttgcagatgctgcggcattgaaaaatgcagagagcttgctctgtacaatctacagtgccttgtttattcttgcacttacaaaatttcctgtacggcttacgttgactgtttccgggttatcttgaagctctagaacatgtgtccctgattgacactcctgtactgcgtttgcataaccccgtcattcttgagtagtaattcaccggttattgttttctctttgcatccaaaga

SEQ ID NO: 50839 - DNA, 763 bp, Zea Mays
agatcgtttcttttcgttcaggattcccccttccgtcggctgcattcctacgcgcgtgttctgtctgtttctctcggccccctctcgctctccgacgactggtgggccgctgccggcgccgccgccttaacccaggtgttgaggctttcgttggtctcctcgccgtcgacgagcacccaccagtgaataggaacattgcagcatttggtgctggaactgggcgcctatcaactgatcagaagaaaaagcttctttggggtaacaaaacgagtaatccctctgaggagacaagtaaacgttgggacttattttctgaccgtgagcgccaagagaaatttaacaaactcatgggtgtgaagagcagtgccccagttcaggaaaacacggtcgagaacaaggtcgggagctcggcggaagaagccaagaaactggaggagctcgacaccaacctggagaaacattacatagcaggcctccgcaggagagatggcaggacagtcggccttggcctgtagaaactctgcttgcagttgcagatgctgcggcattgaaaaatgcagagagcttgctctgtacaatctacagtgccttgtttattcttgcacttacaaaatttcctgtacggcttacgttgactgtttccgggttatcttgaagctctagaacatgtgtccctgattgacactcctgtactgcgtttgcataaccccgtcattcttgagtagtaattcaccggttattgttttctctttgcatccaaaga

SEQ ID NO: 50840 - DNA, 1569 bp, Zea Mays
agatcgtttcttttcgttcaggattcccccttccgtcggctgcattcctacgcgcgtgttctgtctgtttctctcggccccctctcgctctccgacgactggtgggccgctgccggcgccgccgccttaacccaggtgttgaggctttcgttggtctcctcgccgtcgacgagcacccaccaggatgaattctaaacgtaggaggagtcatagcccagttgaatacaaggaaggccgtgacaaagattatgggacttctggaaagaaggataagtcaagagatctagatgacacatgtgatgctagaagaggtcatgaaaccgataggcactctgataagcattcctttggaacatcacgtgaatccaagaagcatgatgactatcggaggtaccatgataagtatggtgatgattatggtaggagccatccaagagcctctcggtcagaccgggaatcaagggctgatacttattatgatcgctcaaagcatgataacacatctggtagatcacgtggtgatcagcgagatgttggcagtaggtacggagaaaaatctgttaatcgagatcagaggagtataaatgaaggaaagcaggagtcccctcgtggctatcaaaagaatgatggcggagaatacaataaacatatggatgcaagaaagcaagagtacaaaggttatggagatgatagagatcattacagggttgttcgtaagaacaaggaaaccatcaaagaggaggaggactcgaagaggagaaatggaaaggaaattgagaaagaagctttggtggaaactagggataagaaaagaagtttattcagctctactgggccaaatgtggataatccaggcggcagcgttaatttatggaattccacagatgtcaaactatcctcagccacaaatgaagccttggataacgctgcagaaaccgtagacggtgtgaatgcagctaaagttgcagctatgaaagctgctgaattagtgaataggaacattgcagcatttggtgctggaactgggcgcctatcaactgatcagaagaaaaagcttctttggggtaacaaaacgagtaatccctctgaggagacaagtaaacgttgggacttattttctgaccgtgagcgccaagagaaatttaacaaactcatgggtgtgaagagcagtgccccagttcaggaaaacacggtcgagaacaaggtcgggagctcggcggaagaagccaagaaactggaggagctcgacaccaacctggagaaacattacatagcaggcctccgcaggagagatggcaggacagtcggccttggcctgtagaaactctgcttgcagttgcagatgctgcggcattgaaaaatgcagagagcttgctctgtacaatctacagtgccttgtttattcttgcacttacaaaatttcctgtacggcttacgttgactgtttccgggttatcttgaagctctagaacatgtgtccctgattgacactcctgtactgcgtttgcataaccccgtcattcttgagtagtaattcaccggttattgttttctctttgcatccaaaga

SEQ ID NO: 50841 - DNA, 1415 bp, Zea Mays
cccttcccttcccttcatgctgtgcgaagccgagcaccgaaaccctaacctaaaaggatgaattctaaacgtaggaggagtcatagcccagttgaatacaaggaaggccgtgacaaagattatgggacttctggaaagaaggataagtcaagagatctagatgacacatgtgatgctagaagaggtcatgaaaccgataggcactctgataagcattcctttggaacatcacgtgaatccaagaagcatgatgactatcggaggtaccatgataagtatggtgatgattatggtaggagccatccaagagcctctcggtcagaccgggaatcaagggctgatacttattatgatcgctcaaagcatgataacacatctggtagatcacgtggtgatcagcgagatgttggcagtaggtacggagaaaaatctgttaatcgagatcagaggagtataaatgaaggaaagcaggagtcccctcgtggctatcaaaagaatgatggcggagaatacaataaacatatggatgcaagaaagcaagagtacaaaggttatggagatgatagagatcattacagggttgttcgtaagaacaaggaaaccatcaaagaggaggaggactcgaagaggagaaatggaaaggaaattgagaaagaagctttggtggaaactagggataagaaaagaagtttattcagctctactgggccaaatgtggataatccaggcgatgtcaaactatcctcagccacaaatgaagccttggataacgctgcagaaaccgtagacggtgtgaatgcagctaaagttgcagctatgaaagctgctgaattagtgaataggaacattgcagcatttggtgctggaactgggcgcctatcaactgatcagaagaaaaagcttctttggggtaacaaaacgagtaatccctctgaggagacaagtaaacgttgggacttattttctgaccgtgagcgccaagagaaatttaacaaactcatgggtgtgaagagcagtgccccagttcaggaaaacacggtcgagaacaaggtcgggagctcggcggaagaagccaagaaactggaggagctcgacaccaacctggagaaacattacatagcaggcctccgcaggagagatggcaggacagtcggccttggcctgtagaaactctgcttgcagttgcagatgctgcggcattgaaaaatgcagagagcttgctctgtacaatctacagtgccttgtttattcttgcacttacaaaatttcctgtacggcttacgttgactgtttccgggttatcttgaagctctagaacatgtgtccctgattgacactcctgtactgcgtttgcataaccccgtcattcttgagtagtaattcaccggttattgttttctctttgcatccaaaga

SEQ ID NO: 50842 - DNA, 3198 bp, Zea Mays
aagacctcacgggaggaggaagtaattaccgcgacaacagacgacggcgatgccagcagtccagcaccaaccacccttaataagtaaggcgcggggggcggcgctgcgcttggcagtcggtgagatcacaggattcacagggcgcaacggctgccgtcacgcgcggtcgctggggcgtgggcaactgggcgtgccggatctcatctaacgccgccacttgctgccacgacctcctcctcccccccccgcacacctctgacctccctccgtccatctcatcatcatctttgtccctctcgcgcaattcgccgaacacaccgcgcgcgcctcgcctcccagcgacggccgcctcgacggccaatgctggcggcgggatgagcgtggaggaggaggtggagcgcggggaggaggacctgttctacgagtcgctcgaccgcatcctctcctcgtcgggctcctccacctctgcctcggacgacgatggcgccgaccgcccgcgccaccgccgcagctgcgatgcgccagccgcagcggccctcgacctgtggacctcccagccggcgcccgtccatgagcggcggcgccggctgctccatctcatggggctcaccggcgatccttccctcgccggatttgagattgcccggtccgcctccggagaagccgcgggaccgcccccggcctctcccgtctcgtggtccaggtcaggcggggccgccctgggctccgccgggaagccgccgctcgggggcggccgtctgcgcttctccttgtccgacgggtccgatgccgccgacgaggaccccaggtgcctgatcaggaacctcgacgacggcagagagtacgtggtgagggaagaattcgctctccgcgaggtcggcacggggcgccaccttaccgttgaggagttggcccgttcacccatcgttcaggagcttatgcgccgccaagctttcagtactcccaactccaactgcacctcaaattcccaaagcggcacctccacgccgatcgagagatcgagctcaggttccagcaacggtggggggcgcgccaagcggcgtagcagctggctccgcagcatccgctgcgtagctggctccttcgcgtcccactcacgtgaccgccgcagcagcgacgagaaggacgcgtctccagagaaaggcgggcaccactccagctccacgacggatgacagccaggacagtgttccacgccatggtccggcccgtgtcaaggtgcggcagtatgggaagtcatataaggagctcagtggcctgtttatgacacaggagatacaggcacacagtggttccatatggagcatcaaatttagtcctgatggccgttaccttgcgactgctggggaggattgcgtaattcatgtttgggaggtgttggagtttgagagggcaaggaaggagaatgaggtgtgcaatccgcttgttgctatggtgtgcaatgagtcatcagagacaacggtgggatcagctgctccaagtgagagccattgggagaagaagctgagatcaaaggtactgcacggtgggggatcggtgagctcagacaggttgatggtgcctgagtatgtgtttgcactgtccgagaagcccgtgataacctttgcagggcattcagaggatgtgcttgatctcagctggtccaaatctcagtatttgctttcatcatcaatggataaaaccgtacggttgtggcacatgtcaagcacttattgtttgaaaaccttctcacacactgactatgtgacttgcatccagttcaatcctgttgatgatagatacttcattagtggttccctggatgagaaggttcgcatttggagtattccaaagcgtgaaatagttgattgggtcgaccttcatgaaatggttactgctgcctgctatactccagatggaaagggcgctctggttgggtcccacaagggcagctgccatctgtatgatacatctggtacatcggcttgcattttaatgacatgctttgctacaaaacacagatcgacctacaaaacaagagaaggaaatctagccagaagaaaataacaggatttcagtttgtcccaggggattcttcaatggtcataatcacatctgcagattcacggatcagagttcttgatggttttgagctagcgcataggtttaaaggattccgaaacacaagcagccaaatctcagcttgtttagctggaaatgggcggtatattatctcggcaagtgaggattcccatgtatatatctggagaaacaatgatggtccgaaaccaagtagaaagaagggcattgtttctgtcacagatagccatgaatacttccactgccagagtgtgacagttgctgttacctggccttttgccagcaccgcaatgacttgtttaatgaaccccgggaagcaagaagagcttgagcgtgggtctgagccgcaagatctgcaaaccaaacttgccaaggcacaggagatgccagatgttgagtaccggagcacaaatatcacgagtaacaactcgaatcataataatggtgaccggacatctccgacttggcctgaaaaacttaacacaccaccaaatcaaagtctcagggctactacctgccatgccaacgagggagatcaagctctgaatcggtcggcctggggcctagtgattgtcacagcaggccgtggaggtcaaatcagaacatttcaaaactttggttttcctgtaagagtatagcatgaatatgaatacgtaagataatagtcactgccattcaggagtgtagtttgtgtatagataggagatagtgggtgagtttcacactattcagggattgggtctgattgttccttggcgtgcatgctagagatcagaatcttcatctgacatacactgtgtactgcgaaacttggtatttatttaccctgaggcctaaattgtacacgaaagagaaagccctagagagcaacactatcagctgactgcagataatttatctgtccgctaaaacccctcctttcgctattactattccgaaccattgcatgttcttgtaagaaaaaaaaatacatgtggtgaaattgtcgttttggctttgtggtctcatggtattggaaccgtgaataatttttacatgttcgaacagtcctggcaaatgcagtgtttatgcgtcagataagtcaataaagaagaaaaaa

SEQ ID NO: 50843 - DNA, 3007 bp, Zea Mays
caggattcacagggcgcaacggctgccgtcacgcgcggtcgctggggcgtgggcaactgggcgtgccggatctcatctaacgccgccacttgctgccacgacctcctcctcccccccccgcacacctctgacctccctccgtccatctcatcatcatctttgtccctctcgcgcaattcgccgaacacaccgcgcgcgcctcgcctcccagcgacggccgcctcgacggccaatgctggcggcgggatgagcgtggaggaggaggtggagcgcggggaggaggacctgttctacgagtcgctcgaccgcatcctctcctcgtcgggctcctccacctctgcctcggacgacgatggcgccgaccgcccgcgccaccgccgcagctgcgatgcgccagccgcagcggccctcgacctgtggacctcccagccggcgcccgtccatgagcggcggcgccggctgctccatctcatggggctcaccggcgatccttccctcgccggatttgagattgcccggtccgcctccggagaagccgcgggaccgcccccggcctctcccgtctcgtggtccaggtcaggcggggccgccctgggctccgccgggaagccgccgctcgggggcggccgtctgcgcttctccttgtccgacgggtccgatgccgccgacgaggaccccaggtgcctgatcaggaacctcgacgacggcagagagtacgtggtgagggaagaattcgctctccgcgaggtcggcacggggcgccaccttaccgttgaggagttggcccgttcacccatcgttcaggagcttatgcgccgccaagctttcagtactcccaactccaactgcacctcaaattcccaaagcggcacctccacgccgatcgagagatcgagctcaggttccagcaacggtggggggcgcgccaagcggcgtagcagctggctccgcagcatccgctgcgtagctggctccttcgcgtcccactcacgtgaccgccgcagcagcgacgagaaggacgcgtctccagagaaaggcgggcaccactccagctccacgacggatgacagccaggacagtgttccacgccatggtccggcccgtgtcaaggtgcggcagtatgggaagtcatataaggagctcagtggcctgtttatgacacaggagatacaggcacacagtggttccatatggagcatcaaatttagtcctgatggccgttaccttgcgactgctggggaggattgcgtaattcatgtttgggaggtgttggagtttgagagggcaaggaaggagaatgaggtgtgcaatccgcttgttgctatggtgtgcaatgagtcatcagagacaacggtgggatcagctgctccaagtgagagccattgggagaagaagctgagatcaaaggtactgcacggtgggggatcggtgagctcagacaggttgatggtgcctgagtatgtgtttgcactgtccgagaagcccgtgataacctttgcagggcattcagaggatgtgcttgatctcagctggtccaaatctcagtatttgctttcatcatcaatggataaaaccgtacggttgtggcacatgtcaagcacttattgtttgaaaaccttctcacacactgactatgtgacttgcatccagttcaatcctgttgatgatagatacttcattagtggttccctggatgagaaggttcgcatttggagtattccaaagcgtgaaatagttgattgggtcgaccttcatgaaatggttactgctgcctgctatactccagatggaaagggcgctctggttgggtcccacaagggcagctgccatctgtatgatacatctgatgacatgctttgctacaaaacacagatcgacctacaaaacaagagaaggaaatctagccagaagaaaataacaggatttcagattcacggatcagagttcttgatggttttgagctagcgcataggtttaaaggattccgaaacacaagcagccaaatctcagcttgtttagctggaaatgggcggtatattatctcggcaagtgaggattcccatgtatatatctggagaaacaatgatggtccgaaaccaagtagaaagaagggcattgtttctgtcacagatagccatgaatacttccactgccagagtgtgacagttgctgttacctggccttttgccagcaccgcaatgacttgtttaatgaaccccgggaagcaagaagagcttgagcgtgggtctgagccgcaagatctgcaaaccaaacttgccaaggcacaggagatgccagatgttgagtaccggagcacaaatatcacgagtaacaactcgaatcataataatggtgaccggacatctccgacttggcctgaaaaacttaacacaccaccaaatcaaagtctcagggctactacctgccatgccaacgagggagatcaagctctgaatcggtcggcctggggcctagtgattgtcacagcaggccgtggaggtcaaatcagaacatttcaaaactttggttttcctgtaagagtatagcatgaatatgaatacgtaagataatagtcactgccattcaggagtgtagtttgtgtatagataggagatagtgggtgagtttcacactattcagggattgggtctgattgttccttggcgtgcatgctagagatcagaatcttcatctgacatacactgtgtactgcgaaacttggtatttatttaccctgaggcctaaattgtacacgaaagagaaagccctagagagcaacactatcagctgactgcagataatttatctgtccgctaaaacccctcctttcgctattactattccgaaccattgcatgttcttgtaagaaaaaaaaatacatgtggtgaaattgtcgttttggctttgtggtctcatggtattggaaccgtgaataatttttacatgttcgaacagtcctggcaaatgcagtgtttatgcgtcagataagtcaataaagaagaaaaaa

SEQ ID NO: 50844 - DNA, 1546 bp, Zea Mays
tataaactttgccggatttagagaagttaaatagaaatgagtatttgctttcatcatcaatggataaaaccgtacggttgtggcacatgtcaagcacttattgtttgaaaaccttctcacacactgactatgtgacttgcatccagttcaatcctgttgatgatagatacttcattagtggttccctggatgagaaggttcgcatttggagtattccaaagcgtgaaatagttgattgggtcgaccttcatgaaatggttactgctgcctgctatactccagatggaaagggcgctctggttgggtcccacaagggcagctgccatctgtatgatacatctgatgacatgctttgctacaaaacacagatcgacctacaaaacaagagaaggaaatctagccagaagaaaataacaggatttcagtttgtcccaggggattcttcaatggtcataatcacatctgcagattcacggatcagagttcttgatggttttgagctagcgcataggtttaaaggattccgaaacacaagcagccaaatctcagcttgtttagctggaaatgggcggtatattatctcggcaagtgaggattcccatgtatatatctggagaaacaatgatggtccgaaaccaagtagaaagaagggcattgtttctgtcacagatagccatgaatacttccactgccagagtgtgacagttgctgttacctggccttttgccagcaccgcaatgacttgtttaatgaaccccgggaagcaagaagagcttgagcgtgggtctgagccgcaagatctgcaaaccaaacttgccaaggcacaggagatgccagatgttgagtaccggagcacaaatatcacgagtaacaactcgaatcataataatggtgaccggacatctccgacttggcctgaaaaacttaacacaccaccaaatcaaagtctcagggctactacctgccatgccaacgagggagatcaagctctgaatcggtcggcctggggcctagtgattgtcacagcaggccgtggaggtcaaatcagaacatttcaaaactttggttttcctgtaagagtatagcatgaatatgaatacgtaagataatagtcactgccattcaggagtgtagtttgtgtatagataggagatagtgggtgagtttcacactattcagggattgggtctgattgttccttggcgtgcatgctagagatcagaatcttcatctgacatacactgtgtactgcgaaacttggtatttatttaccctgaggcctaaattgtacacgaaagagaaagccctagagagcaacactatcagctgactgcagataatttatctgtccgctaaaacccctcctttcgctattactattccgaaccattgcatgttcttgtaagaaaaaaaaatacatgtggtgaaattgtcgttttggctttgtggtctcatggtattggaaccgtgaataatttttacatgttcgaacagtcctggcaaatgcagtgtttatgcgtcagataagtcaataaagaagaaaaaa

SEQ ID NO: 50845 - DNA, 4034 bp, Zea Mays
caaaaatttaaatccgtataataattgcaaggcgataataccaacggaccaacctacccacccgcaccctctcttgtgcacctccggctcccagtccactgcctcctgccaaaataaatccgtccgctctccagcttggtggcacaatcccatcgaaagctagggtttcaagcctcttccgacttctccttcccttcccttccccaccacaacgcggccgccatagacgcggtaccgcgcgaactcccatagatctgagcgagccaccctgcgaatcatcccctgacgcaccaaatctggtcagaaacggtgaagagttcggacacgatcttaagcgtcgttgatttaagaccacacacaaacacatctgtttgcccttcccccctatttttttcctgtttcggacgattcataagaacagacctgcaaggtttgcagatctacctgttcaagaaccagggaccttgttttggacgcccagaacgaacccttgaccctgcggatctgctcgatccgttttggatctgcttgcttttttctggatctagagagaatgttcaagtcgatggtttatttcgtgaacatctcaatcggggaggttgaggtgtggcccaagggccaggcgagcgcaggcctggccgtggcggcgtgggcgcgagatatccgcgttgaccgcctttccccgcccagcgagcggtgccctccgctggccgtcatgcacaccgtggccgtcgccgcccgatgcctcgtcatggagtccaggccgcccgtcgccgccgacgtggcgtcgctgcctctcgtcgacatgcacgccgcttgcctcagggacaacaagaccgcggttgttgcacttggagatgaagaattgcatttagttgcgatgacatccagaagaaacttgacaaatcatgcatgtttctggggctacaagttgccatttggtttgtataattcttgcttgaccatgttaaatctacggtgcctgggaatcgtgtttgaccttgatgagacattggttgtcgccaatacatcacggtctttcgaggacagaattgatgcacttcaaagaaagctgagcaatgagactgatccacagcgtagaaatggtatgctatcagagatcaagaggtaccaagatgataaatccatcttaaagcaatatatagaaggtgatcaggtctatgatgacggtaaagtgtataaagcacaacctgagattgttccaccattgtctgataaccagcaaacaatgacacgcccagttataagattacaagaaaaagacattatcctgacaagaataaatcctctgattagggataccagtgtgcttgtacgtttaaggccagcctgggaggatcttcgcagctacttaattgccagaggtcgcaaacgttttgaggtctatgtgtgtacgatggctgaaagagactatgctttagaaatgtggagattgcttgatccagattcaagattaattaattctgttcgacttcatgataggatggtgtgcgtaaaatctggtttaaagaagtccttgctaaatgtcttccatgatggttcttgtcatcctggtatggcattagtaattgatgatcgtctgaaagtttgggatgagaaggatcaattacgagtccatgtggttcctgcatttactccatattatgctccacaggcagagagacttcgatgaaggactcttaccaaggattagtaatgttcattatgaagatgaagtaaatgatatctcatctgcgccagatgttggcaattatttgataacagaggatgagaatgtcgcattagtgaatggaaatagagattcattgccttttgatggtatgtcagatgcagagattgaacggagaatgaaggaagccaatgctcaagcattccatcaaacagcgactaactttgtcatgccagtagcccctgctcagaattttgtttcgtcttcagttgcaccattagcgccacctcttagcatgatgccgcctccattcagccagccagttgttcagccaggtttttcagatccactgcaaggttctccagctagagaagagggtgaagttcctgagtctgagttggatccagacacaaggagaaggcttctcatattgcagcatggtcaagacacaagagatcctacacctccacacccagcgataccaccagtgcaagttccagttcctccagtgcaacctcatgggaattggtttcccacagaggatgggataaacccaagtaacctgagtagaggttcagcaggtttcaccgttgaatccgattctatgccctatgagaaaaaacaaccacctcatccttcattctttcatggtggggatagtcctatgtcgtctgatagatttggctatcagaaccagaggtttccctctcagctaccgcacaccgaggatcaccacatgcttcagaaccatgcacctccaaaatacagatccttttctggtgaggagctagcaactcggcatgttccctcaagccaaagaaaccatatagaatcaggaagacacttttcacaatatgctgggacctctgctggcgtattagagggcattgctgtgaaatgcggatctaaggtggagtacaggtcaacattatgtgataccgcagaactacaattctctattgaggtttggattgttggagaaaagtttggtgaaggaattggtaggacaaggagagaagcacagcgccaagctgcagaaatgtctttaagaaacttggccaataaatacttgtcatctgatccaaataagttgactgatatgaaacaagatgctttcggtagcaacagaaacatctttggttactctggaaatactagggatgatatgttgccactttcaagtacttctgaggaatctcgctttatgaaaatggaggagaacaattccaggaaaacaggagattctgtcactgctctcaaggaactttgcacagttgagggatataacttagtttttcaagcctgtccatctccagcagatggtttagttgggaaagaatcttatgctcaggtacaaattggtaggcaaattctaggcaaaggagttgggttaacatgggaagaggccaagctccaggctgctgatgaggctcttggaactttaagatccatgctaggtcaacttggtcatagacgatctggctctccaaggtcattggcaccgaattttaacaagcggttcaagccagattttccaaggaccgtgcaaagagttccttatggaacatattctagaatcgaaggccatgctccttagatgcctgcatgaatgatgtgcctgggcactacattttgaaagtggacgaagctttgaactgtgaggtctccacaaattgaatacaagccctggattcttggcttcttgtgggcttccaaggctctcacaggccaccactggccatgagagtaccgacgaatatatttatggaagggccaagaaactgtgaagtatgaatggtggccatgacttcatacagaatttcactgccgttgaccagtcgccagtgttaccccatgctgtcaacttggcataattgttgacctggaagttttatggttgaaccagggattgatgcaggcttgcggctccatttcatttctgggtgtatgccaggaatccatggatcaaagggcagcgctgtagttggacacttttttttcccgtgctctggttcagttgaaagttggaccccagtaggttggagccttagcatgtagccagttttattagtgctaagtttttaggcaagttataagttatagcacagaattgagtacttgacagtgttaccgttacattgtttatgtagtcatcttcattagcagcctaggcaggcaacatgaatccagtagctgacagcattcatttactatatatataattatagtatgttgtagtcatcttgtaatagaatatgcccccgtttcttgggaatctgtgcctctaattctgttgtcccttttctggttgtgtcccactcgctctgaatgtgcatgcatttgt

SEQ ID NO: 50846 - DNA, 3950 bp, Zea Mays
caaaaatttaaatccgtataataattgcaaggcgataataccaacggaccaacctacccacccgcaccctctcttgtgcacctccggctcccagtccactgcctcctgccaaaataaatccgtccgctctccagcttggtggcacaatcccatcgaaagctagggtttcaagcctcttccgacttctccttcccttcccttccccaccacaacgcggccgccatagacgcggtaccgcgcgaactcccatagatctgagcgagccaccctgcgaatcatcccctgacgcaccaaatctggtcagaaacggtgaagagttcggacacgatcttaagcgtcgttgatttaagaccacacacaaacacatctgtttgcccttcccccctatttttttcctgtttcggacgattcataagaacagacctgcaaggtttgcagatctacctgttcaagaaccagggaccttgttttggacgcccagaacgaacccttgaccctgcggatctgctcgatccgttttggatctgcttgcttttttctggatctagagagaatgttcaagtcgatggtttatttcgtgaacatctcaatcggggaggttgaggtgtggcccaagggccaggcgagcgcaggcctggccgtggcggcgtgggcgcgagatatccgcgttgaccgcctttccccgcccagcgagcggtgccctccgctggccgtcatgcacaccgtggccgtcgccgcccgatgcctcgtcatggagtccaggccgcccgtcgccgccgacgtggcgtcgctgcctctcgtcgacatgcacgccgcttgcctcagggacaacaagaccgcggttgttgcacttggagatgaagaattgcatttagttgcgatgacatccagaagaaacttgacaaatcatgcatgtttctggggctacaagttgccatttggtttgtataattcttgcttgaccatgttaaatctacggtgcctgggaatcgtgtttgaccttgatgagacattggttgtcgccaatacatcacggtctttcgaggacagaattgatgcacttcaaagaaagctgagcaatgagactgatccacagcgtagaaatggtatgctatcagagatcaagaggtaccaagatgataaatccatcttaaagcaatatatagaaggtgatcaggtctatgatgacggtaaagtgtataaagcacaacctgagattgttccaccattgtctgataaccagcaaacaatgacacgcccagttataagattacaagaaaaagacattatcctgacaagaataaatcctctgattagggataccagtgtgcttgtacgtttaaggccagcctgggaggatcttcgcagctacttaattgccagaggtcgcaaacgttttgaggtctatgtgtgtacgatggctgaaagagactatgctttagaaatgtggagattgcttgatccagattcaagattaattaattctgttcgacttcatgataggatggtgtgcgtaaaatctggtttaaagaagtccttgctaaatgtcttccatgatggttcttgtcatcctggtatggcattagtaattgatgatcgtctgaaagtttgggatgagaaggatcaattacgagtccatgtggttcctgcatttactccatattatgctccacaggcagagagacttcgatgaaggactcttaccaaggattagtaatgttcattatgaagatgaagtaaatgatatctcatctgcgccagatgttggcaattatttgataacagaggatgagaatgtcgcattagtgaatggaaatagagattcattgccttttgatggtatgtcagatgcagagattgaacggagaatgaaggaagccaatgctcaagcattccatcaaacagcgactaactttgtcatgccagtagcccctgctcagaattttgtttcgtcttcagttgcaccattagcgccacctcttagcatgatgccgcctccattcagccagccagttgttcagccaggtttttcagatccactgcaaggttctccagctagagaagagggtgaagttcctgagtctgagttggatccagacacaaggagaaggcttctcatattgcagcatggtcaagacacaagagatcctacacctccacacccagcgataccaccagtgcaagttccagttcctccagtgcaacctcatgggaattggtttcccacagaggatgggataaacccaagtaacctgagtagaggttcagcaggtttcaccgttgaatccgattctatgccctatgagaaaaaacaaccacctcatccttcattctttcatggtggggatagtcctatgtcgtctgatagatttggctatcagaaccagaggtttccctctcagctaccgcacaccgaggatcaccacatgcttcagaaccatgcacctccaaaatacagatccttttctggtgaggagctagcaactcggcatgttccctcaagccaaagaaaccatatagaatcaggaagacacttttcacaatatgctgggacctctgctggcgtattagagggcattgctgtgaaatgcggatctaaggtggagtacaggtcaacattatgtgataccgcagaactacaattctctattgaggtttggattgttggagaaaagtttggtgaaggaattggtaggacaaggagagaagcacagcgccaagctgcagaaatgtctttaagaaacttggccaataaatacttgtcatctgatccaaataagttgactgatatgaaacaagatgctttcggtagcaacagaaacatctttggttactctggaaatactagggatgatatgttgccactttcaagtacttctgaggaatctcgctttatgaaaatggaggagaacaattccaggaaaacaggagattctgtcactgctctcaaggaacttgtacaaattggtaggcaaattctaggcaaaggagttgggttaacatgggaagaggccaagctccaggctgctgatgaggctcttggaactttaagatccatgctaggtcaacttggtcatagacgatctggctctccaaggtcattggcaccgaattttaacaagcggttcaagccagattttccaaggaccgtgcaaagagttccttatggaacatattctagaatcgaaggccatgctccttagatgcctgcatgaatgatgtgcctgggcactacattttgaaagtggacgaagctttgaactgtgaggtctccacaaattgaatacaagccctggattcttggcttcttgtgggcttccaaggctctcacaggccaccactggccatgagagtaccgacgaatatatttatggaagggccaagaaactgtgaagtatgaatggtggccatgacttcatacagaatttcactgccgttgaccagtcgccagtgttaccccatgctgtcaacttggcataattgttgacctggaagttttatggttgaaccagggattgatgcaggcttgcggctccatttcatttctgggtgtatgccaggaatccatggatcaaagggcagcgctgtagttggacacttttttttcccgtgctctggttcagttgaaagttggaccccagtaggttggagccttagcatgtagccagttttattagtgctaagtttttaggcaagttataagttatagcacagaattgagtacttgacagtgttaccgttacattgtttatgtagtcatcttcattagcagcctaggcaggcaacatgaatccagtagctgacagcattcatttactatatatataattatagtatgttgtagtcatcttgtaatagaatatgcccccgtttcttgggaatctgtgcctctaattctgttgtcccttttctggttgtgtcccactcgctctgaatgtgcatgcatttgt

SEQ ID NO: 50847 - DNA, 4105 bp, Zea Mays
caaaaatttaaatccgtataataattgcaaggcgataataccaacggaccaacctacccacccgcaccctctcttgtgcacctccggctcccagtccactgcctcctgccaaaataaatccgtccgctctccagcttggtggcacaatcccatcgaaagctagggtttcaagcctcttccgacttctccttcccttcccttccccaccacaacgcggccgccatagacgcggtaccgcgcgaactcccatagatctgagcgagccaccctgcgaatcatcccctgacgcaccaaatctggtcagaaacggtgaagagttcggacacgatcttaagcgtcgttgatttaagaccacacacaaacacatctgtttgcccttcccccctatttttttcctgtttcggacgattcataagaacagacctgcaaggtttgcagatctacctgttcaagaaccagggaccttgttttggacgcccagaacgaacccttgaccctgcggatctgctcgatccgttttggatctgcttgcttttttctggatctagagagaatgttcaagtcgatggtttatttcgtgaacatctcaatcggggaggttgaggtgtggcccaagggccaggcgagcgcaggcctggccgtggcggcgtgggcgcgagatatccgcgttgaccgcctttccccgcccagcgagcggtgccctccgctggccgtcatgcacaccgtggccgtcgccgcccgatgcctcgtcatggagtccaggccgcccgtcgccgccgacgtggcgtcgctgcctctcgtcgacatgcacgccgcttgcctcagggacaacaagaccgcggttgttgcacttggagatgaagaattgcatttagttgcgatgacatccagaagaaacttgacaaatcatgcatgtttctggggctacaagttgccatttggtttgtataattcttgcttgaccatgttaaatctacggtgcctgggaatcgtgtttgaccttgatgagacattggttgtcgccaatacatcacggtctttcgaggacagaattgatgcacttcaaagaaagctgagcaatgagactgatccacagcgtagaaatggtatgctatcagagatcaagaggtaccaagatgataaatccatcttaaagcaatatatagaaggtgatcaggtctatgatgacggtaaagtgtataaagcacaacctgagattgttccaccattgtctgataaccagcaaacaatgacacgcccagttataagattacaagaaaaagacattatcctgacaagaataaatcctctgattagggataccagtgtgcttgtacgtttaaggccagcctgggaggatcttcgcagctacttaattgccagaggtcgcaaacgttttgaggtctatgtgtgtacgatggctgaaagagactatgctttagaaatgtggagattgcttgatccagattcaagattaattaattctgttcgacttcatgataggatggtgtgcgtaaaatctggtttaaagaagtccttgctaaatgtcttccatgatggttcttgtcatcctggtatggcattagtaattgatgatcgtctgaaagtttgggatgagaaggatcaattacgagtccatgtggttcctgcatttactccatattatgctccacaggcagaggcaaattgttctatcccggttctttgtgtagccagaaacgttgcatgcaatgttaggggtggtttcttcaaagacttcgatgaaggactcttaccaaggattagtaatgttcattatgaagatgaagtaaatgatatctcatctgcgccagatgttggcaattatttgataacagaggatgagaatgtcgcattagtgaatggaaatagagattcattgccttttgatggtatgtcagatgcagagattgaacggagaatgaaggaagccaatgctcaagcattccatcaaacagcgactaactttgtcatgccagtagcccctgctcagaattttgtttcgtcttcagttgcaccattagcgccacctcttagcatgatgccgcctccattcagccagccagttgttcagccaggtttttcagatccactgcaaggttctccagctagagaagagggtgaagttcctgagtctgagttggatccagacacaaggagaaggcttctcatattgcagcatggtcaagacacaagagatcctacacctccacacccagcgataccaccagtgcaagttccagttcctccagtgcaacctcatgggaattggtttcccacagaggatgggataaacccaagtaacctgagtagaggttcagcaggtttcaccgttgaatccgattctatgccctatgagaaaaaacaaccacctcatccttcattctttcatggtggggatagtcctatgtcgtctgatagatttggctatcagaaccagaggtttccctctcagctaccgcacaccgaggatcaccacatgcttcagaaccatgcacctccaaaatacagatccttttctggtgaggagctagcaactcggcatgttccctcaagccaaagaaaccatatagaatcaggaagacacttttcacaatatgctgggacctctgctggcgtattagagggcattgctgtgaaatgcggatctaaggtggagtacaggtcaacattatgtgataccgcagaactacaattctctattgaggtttggattgttggagaaaagtttggtgaaggaattggtaggacaaggagagaagcacagcgccaagctgcagaaatgtctttaagaaacttggccaataaatacttgtcatctgatccaaataagttgactgatatgaaacaagatgctttcggtagcaacagaaacatctttggttactctggaaatactagggatgatatgttgccactttcaagtacttctgaggaatctcgctttatgaaaatggaggagaacaattccaggaaaacaggagattctgtcactgctctcaaggaactttgcacagttgagggatataacttagtttttcaagcctgtccatctccagcagatggtttagttgggaaagaatcttatgctcaggtacaaattggtaggcaaattctaggcaaaggagttgggttaacatgggaagaggccaagctccaggctgctgatgaggctcttggaactttaagatccatgctaggtcaacttggtcatagacgatctggctctccaaggtcattggcaccgaattttaacaagcggttcaagccagattttccaaggaccgtgcaaagagttccttatggaacatattctagaatcgaaggccatgctccttagatgcctgcatgaatgatgtgcctgggcactacattttgaaagtggacgaagctttgaactgtgaggtctccacaaattgaatacaagccctggattcttggcttcttgtgggcttccaaggctctcacaggccaccactggccatgagagtaccgacgaatatatttatggaagggccaagaaactgtgaagtatgaatggtggccatgacttcatacagaatttcactgccgttgaccagtcgccagtgttaccccatgctgtcaacttggcataattgttgacctggaagttttatggttgaaccagggattgatgcaggcttgcggctccatttcatttctgggtgtatgccaggaatccatggatcaaagggcagcgctgtagttggacacttttttttcccgtgctctggttcagttgaaagttggaccccagtaggttggagccttagcatgtagccagttttattagtgctaagtttttaggcaagttataagttatagcacagaattgagtacttgacagtgttaccgttacattgtttatgtagtcatcttcattagcagcctaggcaggcaacatgaatccagtagctgacagcattcatttactatatatataattatagtatgttgtagtcatcttgtaatagaatatgcccccgtttcttgggaatctgtgcctctaattctgttgtcccttttctggttgtgtcccactcgctctgaatgtgcatgcatttgt

SEQ ID NO: 50848 - DNA, 1358 bp, Zea Mays
aaaagctttagtgattaatgagagagatttgttgtgttcatttgagctcttgcgcttggattgcttctttttctcattctttcttgcgataatctcaattgtaatcaaggcaagggacaccaattgtgtggtggtccttgcgggaagtttggttcccatttgattgagaagagaagctcactcagtccaagggaccgtttgagagagggaaagggttgaaagagacccggtctttgtgaccacctcaacggggagtaggtttgcaagaaccgaacctcggtaaaacaaatcatcgtgtctcgctctttattcgctcatgatttgttttgcgccctttctctcggactcatttatatttctaacgctaacccggcttgtagttgtgattaagtttgtaaatttcagattcgccctattcacccccctctaggcgactttcagataacatagcacgatatattgttggcaaatcttgcgaagttatcttacgatctacaaatgcagcgacaccaattcctccagatttagctcagattgtttcactcaaattcacctttagagtaataccagatgacagttttttcgataaccaagatcaggtccccattgcccttcgcatcatctctataactgcagcgcatggtagacaacatgcactaccattgaagccaaccaatatcatagaaggtacatcaacaccacaaaacaagttacaactgcagttaatcgagaactcaccatcaaatccttttcaaaatttatccacaagtactccaccacccatacaggctgcaaggaagctaatatatccaccgctcagtaaccccctcacatatcaacatactcccaagtctgatggcgaagaagaaattacagagcaaacaatggacaccagtcaaatcaaaggaaaaaaaagtatgccctcattcgaatctcctccaaaaaggttcaagaaaggaagcttacatatccaaagcaatgatgacgatgtgcaggagaaataaacacagatgtttagagcgccaaattttcttgcttttgacacatgtcttctacaaactttggtgtaatccgatctaaaacgtatttgcctgacaaagtacctacgaactttcttttgatgtaaacaatatatccatgccgaaacaaatactacaactagaaaggcatgtagctatagttctgacatgccatcttttgcggtctttaggaccaatattttggtgcctcaacaaatatgtacatataactaggaatttgctatcaactatggttagcttacaacccactgtaatataacacatccaatctggacgtgatcctatatttgcatatcccaacttttcagtggtacaaac

SEQ ID NO: 50849 - DNA, 3360 bp, Zea Mays
ctagatagtttttcacatttttctgcttctagagcgtaagcatttttaaccttaacatgaatcttgttttctttaataaggaagtcctcttgggagtccaaaagatcatccttttcatgaatagcactaatcaattcatttaaatttttttgttgcatgtttaggttggcaaaaagagtgcgcaagttatcctcctcatcactagcattatcctcatcactagaggtttcatatttagtggaggattttgattttaccttcttccttttgccgtcctttgccatgaggcacttgtggccgacgttggggaagagaagacccttggtgatggcgatgtttgtggcgtcctcgtcggaggaggagtcggtggagctctcgtcggagtcctattcccggcaaacatgggcatcgccgcccttcttcttgtagtatctcttcttctcccttcttctccccttcttgtcgtcgcccctgtcactatcactagataatggacatttagcaatgaaatgaccgggcttaccacacttgtagcatactttcttggagcggggtttgtagtccttccccctcctttgtttgaggatttggcggaagctcttgatgatgagcgccatttcctcgttgtcgatcttagaggcatcgatgggttgtctacttgaagtagactcctccttcttctcctccgtcgccttgaatgcgactggttgtgctttggacgtggaggggccatctagctcgttgattttctttgagcctttgatcatcaactcaaagctcacaaagtttcctatcacttcctcgggagtcattagtgtatatctaggattaccacgaattaattgaacttgagtagggttaaggaaaacaagtgatctaagaataaccttaaccatctcatggtcatcccatttcttactcccgaggttgcgcacttggttcaccaaggttttgagccggttgtacatgtcttgtggctcctccccttgacgaagtcggaagcgaccgagctccccctcgatcgtttcccgcttggtgattttggtcacctcgtctccttcgtgcgcggtctttagcgtgtcccaaatctccttagcacttttcaacccttgcaccttattatactcctctcgacttagataggcaaggaatatagttgtggctagggagttgaagtgttggatttgggccacttcgtcctcatcataatcttcatcccctacggatggtacctgtacaccaaactcaacaacatcccatatacttttgtggagtgaggttaggtgaaatcgcataaaatcactccacctagcataatcttcaccatcaaacgttggtggtttgcctaatgggacggaaagtaatggtgtatgtttagaaatgcgaggatagcgttgggggatcttactaaacttcttacgctcatggcgcttagaagttacggacggcgtgtcggagccggaggtggatggcgacgaggtgtcggtctcgtagtagaccactttcctcatcttcttcttcttgtcaccgctccgacgcgacttgtgtgaaggggattccttttccttccccttgttgcgggactctcccgatggagctttcccgtggcttgtagcgggcttctcgccggtgaccatttccttcttggtgtgatctcccgacatcacttcgagcggttagtctctaatgaagcaccgggctctgataccaattgaaagtcgcctagagagggggtgaatagggcgaatctgaaatttacaaacttaatcacaactacaagtcgggttagcgttagaaatataaacgagtccgagagagagggcgcaaaacaaatcatgagcgaataaagagcgagacacgatgatttgttttaccgaggttaggttcttgcaaacctactccccgttgaggtggtcacaaagaccgggtctctttcaaccatttccctctctcaaacggtccctcggaccgagtgagcttctcttctcaatcaaatgggaaccaaacttcccgcaaggaccaccacacaattggtgtctcttgccttgattacaattgagatgatcgcaagaaagaatgagaaaaagaagcaatccaagcgcaagagctcaaatgaacacaacaaatctctcttctaaagctttgtgtggagttgggagaggatttgatctctttggtgtgtcttgtattgaatgctagctcttatagtagttggaaggtgaaaaacttggatgacttgaatgtgggagtggttggggtatttatagccccaaccaccaaacttgactgttggtggaggctgctgtcgacgggcgcaccggacactgtctggtgcgccagccacgtcacctggccgttgggttctcaccattagagttctgacttgtgggcccgcctggctgtccggtggtgcaccggacaggccctacaggttgtccggtgtgccacccacgcgtgctctcctcctctgcgcgcgcaggcgcgcatttaatgcgccgcagtcgaccgttgcgcgcgaagtagccgttgctccgctgtcacaccggtcagtctggtgtgcaccggacagtccggtgaattttagcggagcggattcccgaagctggcgagttcagagtcgctctcccttggggcaccagacactgtccggtggtgcaccggacagtccggtgaattatagcggagcgcctctgagaattcccgaaggtgaggagttcagcttggagtcccctggtgcaccggacactgtccggtgcgacagactagggtgcctttcgggttgccttttgctctcttgtttgaacccttttcttggtctttttattggcttattgtgaacctttggcacctgtagaacttatagactagagaaaactagttagtccaattatttgggttgggcaattcaaccaccaaaataaattaggaaaaaggtgtaagcctaattccctttcattatcaaagcaaaacatttgtgctatggctgttgcatctgatgctcgaaatttgagcttgtatctgtcattaagaggcattgtgatagcaattaaaaatctatgcttagaatgttgttataaaattgggtgatgtaaataacaatggataatagtaatatgtcatggttaggtttgtttataaagcaatggaattgtttatgtaaaaaagtgttgtcagtatgtctaatttattcaccatatgaatattgaagatgttgattacttacttgaatttgtagccatcccatttacacaaatcacaataatatgttgtattatgtggagttgtttttcgaccgcattttgtgcatgatggataccgccatgtgtttgatgtatctatttcgatgattgtcactgtgca

SEQ ID NO: 50850 - DNA, 1520 bp, Zea Mays
gtcaaccggatcggtcggggccgggggcgaaggcgaactgcatgccagcatgcgtcgtctgccgttactagaaacgcggacgctttggactctgtcaaaacgaaagagattctacagtactgctgcattcttcctggccggcccgcagtggtaccaccgtagtagtaggagcagcaggcgacagaaaggttaaaaataaaatgtgacgctgtcagacgaggaccacgtaccacgggcccgggtgtacgcatagtatgcctttctggctgcagcagcagttggatcttgggaacgtgccatgcattgcatcgttttccctctctcttcactggattcagcgaacacagcggacggcgtgcaggtacgggggcaagaacatcgccttccacgtgaacgagggctccactagcttctggctctccctgctggtggagttcgaggacggcgacggcgacatcggatccatgcagctcaaacaggccaactcggcgcagtggcgagacatgcagcacgtctggggggccacgtggagcctcaccccgggcccgctcgtcgggcccttctccgtgcggctgacgaccctgtcgggcaagcagacgctcacggcccaggacgtcatccccaagaactgggcccccaaggccacctacacctcccgcctcaacttcgcgtagaggccttctgccttggcccgccgcgtatctatcgttctgtgcagtttgatgtcgcgtgaaggggataagctggtatagtagtggataaacctggtgtttagggcccaggtagccctctccgaactggagagagagcgtctgattggtcggcgtgggccgcatgcttcctggaggctggaaatgggagctcgatccggtgaagagcggctggggaaccaaaggcgtgagcgtgacgtgactcctcttcgttttcgatggactcatgcagtgcttatttctgtgttcttctctcttaacttatctattgttgttgttatattttcgtgcccttggtacatgggctgtaacttgctgtcacctatgcgcaccgtaaactataataatcatgtattgttcgttatgttagtcatcaacgactgttgccgttacaaaaaaaaaaagaagcaaagctcgaatgatcagttgcagtggagtgtaacttgtgacttatgcgctacttcagctgctgttgtagccggccgtgctccctttcacagacgctctgttactcgtcatcatagtactaagtggagttgcaactgatcaggctgtatatcaatggcaaatcacactcacgtcggtggtagcaggtcctgtcgtgaagtgctctcatccagattcgtgattttgagacgcgctccggcaacatcctcattcctcagccggattaatcagctgcaaaatcagcggagttgacagaagatgatcatagatcttaacacaatcttaagtgacgttttgaatcaaggtgctgttgttcttttggcaaagggagctatgtaagctgccacgagtggcattcctttt

SEQ ID NO: 50851 - DNA, 1651 bp, Zea Mays
gtcattataaataaacgtcctaacaaagactcgattttttccatgatgcaacaaccaaagtagcgcgacgagattttttttgctgtgatgacagcgccttttgtttatttctcggccaacgagaaagggcttggcacggggggcttcaggttcaggcaccaccgttgtttgcctataaaacgacctaccaactgcgcgtccttctgagaccccagagcgaagaagccccggcctcctgtagagctggtctccctctgaccctctctcctctgcgcttccgctgcgtcggccggccctgctcgtagcttggaggcggcggcattctccggcaatggggtgcaaggcgtgcgacaagcccaagcccaactaccgcaagggcctgtggtcgccggaggaggaccagaagctccgcgactacattctcctccacggccacggctgctggagcgcgctccccgcgaaagccggtggtccaggatcgcacggcacttgcctggcaggaccgacaacgaggtcaagaactactggaactcgtacctcaagaagagggtcgagggcaaggaccaggggcccagcacgcccgcgccggcggcgtccaattcggacgacgactcgcactgcgtcaagcagcgcagggacgacgacggcacggcggactccggcgcgtcggagccgcgcgagtcgtcgtcggccgacgactcgagctgcctgacggacccgcacgcctgcaggccccacgcgcccgtgccgcccaaggtcatgttcgcggactggctggacatggactacgtgggcggtgccctgccggcgacagcaccagcagcacctggtctgctcggcgctgcgggcgtggccacggccagcacgggcgaccgcgatcagcatcaggtgatgagcatgagccaggggtccgttcaggtggatgggccatccggtgccgatgtgtccctgcacggcttcgatgacagcggcgccggctgctgggagttccaggagcacttcgatgccatcgatcacatgcaggcggccggcttctgcgacctgctctccatgagcgactacttcggcctcgactagactccaaccctggttggtcatccatcgttggtgaaaggatttgcgtttttttttatttacactttgttagaagtctcggtgaaaggcttgcttgtgttgtaaattactgtcgtgtacgtatagatagaggaattttaaaaagcagataaaagtcaaggacctacattgtaaaaatgttgtcgtgtttgttgtggttcgctttgtagagtagagcaccgacggaaggaaaaggaacagatgtagtagttatactagcaagtacacatacgttgctacctttacatttatacttgagtgtcaaatataaatataaagacatgtgtgttttattgtctaggtagatatgattgtgggtttagagtcaacaatcatagttcaaatacccgtttacgtatgattttagttgtttatcgttcaaatgtgagcctgataacggtgcaaagtggtgttccatattatagagatatatgaatagaaaaatattgagagttacacgcttgcatctagctattgggttgcgcagattgtgttttcttaattcgaaaatagagcatcatctttccgtatctttttt

SEQ ID NO: 50852 - DNA, 1323 bp, Zea Mays
gcggcacagggctccagcggaacggcaagagctgcaggctgcggtggatcaactaccttcggccggggctgaagcacggcatgttctccccggaggaggaggagacggtgatgagcctccacgccacgctcggcaacaagtggtccaggatcgcacggcacttgcctggcaggaccgacaacgaggtcaagaactactggaactcgtacctcaagaagagggtcgagggcaaggaccaggggcccagcacgcccgcgccggcggcgtccaattcggacgacgactcgcactgcgtcaagcagcgcagggacgacgacggcacggcggactccggcgcgtcggagccgcgcgagtcgtcgtcggccgacgactcgagctgcctgacggacccgcacgcctgcaggccccacgcgcccgtgccgcccaaggtcatgttcgcggactggctggacatggactacgtgggcggtgccctgccggcgacagcaccagcagcacctggtctgctcggcgctgcgggcgtggccacggccagcacgggcgaccgcgatcagcatcaggtgatgagcatgagccaggggtccgttcaggtggatgggccatccggtgccgatgtgtccctgcacggcttcgatgacagcggcgccggctgctgggagttccaggagcacttcgatgccatcgatcacatgcaggcggccggcttctgcgacctgctctccatgagcgactacttcggcctcgactagactccaaccctggttggtcatccatcgttggtgaaaggatttgcgtttttttttatttacactttgttagaagtctcggtgaaaggcttgcttgtgttgtaaattactgtcgtgtacgtatagatagaggaattttaaaaagcagataaaagtcaaggacctacattgtaaaaatgttgtcgtgtttgttgtggttcgctttgtagagtagagcaccgacggaaggaaaaggaacagatgtagtagttatactagcaagtacacatacgttgctacctttacatttatacttgagtgtcaaatataaatataaagacatgtgtgttttattgtctaggtagatatgattgtgggtttagagtcaacaatcatagttcaaatacccgtttacgtatgattttagttgtttatcgttcaaatgtgagcctgataacggtgcaaagtggtgttccatattatagagatatatgaatagaaaaatattgagagttacacgcttgcatctagctattgggttgcgcagattgtgttttcttaattcgaaaatagagcatcatctttccgtatctttttt

SEQ ID NO: 50853 - DNA, 1208 bp, Zea Mays
tgtaccgcaaggctgaactgtgctgtggtccaggatcgcacggcacttgcctggcaggaccgacaacgaggtcaagaactactggaactcgtacctcaagaagagggtcgagggcaaggaccaggggcccagcacgcccgcgccggcggcgtccaattcggacgacgactcgcactgcgtcaagcagcgcagggacgacgacggcacggcggactccggcgcgtcggagccgcgcgagtcgtcgtcggccgacgactcgagctgcctgacggacccgcacgcctgcaggccccacgcgcccgtgccgcccaaggtcatgttcgcggactggctggacatggactacgtgggcggtgccctgccggcgacagcaccagcagcacctggtctgctcggcgctgcgggcgtggccacggccagcacgggcgaccgcgatcagcatcaggtgatgagcatgagccaggggtccgttcaggtggatgggccatccggtgccgatgtgtccctgcacggcttcgatgacagcggcgccggctgctgggagttccaggagcacttcgatgccatcgatcacatgcaggcggccggcttctgcgacctgctctccatgagcgactacttcggcctcgactagactccaaccctggttggtcatccatcgttggtgaaaggatttgcgtttttttttatttacactttgttagaagtctcggtgaaaggcttgcttgtgttgtaaattactgtcgtgtacgtatagatagaggaattttaaaaagcagataaaagtcaaggacctacattgtaaaaatgttgtcgtgtttgttgtggttcgctttgtagagtagagcaccgacggaaggaaaaggaacagatgtagtagttatactagcaagtacacatacgttgctacctttacatttatacttgagtgtcaaatataaatataaagacatgtgtgttttattgtctaggtagatatgattgtgggtttagagtcaacaatcatagttcaaatacccgtttacgtatgattttagttgtttatcgttcaaatgtgagcctgataacggtgcaaagtggtgttccatattatagagatatatgaatagaaaaatattgagagttacacgcttgcatctagctattgggttgcgcagattgtgttttcttaattcgaaaatagagcatcatctttccgtatctttttt

SEQ ID NO: 50854 - DNA, 2459 bp, Zea Mays
cgtgacgaagccttcctcttcgacgctccactgcgtctgcgccactgcggattgaagtaatttgccagggccattagcgtaattgctcctccgttaatacaaacccacagttgccctaataaggtttcgagtcttacgacgatccggcgacgctacctttccgtcgctcctcccccacccacgaaccctgccggaagggcaaaaaggggttcgaaattggtcctgatccaggagccaatcctacagacttcacctcccaaattcttttcccgatccgatctgcaagttctccttggatcctgcatcctccagccgattcctgggaagatctgaatcctcctctcgaccatggatccacgcgccaggtatccttcgggcatgggcaacggccgcggtgggaacctcaactactacggccgcggcccaccgccgcaacagccgcatcagcaccacaaccaccagcagacgtcgggggcgcaccaccaccagcagacgtcgggggcgcaccaccaccagcagtacgcgcagaggcagcaccagcaccagcaccacggccacaatcgccatcagcaacagcagcagcaccacatttaccagcagcaacagcagcagtggctgcggcggagccagattgcccgcgagacctcgggcgcagccgtgaccagcgagccgaagtccctggcgccatccacggccgccgatggcgtcgattcgagttcacaagattggaaggcccaattgaagctgccgcctccagatacacgctacaggacagaggatgttacagctaccaagggaaatgagtttgaagactattttctcaagcgtgaactcctaatgggtatatacgagaagggatttgaaagaccgtctcctatccaagaggaaagcattcctattgctttaactggtagtgacattcttgcaagagcgaagaacggaactggcaagactgctgcattttgtattcctgcactggaaaagattgatcaagaaaaaaatgctattcaagttgttatattggttcccacaagggaattggctctgcaaacatcacaagtttgcaaggagcttggtaagcatttgaagatccaggttatggtcaccactggtggaaccagtttgaaggatgatattgttcgtctgtaccaacctgtgcacttactcgttggaacacctgggcgtattttggatcttacaaagaaaggtgtttgcattttgaacgactgttcaatgcttattatggatgaggcagacaagcttctctctcctgagtttcaaccttccatagaacagttgattcgctacctccctgctagtcgacagattttgatgttttcagcgacattccctgtgactgttaaggagtttaaggacaaatatctgcctaaaccttatgtgattaaccttatggacgaacttacactgaagggaattacacagttctatgcttttgtggaagaaagacagaaagttcactgtctcaacactctcttttccaagcttcaaatcaaccagtcaataatattttgtaactctgtaaatcgtgttgaactattggcgaaaaagatcacagagcttggctattcttgcttctatattcatgcaaagatgctacaggaccaccgtaatagagttttccatgatttccgtaatggagcatgcaggaaccttgtttgcactgatctttttacaaggggaatagatattcaagctgtgaatgttgttatcaattttgatttccccaagaactctgaaacatatctccacagggttggtagatctgggagatttggccaccttggtctggccgttaatttgatcacctatgaggaccggtttaacttgtataggattgaacaagagcttgggactgaaataaaatcaattcctcctcagatagaccaggctatatactgccaataatctgaccgttttcatatgctttcatttctccgcgaataatgagaacttttgtaaataccagctcatcaggacattttaaccctgttgctggttctgggcgtgtgatctgtcggtgctcacacaagcttgttgcccgagtcgaacttggggatgtgggcctcagatgggttattgggtgacaggtcggccattgaacttgaagtctggagtctgaacggtagtgaactggttaagtttgcaaataatcggtggtgagctgcatcatgttgtgctgtcttacccttgcagtcatgtcacttttgcttggtgccgtggtcaccatttagatttgcttggataaaacgctcgtcacgtttgtgctgactttgtgttcggcacaagcaacctgtccaggttatgtgtaaagaactgtttacttgtttttttcataataacaaacgttgcagctgtttttgcactctgtttctttccttttcgtgatataattacctgagctgctcaggttagagaaatcttggaaacaaacatctagt

SEQ ID NO: 50855 - DNA, 2707 bp, Zea Mays
cgtgacgaagccttcctcttcgacgctccactgcgtctgcgccactgcggattgaagtaatttgccagggccattagcgtaattgctcctccgttaatacaaacccacagttgccctaataaggtttcgagtcttacgacgatccggcgacgctacctttccgtcgctcctcccccacccacgaaccctgccggaagggcaaaaaggggttcgaaattggtcctgatccaggagccaatcctacagacttcacctcccaaattcttttcccgatccgatctgcaagttctccttggatcctgcatcctccagccgattcctgggaagatctgaatcctcctctcgaccatggatccacgcgccaggtatccttcgggcatgggcaacggccgcggtgggaacctcaactactacggccgcggcccaccgccgcaacagccgcatcagcaccacaaccaccagcagacgtcgggggcgcaccaccaccagcagacgtcgggggcgcaccaccaccagcagtacgcgcagaggcagcaccagcaccagcaccacggccacaatcgccatcagcaacagcagcagcaccacatttaccagcagcaacagcagcagtggctgcggcggagccagattgcccgcgagacctcgggcgcagccgtgaccagcgagccgaagtccctggcgccatccacggccgccgatggcgtcgattcgagttcacaagattggaaggcccaattgaagctgccgcctccagatacacgctacaggacagaggatgttacagctaccaagggaaatgagtttgaagactattttctcaagcgtgaactcctaatgggtatatacgagaagggatttgaaagaccgtctcctatccaagaggaaagcattcctattgctttaactggtagtgacattcttgcaagagcgaagaacggaactggcaagactgctgcattttgtattcctgcactggaaaagattgatcaagaaaaaaatgctattcaagttgttatattggttcccacaagggaattggctctgcaaacatcacaagtttgcaaggagcttggtaagcatttgaagatccaggttatggtcaccactggtggaaccagtttgaaggatgatattgttcgtctgtaccaacctgtgcacttactcgttggaacacctgggcgtattttggatcttacaaagaaaggtgtttgcattttgaacgactgttcaatgcttattatggatgagacaagcttctctctcctgagtttcaaccttccatagaacagttgattcgctacctccctgctagtcgacagattttgatgttttcagcgacattccctgtgactgttaaggagtttaaggacaaatatctgcctaaaccttatgtgattaaccttatggacgaacttacactgaagggaattacacagttctatgcttttgtggaagaaagacagaaagttcactgtctcaacactctcttttccaagcttcaaatcaaccagtcaataatattttgtaactctgtaaatcgtgttgaactattggcgaaaaagatcacagagcttggctattcttgcttctatattcatgcaaagatgctacaggaccaccgtaatagagttttccatgatttccgtaatggagcatgcaggaaccttgtttgcactgatctttttacaaggggaatagatattcaagctgtgaatgttgttatcaattttgatttccccaagaactctgaaacatatctccacagggttggtagatctgggagatttggccaccttggtctggccgttaatttgatcacctatgaggaccggtttaacttgtataggattgaacaagagcttgggactgaaataaaatcaattcctcctcagatagaccaggctatatactgccaataatctgaccgttttcatatgctttcatttctccgcgaataatgagaacttttgtaaataccagctcatcaggttttatggtgttgatctcgtttgttgcatcagagacaattctatgttggtggataacattagatgaggcacccaactttttttattacaccttgtcatgctgacactgttatggctatatgagggcaaatgtcctgccacattaggcacaaagtagtgtatattctaggtgcctattcctaggccctgtcctgcttttagtttctttttctcttattttcatcctattgtgtcattagctgtttcacacaggacattttaaccctgttgctggttctgggcgtgtgatctgtcggtgctcacacaagcttgttgcccgagtcgaacttggggatgtgggcctcagatgggttattgggtgacaggtcggccattgaacttgaagtctggagtctgaacggtagtgaactggttaagtttgcaaataatcggtggtgagctgcatcatgttgtgctgtcttacccttgcagtcatgtcacttttgcttggtgccgtggtcaccatttagatttgcttggataaaacgctcgtcacgtttgtgctgactttgtgttcggcacaagcaacctgtccaggttatgtgtaaagaactgtttacttgtttttttcataataacaaacgttgcagctgtttttgcactctgtttctttccttttcgtgatataattacctgagctgctcaggttagagaaatcttggaaacaaacatctagt

SEQ ID NO: 50856 - DNA, 2394 bp, Zea Mays
cgtgacgaagccttcctcttcgacgctccactgcgtctgcgccactgcggattgaagtaatttgccagggccattagcgtaattgctcctccgttaatacaaacccacagttgccctaataaggtttcgagtcttacgacgatccggcgacgctacctttccgtcgctcctcccccacccacgaaccctgccggaagggcaaaaaggggttcgaaattggtcctgatccaggagccaatcctacagacttcacctcccaaattcttttcccgatccgatctgcaagttctccttggatcctgcatcctccagccgattcctgggaagatctgaatcctcctctcgaccatggatccacgcgccaggtatccttcgggcatgggcaacggccgcggtgggaacctcaactactacggccgcggcccaccgccgcaacagccgcatcagcaccacaaccaccagcagacgtcgggggcgcaccaccaccagcagacgtcgggggcgcaccaccaccagcagtacgcgcagaggcagcaccagcaccagcaccacggccacaatcgccatcagcaacagcagcagcaccacatttaccagcagcaacagcagcagtggctgcggcggagccagattgcccgcgagacctcgggcgcagccgtgaccagcgagccgaagtccctggcgccatccacggccgccgatggcgtcgattcgagttcacaagattggaaggcccaattgaagctgccgcctccagatacacgctacaggacagaggatgttacagctaccaagggaaatgagtttgaagactattttctcaagcgtgaactcctaatgggtatatacgagaagggatttgaaagaccgtctcctatccaagaggaaagcattcctattgctttaactggtagtgacattcttgcaagagcgaagaacggaactggcaagactgctgcattttgtattcctgcactggaaaagattgatcaagaaaaaaatgctattcaagttgttatattggttcccacaagggaattggctctgcaaacatcacaagtttgcaaggagcttggtaagcatttgaagatccaggttatggtcaccactggtggaaccagtttgaaggatgatattgttcgtctgtaccaacctgtgcacttactcgttggaacacctgggcgtattttggatcttacaaagaaaggtgtttgcattttgaacgactgttcaatgcttattatggatgaggcagacaagcttctctctcctgagtttcaaccttccatagaacagttgattcgctacctccctgctagtcgacagattttgatgttttcagcgacattccctgtgactgttaaggagtttaaggacaaatatctgcctaaaccttatgtgattaaccttatggacgaacttacactgaagggaattacacagttctatgcttttgtggaagaaagacagaaagttcactgtctcaacactctcttttccaagcttcaaatcaaccagtcaataatattttgtaactctgtaaatcgtgttgaactattggcgaaaaagatcacagagcttggctattcttgcttctatattcatgcaaagatgctacaggaccaccgtaatagagttttccatgatttccgtaatggagcatgcaggaaccttgtttgcactgatctttttacaaggggaatagatattcaagctgtgaatgttgttatcaattttgatttccccaagaactctgaaacatatctccacagggttggtagatctgggagatttggccaccttggtctggccgttaatttgatcacctatgaggaccggtttaacttgtataggattgaacaagagcttgggactgaaataaaatcaattcctcctcagatagaccaggctatatactgccaataatctgaccgttttcatatgctttcatttctccgcgaataatgagaacttttgtaaataccagctcatcaggttttatggtgttgatctcgtttgttgcatcagagacaattctatgttggtggataacattagatgaggtttatgctggccagaaatctcaacatgttactggcttgcccccgaaaaggttgtatgtgtatatatacactaattaattcaccttccctgcctgggcgagccttctctcgccatggctttggccaggtgaactaaaagtggcaactggcaagtgcaaacgacctctcgctccctcgtgacacgccttcgtgccagcatgggaggaatgttttctgccttccaccatatatggggacagccagaggtgaaatccagatgaacccaaaattatgctttgccaattgcccataggggacaactgagctacagtatagttctcgagttcctttc

SEQ ID NO: 50857 - DNA, 3202 bp, Zea Mays
cgtgacgaagccttcctcttcgacgctccactgcgtctgcgccactgcggattgaagtaatttgccagggccattagcgtaattgctcctccgttaatacaaacccacagttgccctaataaggtttcgagtcttacgacgatccggcgacgctacctttccgtcgctcctcccccacccacgaaccctgccggaagggcaaaaaggggttcgaaattggtcctgatccaggagccaatcctacagacttcacctcccaaattcttttcccgatccgatctgcaagttctccttggatcctgcatcctccagccgattcctgggaagatctgaatcctcctctcgaccatggatccacgcgccaggtatccttcgggcatgggcaacggccgcggtgggaacctcaactactacggccgcggcccaccgccgcaacagccgcatcagcaccacaaccaccagcagacgtcgggggcgcaccaccaccagcagacgtcgggggcgcaccaccaccagcagtacgcgcagaggcagcaccagcaccagcaccacggccacaatcgccatcagcaacagcagcagcaccacatttaccagcagcaacagcagcagtggctgcggcggagccagattgcccgcgagacctcgggcgcagccgtgaccagcgagccgaagtccctggcgccatccacggccgccgatggcgtcgattcgagttcacaagattggaaggcccaattgaagctgccgcctccagatacacgctacaggacagaggatgttacagctaccaagggaaatgagtttgaagactattttctcaagcgtgaactcctaatgggtatatacgagaagggatttgaaagaccgtctcctatccaagaggaaagcattcctattgctttaactggtagtgacattcttgcaagagcgaagaacggaactggcaagactgctgcattttgtattcctgcactggaaaagattgatcaagaaaaaaatgctattcaagttgttatattggttcccacaagggaattggctctgcaaacatcacaagtttgcaaggagcttggtaagcatttgaagatccaggttatggtcaccactggtggaaccagtttgaaggatgatattgttcgtctgtaccaacctgtgcacttactcgttggaacacctgggcgtattttggatcttacaaagaaaggtgtttgcattttgaacgactgttcaatgcttattatggatgaggcagacaagcttctctctcctgagtttcaaccttccatagaacagttgattcgctacctccctgctagtcgacagattttgatgttttcagcgacattccctgtgactgttaaggagtttaaggacaaatatctgcctaaaccttatgtgattaaccttatggacgaacttacactgaagggaattacacagttctatgcttttgtggaagaaagacagaaagttcactgtctcaacactctcttttccaagcttcaaatcaaccagtcaataatattttgtaactctgtaaatcgtgttgaactattggcgaaaaagatcacagagcttggctattcttgcttctatattcatgcaaagatgctacaggaccaccgtaatagagttttccatgatttccgtaatggagcatgcaggaaccttgtttgcactgatctttttacaaggggaatagatattcaagctgtgaatgttgttatcaattttgatttccccaagaactctgaaacatatctccacagggttggtagatctgggagatttggccaccttggtctggccgttaatttgatcacctatgaggaccggtttaacttgtataggattgaacaagagcttgggactgaaataaaatcaattcctcctcagatagaccaggctatatactgccaataatctgaccgttttcatatgctttcatttctccgcgaataatgagaacttttgtaaataccagctcatcaggttttatggtgttgatctcgtttgttgcatcagagacaattctatgttggtggataacattagatgaggcacccaactttttttattacaccttgtcatgctgacactgttatggctatatgagggcaaatgtcctgccacattaggcacaaagtagtgtatattctaggacattttaaccctgttgctggttctgggcgtgtgatctgtcggtgctcacacaagcttgttgcccgagtcgaacttggggatgtgggcctcagatgggttattgggtgacaggtcggccattgaacttgaagtctggagtctgaacggtagtgaactggttaagtttgcaaataatcggtggtgagctgcatcatgttgtgctgtcttacccttgcagtcatgtcacttttgcttggtgccgtggtcaccatttagatttgcttggataaaacgctcgtcacgtttgtgctgactttgtgttcggcacaagcaacctgtccaggttatgtgtaaagaactgtttacttgtttttttcataataacaaacgttgcagctgtttttgcactctgtttctttccttttcgtgatataattacctgagctgctcaggttagagaaatcttggaaacaaacatctagtactcctatagcccacacggttcatcttaaccccttgggtgctgttcttttgggtgtggcgtgagttcgtgtgtggtgtctctgtaaccctttcttttaatgaaatgataagcaagatcgagaaaaaaagattgcttgacttgagtcacgtacatcatttcgtcaaatgcgttgctcttaaatttgactttggttcgccatggtgctgacattgtttctagttgggtttatcttatctttgcaggtttatgctggccagaaatctcaacatgttactggcttgcccccgaaaaggttgtatgtgtatatatacactaattaattcaccttccctgcctgggcgagccttctctcgccatggctttggccaggtgaactaaaagtggcaactggcaagtgcaaacgacctctcgctccctcgtgacacgccttcgtgccagcatgggaggaatgttttctgccttccaccatatatggggacagccagaggtgaaatccagatgaacccaaaattatgctttgccaattgcccataggggacaactgagctacagtatagttctcgagttcctttc

SEQ ID NO: 50858 - DNA, 2419 bp, Zea Mays
cgtgacgaagccttcctcttcgacgctccactgcgtctgcgccactgcggattgaagtaatttgccagggccattagcgtaattgctcctccgttaatacaaacccacagttgccctaataaggtttcgagtcttacgacgatccggcgacgctacctttccgtcgctcctcccccacccacgaaccctgccggaagggcaaaaaggggttcgaaattggtcctgatccaggagccaatcctacagacttcacctcccaaattcttttcccgatccgatctgcaagttctccttggatcctgcatcctccagccgattcctgggaagatctgaatcctcctctcgaccatggatccacgcgccaggtatccttcgggcatgggcaacggccgcggtgggaacctcaactactacggccgcggcccaccgccgcaacagccgcatcagcaccacaaccaccagcagacgtcgggggcgcaccaccaccagcagacgtcgggggcgcaccaccaccagcagtacgcgcagaggcagcaccagcaccagcaccacggccacaatcgccatcagcaacagcagcagcaccacatttaccagcagcaacagcagcagtggctgcggcggagccagattgcccgcgagacctcgggcgcagccgtgaccagcgagccgaagtccctggcgccatccacggccgccgatggcgtcgattcgagttcacaagattggaaggcccaattgaagctgccgcctccagatacacgctacaggacagaggatgttacagctaccaagggaaatgagtttgaagactattttctcaagcgtgaactcctaatgggtatatacgagaagggatttgaaagaccgtctcctatccaagaggaaagcattcctattgctttaactggtagtgacattcttgcaagagcgaagaacggaactggcaagactgctgcattttgtattcctgcactggaaaagattgatcaagaaaaaaatgctattcaagttgttatattggttcccacaagggaattggctctgcaaacatcacaagtttgcaaggagcttggtaagcatttgaagatccaggttatggtcaccactggtggaaccagtttgaaggatgatattgttcgtctgtaccaacctgtgcacttactcgttggaacacctgggcgtattttggatcttacaaagaaaggtgtttgcattttgaacgactgttcaatgcttattatggatgaggcagacaagcttctctctcctgagtttcaaccttccatagaacagttgattcgctacctccctgctagtcgacagattttgatgttttcagcgacattccctgtgactgttaaggagtttaaggacaaatatctgcctaaaccttatgtgattaaccttatggacgaacttacactgaagggaattacacagttctatgcttttgtggaagaaagacagaaagttcactgtctcaacactctcttttccaagcttcaaatcaaccagtcaataatattttgtaactctgtaaatcgtgttgaactattggcgaaaaagatcacagagcttggctattcttgcttctatattcatgcaaagatgctacaggaccaccgtaatagagttttccatgatttccgtaatggagcatgcaggaaccttgtttgcactgatctttttacaaggggaatagatattcaagctgtgaatgttgttatcaattttgatttccccaagaactctgaaacatatctccacagggttggtagatctgggagatttggccaccttggtctggccgttaatttgatcacctatgaggaccggtttaacttgtataggattgaacaagagcttgggactgaaataaaatcaattcctcctcagatagaccaggctatatactgccaataatctgaccgttttcatatgctttcatttctccgcgaataatgagaacttttgtaaataccagctcatcaggtttatgctggccagaaatctcaacatgttactggcttgcccccgaaaaggttgtatgtgtatatatacactaattaattcaccttccctgcctgggcgagccttctctcgccatggctttggccaggtgaactaaaagtggcaactggcaagtgcaaacgacctctcgctccctcgtgacacgccttcgtgccagcatgggagggtaggttttcctcatttctccatgttgattttgcagcgccatatttgtctcgaggcgtgaagctttcccatgttctctgtatttcttttttagaatgttttctgccttccaccatatatggggacagccagaggtgaaatccagatgaacccaaaattatgctttgccaattgcccataggggacaactgagctacagtatagttctcgagttcctttc

SEQ ID NO: 50859 - DNA, 630 bp, Zea Mays
caaacccacagttgccctaataaggtttcgagtcttacgacgatccggcgacgctacctttccgtcgctcctcccccacccacgaaccctgccggaagggcaaaaaggggttcgaaattggtcctgatccaggagccaatcctacagacttcacctcccaaattcttttcccgatccgatctgcaagttctccttggatcctgcatcctccagccgattcctgggaagatctgaatcctcctctcgaccatggatccacgcgccaggtatccttcgggcatgggcaacggccgcggtgggaacctcaactactacggccgcggcccaccgccgcaacagccgcatcagcaccacaaccaccagcagacgtcgggggcgcaccaccaccagcagacgtcgggggcgcaccaccaccagcagtacgcgcagaggcagcaccagcaccagcaccacggccacaatcgccatcagcaacagcagcagcaccacatttaccagcagcaacagcagcagtggctgcggcggagccagattgcccgcgagacctcgggcgcagccgtgaccagcgagccgaagtccctggcgccatccacggccgccgatggcgtcgattcgagttatacaggaact

SEQ ID NO: 50860 - DNA, 649 bp, Zea Mays
gtcgtacggtccgagttcgacacgcaaaaccggaaccgctgaactgagagtgagagggcgagaggcctccgctcccctgcttccccggctggctcccccacgccacccgtctactccgttgtctcgtcgcaggcagcaggtgaaaatctccgccattaagcgcgccccagggatcctcctcggccgcaaacaaaaccctcctcgtcatccgcgcccgctttcccccctgccggcccccggtctcgctctcgcccaagcaccaaatcttcctcccactcatcacaagacgaagtttcagtgcctgcgcgtgccgcgcgatctctcgtccttggcgtcgtcaagacgcgttagtttcagtgcgcgcacgagtgtgtgttgtgggagttagtgagagcgagagcgagagcgagcgcaccaagcgattcggcgggcggcggccgatggggagggcgccgtgctgcgacaggaccaagggcctcaagaaggggccctggacgccggaggaggacaagctcctcgtcgactacatccagaccaacggccatggcagctggcgcctgctccccaagctcgcagctgcctccctgccggcctcaaccatacggatacggctgtgatgcttctcgctcggattgcaggcacacgcgcg

SEQ ID NO: 50861 - DNA, 1759 bp, Zea Mays
ggcctccgctcccctgcttccccggctggctcccccacgccacccgtctactccgttgtctcgtcgcaggcagcaggtgaaaatctccgccattaagcgcgccccagggatcctcctcggccgcaaacaaaaccctcctcgtcatccgcgcccgctttcccccctgccggcccccggtctcgctctcgcccaagcaccaaatcttcctcccactcatcacaagacgaagtttcagtgcctgcgcgtgccgcgcgatctctcgtccttggcgtcgtcaagacgcgttagtttcagtgcgcgcacgagtgtgtgttgtgggagttagtgagagcgagagcgagagcgagcgcaccaagcgattcggcgggcggcggccgatggggagggcgccgtgctgcgacaggaccaagggcctcaagaaggggccctggacgccggaggaggacaagctcctcgtcgactacatccagaccaacggccatggcagctggcgcctgctccccaagctcgcagttctgcagctgcctccctgccggcctcaaccatacggatacggctgtgatgcttctcgctcggattgcaggcacacgcgcggtctcatctaacccccattcgcggcgcatttgcagggctaaaccggtgcggcaagagctgccgactgcggtggacgaactacctccggccggacatcaagcgcgggcccttcacatccgaggagcagaagtccatcgtccagctccacgccatcgtcggcaacaagtggtccatgatcgcggcgcagctccctggccggacggacaacgagatcaagaactactggaacacgcacctcaagaagcagctgcgtcggatgggcctcgacgagcccccgcccggcccggccgccggctgcccctccgcgcgccacatggcgcagtgggaaacggccaggctcgaggcggaggcgcgcctctccctcctcgccaccgccgcctcctcctcctcctgcggcgccatcgcggccacctccgcctcatcctcctcctccaccgtggacttgaagaccgcatgcgccaggcccgcggacatcttcctgcgcctgtggagctcggacatcggggactccttccgccgcaagacggccgcggcgcccgtggtcaagaggaaggacgcggtgatcaagcaggagtcgcaggcgctgctgctgggtcccggggacgactcctcggccgcgtccaacgagacggaggtggcggaggcgctggaggagtaccagatgttcctcgacttcgccggcgaagagctggggctgtttcacggccggcacggcggcttctcgctgttcccgccgctcgacgtgctcgccgaggcgtccctggacacggcgttcaagtgaagacgtagcgagtaccacgtacgtacacatacctattgccatgggcaagcggcagtggacatgcctctacggctagctgtatactgtacgccgcctccgccttaacatgagcgcggatgtactatgtatatatgcatgctgtctcgcgtattataccgcgggctggcgcgcgcgcatacgtacggtacttctacgtgtgactgctggcatcaggagttttttttttgttagggcatcaaccaaccagcaagtgcgtggtttagcttgttaaccgggttagttttggaccttttggtaggacgccatggtgtgtatggggggattctctgtgcatgcgtcagccgtaactagatatgctgtgctctaatacatcaacaatcgatt

SEQ ID NO: 50862 - DNA, 153 bp, Zea Mays
atgaatatcttagctccatatggtaacagccaatcctggcaactgcatatgatgtacatttcatttgtactagttttctggaattggaacataaccctgtggttcttcaaggcgaactggagctatagcagccaccacaacagaggcaccaaa

SEQ ID NO: 50863 - DNA, 1229 bp, Zea Mays
gaagaatgtaacgaatccaactatccactgtgataaattaggcaaatataagtgcaatcccaatccaactatctaactttgccatcatatgcatgaccttacctgaataccatacaaagtaatcgtccctatcccaatccaagagtgcaaactgtaaagattggcaatcccactctcattatgatttttgaaggcgaaatatattccaaccgcaccaaggacaagtgcaatcccgtggagaactagatggatcagcttatttgtctcgtggttcgatgttggaagtaccctgtataccattatagctgacaacgacgaacaagatgttactaaactaaaatctgtcatgtgacagaaaagagaagcctggaaaacatttaaatcatttaccttcgccgccgatgataatataaccgataagcataagaacagggtgaacctgcaatgtttaacatgtgatggactctaaatcaacttattattctgattcagtttcaaaaaataaaaacttattgctctgattcactaaaaactgtacagacgaaacaaatggttagcttgaagcaatagatagggtttcgtgatttgaaaggtaattgatgaaacctcaggagggcaggcagacagcaaaatgctttctaactaacataggccacaacctcagccaaataaacacgtattaagtgctctgctagttttagctagagattctgaatagcggcataattgaagtcctggattgcagagaactgaaggtccaaaagctgatggctctttgtgaattctagctcatggcctctctctctctctctctctctctagtttgagaggattcgtggatcgtagaatctgggcgagctggattgtgtaatttagtactccacaatccagctcgtgcagcagcctatgtgtaatttagtagaaagctactacggggtataaaagatagaatccacaatctctgactgaagcaaagaaagctagaatccacacgctcgccgacagaactgcacaataacacttcttgataattctataattctactagatttaaatttcctcacttttctagctcgtgaagcagcctacacgcgctcacgtcgacgcgacgtcaaaggggaaagaaagcaaacaaaagggaaaacacgcgtccccaaaacaagttgtcggcgttgaagcaaccagcgcggggaggggagaggcagtagtacccacgttgaagatgaggt

SEQ ID NO: 50864 - DNA, 965 bp, Zea Mays
gaacgtcccagctaccagggtcattattgatctccaatgcggatgggaatgttggatgactggaagttgtacagactgatggtaagctggcgggaaaggaacttctgattggctgtttagctcccaattcggattgcttagagaaattgcatgtgtccaccatactgctagtcctttcattgtatgttctgaaatttggagtcaactcattaatgaagtcatcatctattatattgatcccagttacagcatccacatcatactttcttggctgacaagagacaccttcactacccatattcaaccgttgatcaatcataaagacttcggggaggtcagacattgtatcctctatgtgaaagaatttccttaacttaggtggtgagaatatcttgtcattttctacacagtcaccatgcaattgagtacatggattagggaaagcaggattactaactgcaacggaaaagtcttgtgcggcacgccttttctttttcctcggagactgcagcaaagtactactgatatctgaatcaacagaagagcattcagtcattacagactttgattcacctagttcaccgaatttgcacaaagcactgaagagagaaatgctctgcggtggcaaatgatacttttcaacagcctgagtacgttgctcatgtgaccatctgaggaaatccataagactgccagaagaaagtatcatgtgtgcagacagaggactaactgaagggaatgctgtgagaaatgactcaaccagactttccgattcagttatttgtggacaaagagcctgatttatcctaacagcattcctgatgcaattgagaatgatttgatctgttgatttgggcatttctgagaagaatagctgcaaattcatgtccaggttaacagctgaagcatatagagaatcagatgcctccattacagcagaaagcaagtgattttcaccctcgaag

SEQ ID NO: 50865 - DNA, 722 bp, Zea Mays
ttaccattatgcagccacagaaacagaagctaagtgccatcagaacgttggtagcaatatcctctagaaaatttgttataccagatgtgcctgctgatattgttaactcactggaaccagaggttcttgtatcataccatagtaaacaaactgccgcagtaagtattagatccacaggcagatcaacatctcgctctacaacctgcatacctcctctctccaaagctagtatctgctgataagatgatcttcgagagaaaagcatattttttccatgatttccagtattgacaacaatcgccacctctgggccaggcaatcttcctgctttggtgctgtccattttctcactgagaggaaggacaccggcagattggttgacttggggggcttttatcacattcgcagatacaacagtcgaactgctcttctcaactacaggcacaaaattttgtaaattggcaatggttatttggttcaagccattgggctgttcagttgcagtcactaagttgtgtgaatcaacaatattcttttcgttcagatttcccgcattgtgcagttgaacatctgcaggaattttttttgatgaatccacagtgagatgattggtctgcaaatgttgctgttgatttgttgccggtataaagtttaatgaatcaacaatgcgcattttgttcatcttctcttgcaagtccttctgaagtgtatgcaaagcagca

SEQ ID NO: 50866 - DNA, 200 bp, Zea Mays
taccaatgtggatttcaaatccgggtctgtgtgattgtcctcgacaagagcatttggaaggccttcaccatcaactgtgacatacaggaaatgcagtggtggcaacccatctaatttgggagccagagataacaagatagatgatttatttgggcctccatattccactatcatgcaaaattcactgaaggggaatgaag

SEQ ID NO: 50867 - DNA, 2261 bp, Zea Mays
ctagcagaatgcagtctgatttccataattcttgcagcatacatcttttagaatttgtctcaatcaccgcatctgaataagtggttgaatggtatgttccaaactcaacagatgttatcttcattgcagtaagcttttggcccaatggcaaccagaaagctctatcagacactataaggatcttttggtcgatttgggtattagatctaaggattgtctcgatgacagataatgacggatgagactcctgtaattgcttctcagctttcagtcgagcttcaccaatgcagcgttgaagatgtcttaacctctcaggaataatttcaaaggttccagtcaaattgcctacatacagataggcggcatgcagaccaaagaaacataggtaatatgcaacctgttttaatgcatacagtacaataagctccatcttatcttcatatttacagcagctatacaggccttctgaaccttcccctgttatcagttcaagaagcttttgctttgaaatgcttaaaccttgcccatcggagaaagaatgccttaagtatgcactttcttgcaaagcagatgtataacttacatggatgtcattgataaggccttggataatatctgagaggttgacaggatgaatttctatgagtttgttaactttaggtctggttgaaattgaagctgcttgttttgaagaggggatgtctaaggtagaaatatcctcagcttttctcactttattagtgccatttctcacattcaagtagaagcttagcccattggactgtgacgttgactcaaacaaggatgattccttttctgaactcaatttatccatgtgggtatgacctctaacaacattttctagcatgttcttttgagttgcttccaaattagctgatggatcatgagatataggcccaggaacataaacctcattctgcttgtcctcatgttgaggctttgcacttctcggaaaatcctccagaaaaccaatgtcaagcgctggcatctgctggccacttatttgtagttcagaatttaaactgcaaggctttacctcctcaaccatgctctcataagtagagcaactctcccggttgcatggcccttctgataaaagatgccaatccaaataaatcccatctgctgcagatagaggaagtggttttagggagcaaagtacttcttctatagggggaagcatagatcgcattgctttatcatcatgtaaaataggtgtaggtagtgatttgaatgtatcatcaactagagccaattcagagctaaccactgattcatagaaatgttttgcttgatcaaagtcgtctttgaatatttcctcagatgtattcatctcagctttctctgactgaataagaacaagtgacttaaaggcatccttggaaggaaagtcgatgatctttacttcctcaaagagaatgaagcaaggaaaatgtgaacaggtcccatcaggtttgagagggtataatgctgactttttatccagtaaaataccatcattgatccttacaaaatccattactgctacatcatttgctgtaattggtttatctgcttgatactccacaagtggggcatctttgcaaaccaaggcaaaaatgtcaatatcacatggtctcaagaactcatttgagccaaatgatggaagacagacttgtgctccatcaaataagtgttcaataatactatgaaaaaaattggatatcattgtttttgctgggcactcatcaagctcccaagaattcatactaacctccaactggggtattatttgaccattctctagtcctatgatttccatgcagtagctatctttagcataaggacagttatcatcatcatcatgttttacagggacttctacttgataaattgactccgcaaattcagctgcatatggtattcttgtctcagtatcaatatcaatgaaatcctgaaataaagcagaaggatgttcgaggacatgagcacaccgagaaacaataagaatgtgatgctttcatttcatacttgataaatcacaagggaatcaaacaaatgagcatgttaatcataaggtgtttgctcctgaaaccatgggacaagaaaacactatgttattgttatgaccggcagcccaacagccctaataaaaccagctggtttgtttagatggataagcataaattagtttgtttagatgggtatcaattagtttgtttagatggataagtattagctactagctagtttgtttaaat

SEQ ID NO: 50868 - DNA, 1547 bp, Zea Mays
agctagcctctcccacttcttcttctagctagcgcagcagccagcagcgcacgcagtgttgactgattcgtctctcttcgatctctatatgcatgcgcgcgcaggtcggcgtgccttgcagcagcctgttcaagacggtgacggtgcgttgtggccactgcgccaacctactctccgtcaacctccgcggcctcctgctcccgcccgccgcgccggcgccgcccaaccatctcaacttcgctcactccttgctgtcacccacatccccgcatggcctcttggacgagttggctctccagcaggcgccgagcttcctgatggagcaggcgagtgccaacctgagcagcaccatgacgggccgcagcagcaacagcagctgcgccagcaacctgccgccgccggcgccgatgcctgcagctcagcctgtgcagcaggaagccgaactgcccaagaccgccccgtcggtaaacaggcctccggagaagcggcagagagtcccgtcggcatacaaccggttcatcaaggacgagatccagcgcatcaaggccggcaacccggacatcacccaccgggaggcgttcagcgcagccgcaaagaatgtaactttctttcgtcttcttctccagacgcatatatgcacagcagtgacaactactcgtggctagcttgctgtctgcgtgtcttgtgatttgacccatcactttacaatgtcagcatggacacagcgacacctagtgtctggtgctggctgcttgcgcctggtgtggtctgtggctagcttgctgccccaccggcacagcgtcgtacagacgatacagctagcgttcgttttcagtatttgcttccaagtactcggtcggtcgtacgtaccctactaatgttgcattgcctttctctgatttgtgttcataatcagtgggcccatttcccacacatccacttcggcctcatgccggaccagggcctcaagaagaccttcaagactcatcaggatggcgctgaagacatgctactcaaagacgatctctacgccgcagcggctgcagctgcagcagccaacatgggcatcactccattctaataactctggttaggcatgtgttctgaatcagctggcacgtcgtagtggctatcgccctttgtgctgcattctagggtttcgtctcagatcttgatctcaacatcgatcgtgtgtcgtttaattagagtactttccagtgtggggatagaaatggagaataatcaagttagagcgcgcatcaagtaggccactgatgatccgtaggtacagacttgattgtctcctctatatatcccttttcatttcatgttctctctctttttcctattttttgttcctggaccccttcaactcgccagtagagagctcgttgtgcctctccaatcccatgtttgcgtatgtctgctcaacaacatgtttttaccatggagaacaagttgaacatctgttagatctatcaagagtgtcatatatatgttccatcgtcctttaccatgtacttctactactactatgtggtttcttt

SEQ ID NO: 50869 - DNA, 1461 bp, Zea Mays
agctagcctctcccacttcttcttctagctagcgcagcagccagcagcgcacgcagtgttgactgattcgtctctcttcgatctctatatgcatgcgcgcgcaggtcggcgtgccttgcagcagcctgttcaagacggtgacggtgcgttgtggccactgcgccaacctactctccgtcaacctccgcggcctcctgctcccgcccgccgcgccggcgccgcccaaccatctcaacttcgctcactccttgctgtcacccacatccccgcatggcctcttggacgagttggctctccagcaggcgccgagcttcctgatggagcaggcgagtgccaacctgagcagcaccatgacgggccgcagcagcaacagcagctgcgccagcaacctgccgccgccggcgccgatgcctgcagctcagcctgtgcagcaggaagccgaactgcccaagaccgccccgtcggtaaacaggcctccggagaagcggcagagagtcccgtcggcatacaaccggttcatcaaggacgagatccagcgcatcaaggccggcaacccggacatcacccaccgggaggcgttcagcgcagccgcaaagaattgggcccatttcccacacatccacttcggcctcatgccggaccagggcctcaagaagaccttcaagactcatcaggtatcagagctgacactgaaaccctaataactcgatgtatattttgtatgccttgaaatcctcacttgacactttgacggagttcaggtcatccagcagcaacactatattaccacatgcttcttttaagttttttttttattattcgaagttttgtagtactttgtaagcacgcaccgtaccccggccggcctctaaaattttggctggttcctgggctgtgacatacaggatggcgctgaagacatgctactcaaagacgatctctacgccgcagcggctgcagctgcagcagccaacatgggcatcactccattctaataactctggttaggcatgtgttctgaatcagctggcacgtcgtagtggctatcgccctttgtgctgcattctagggtttcgtctcagatcttgatctcaacatcgatcgtgtgtcgtttaattagagtactttccagtgtggggatagaaatggagaataatcaagttagagcgcgcatcaagtaggccactgatgatccgtaggtacagacttgattgtctcctctatatatcccttttcatttcatgttctctctctttttcctattttttgttcctggaccccttcaactcgccagtagagagctcgttgtgcctctccaatcccatgtttgcgtatgtctgctcaacaacatgtttttaccatggagaacaagttgaacatctgttagatctatcaagagtgtcatatatatgttccatcgtcctttaccatgtacttctactactactatgtggtttcttt

SEQ ID NO: 50870 - DNA, 1038 bp, Zea Mays
atcaggatcatccacattcagccccttttctattcccccagagtgtcagtcgagttaaataagcagatctcctgcacgctgcagctgacgaacaagacagacaagcaggtcgcgttcaaggtcaagacaacgagccccaaaaagtactgtgttcggccaaacaacggcatggtggcgccccggtccaaagctgacgttgttgtcacaatgcaagcgcagcgggacgcgccaccggacatgcattgcaaggacaaattccttgtgcagagcgccatcgtggccaaggagaccatgccgaaggaagtcactggagacatgtttaccaaagattcaggcaatatagtggatgaagtgaagttgaaggtagtttatacagcgccatcgtcctctcaaagcgagggatttgaggatggtaatctcggcagtttgagttatcaagaggaaacaaaagaacccaaagaatcagaaaaaataatctctgagccatttgctttgatttcgaaactgatggaggagaagaattctgctgttgagctgaacaacaagcttcgacaagaattggaccttctgaggcgagacatcagcaggcagcatggtggtttctcattagttttagtactggtggttgctattctgggaatactgctagggttcctcatgaagagatgagcgcatgtaatgacttatcttgtctggcttttctgaactaaacaaaattgtatgtgctctgtgtgcgcttgttgttgtacaagtcagtggtctgtttatcataggatctgatgcctattgtaattttctgattcatattataaactttagccaatcaataagtcatagttaccaacaccagctgttatcatcttgcaagcgacttgaggtcttgaactgtagccgttcggtttgtgattgtgagagatttttttgactaattgttggcatcattttgcacatatgaacagaatgaaactgtggtttgtgatatatgttggatgctttgtggattgcgtggagcagtgttttctattttgttcattgtta

SEQ ID NO: 50871 - DNA, 1838 bp, Zea Mays
ggaggagtagctcagaacctcagatagctcggggagcgaaagagagagagaccgacgcgcatcctcatcctccccgcctcaaactcgcgtcgcggggacgtgtccgttcacacgagtattctgcgtagccacgtcgccggtgtgcggtagcggtagcggtagcggtagcagccagggcccagggctgcttctcgccccttccaaaatcccgagcttttccccggtttcgacccttcgttttcctccgcttcctcctctgctccactgcttcaggaataggtgcctcaggaatataggtagacggagaaaaaaaaacacagagagagagagagacggaggggaggcatcgaaattccgaatccccacctcgccgctcccaccaccaccgcggattgcgtcccgttcgattgcgcaggagtttctgttccaggatgagcaccgagtcaggagagctgctcgggatcgaccccgtcgacctccggttcccattcgagttaaataagcagatctcctgcacgctgcagctgacgaacaagacagacaagcaggtcgcgttcaaggtcaagacaacgagccccaaaaagtactgtgttcggccaaacaacggcatggtggcgccccggtccaaagctgacgttgttgtcacaatgcaagcgcagcgggacgcgccaccggacatgcattgcaaggacaaattccttgtgcagagcgccatcgtggccaaggagaccatgccgaaggaagtcactggagacatgtttaccaaagattcaggcaatatagtggatgaagtgaagttgaaggtagtttatacagcgccatcgtcctctcaaagcgagggatttgaggatggtaatctcggcagtttgagttatcaagaggaaacaaaagaacccaaagaatcagaaaaaataatctctgagccatttgctttgatttcgaaactgatggaggagaagaattctgctgttgagctgaacaacaagcttcgacaagaattggtcagtgcctcattggatttttttgcttattatgcaaacagttaataattcggttacccttgactttaggctacattcaccttttattttcttggctagacaaagttatgttatagctcttttgatagcttttgcatttctgtacatatcactttcagattgtatcctggtttcttttgttacatatgttttacatagccttatcctttttatatcttccatccatttctctcgttctctttttagttccttttgcttttcatggttccatcaagtgcagaactacatgtgcaggttcacatgatccctccatccacctttataaagtgtatttttatctgaacataatcccttcataaggaccttctgaggcgagacatcagcaggcagcatggtggtttctcattagttttagtactggtggttgctattctgggaatactgctagggttcctcatgaagagatgagcgcatgtaatgacttatcttgtctggcttttctgaactaaacaaaattgtatgtgctctgtgtgcgcttgttgttgtacaagtcagtggtctgtttatcataggatctgatgcctattgtaattttctgattcatattataaactttagccaatcaataagtcatagttaccaacaccagctgttatcatcttgcaagcgacttgaggtcttgaactgtagccgttcggtttgtgattgtgagagatttttttgactaattgttggcatcattttgcacatatgaacagaatgaaactgtggtttgtgatatatgttggatgctttgtggattgcgtggagcagtgttttctattttgttcattgtta

SEQ ID NO: 50872 - DNA, 1227 bp, Zea Mays
ttgctatttatttttttccttcctcgcggcgcgcggattctattggtttccttgaaaatttctcagtagtcgccatagcgaacatagcttcgctagctattcgggggaaattttattgcgctctgtcgaacgcccattcgataatcttctactggctgtttctcgggtgttcatcatctttttatcctttctgcggttcatttcgacatgtgttctgttgcttcctaatcatttcgagtcgagttaaataagcagatctcctgcacgctgcagctgacgaacaagacagacaagcaggtcgcgttcaaggtcaagacaacgagccccaaaaagtactgtgttcggccaaacaacggcatggtggcgccccggtccaaagctgacgttgttgtcacaatgcaagcgcagcgggacgcgccaccggacatgcattgcaaggacaaattccttgtgcagagcgccatcgtggccaaggagaccatgccgaaggaagtcactggagacatgtttaccaaagattcaggcaatatagtggatgaagtgaagttgaaggtagtttatacagcgccatcgtcctctcaaagcgagggatttgaggatggtaatctcggcagtttgagttatcaagaggaaacaaaagaacccaaagaatcagaaaaaataatctctgagccatttgctttgatttcgaaactgatggaggagaagaattctgctgttgagctgaacaacaagcttcgacaagaattggaccttctgaggcgagacatcagcaggcagcatggtggtttctcattagttttagtactggtggttgctattctgggaatactgctagggttcctcatgaagagatgagcgcatgtaatgacttatcttgtctggcttttctgaactaaacaaaattgtatgtgctctgtgtgcgcttgttgttgtacaagtcagtggtctgtttatcataggatctgatgcctattgtaattttctgattcatattataaactttagccaatcaataagtcatagttaccaacaccagctgttatcatcttgcaagcgacttgaggtcttgaactgtagccgttcggtttgtgattgtgagagatttttttgactaattgttggcatcattttgcacatatgaacagaatgaaactgtggtttgtgatatatgttggatgctttgtggattgcgtggagcagtgttttctattttgttcattgtta

SEQ ID NO: 50873 - DNA, 3458 bp, Zea Mays
ttagtgataaagctttggagtctgctgtacggcattcgcctccagcgacggccgcgcttacacgtagtggtgccactgctagaatttgtcaggaacacaagcacacaagaatccgaaaatgaaaggcagcagccagcagggaacacgccgggcctggaactgggtcagtgccgtctacaggtggtggacgcagtcgtatgtgttgatgtcgtctgccgtgcacctgaggtccaagcgccgccgcccgcacgagtgctgctcgccgcgcgcctgagcgccatccgcagttcgttcaggccgcctaggccgcacgtccgactcccgagcgctgccaaccacacacctaaacgcgccgctcacgcccatcagcttcctcgagcgcaccacgctcgtctaccccgaccgcccctccatcgtcgccgctggacacgacgccgcgccgccgccccgcacctggcggcagacccgggactgctgcctccgcctcgccgccgcgctcgcggggctcggcgtcgcgcgccgtgacgtggttgcggtgttcgcgcagaacatcccggccttctgcgagctccacttcggcattcccatggcgggcgccgtgatctgcgcgctcaactcgcggctcgacgccggcatggcgtccgtgctgctgcagcactcggaggccaaggtcgtgttcgtggacgccgtgctgctgggcgtcgcccgggaagcgctccgcttcatctcccagcaggccggcggagcgagcagggtacccgccgtggtgctaatcaacggggcgctcgacgagccgccgccagcggcgacaggaaacaacaagatcccaggcgtcgatcgatgctacgagtacgaggccctcctcagcaacagcagaggcggcgatccagagttcttgatccggtggccggacgatgagaacgagccgatcgcgctggatctgcgtgcaggggcggtgaatcgcggggaggggcgctggatctgcgggcggtgaatcgcggggggggggggggggcggtgaatcgcggggaggggcgctggatctgcgggcggtgaatcgcggggggggggggggggcggtgaatcgtggggaggggcgctggatctgcgggcggtgggtgaatcgcggggggcggggggcgctggatccgcgtgcgggctgacgtgagcgctgagcgggattcgcggcgtggacgttgaggcgggggcagtctacgctccactcttaatagttgtagagatgttatcggctatgtgcactctagttgtgtagaggatggcttccatgttgtatctgcgtgatgctaactcttgagggcgtttagtttgtgaatgtgataatgcagtagcgccggatcttttcttcgcgcccgtgtcgcgagacggctccgctagcagttacgtgttcgcgcgcaagccgccaccaccaccagtctgtcccgttccccacctcaccctcttcttccctatactcgggctacacctgcgaccactgctcacctgtcgcggccatgactcccgcatccacctcccctctcgccgccgccgtcctgcccacgaacttatcttccttctctcgctgcccacctcgccgcctcccgcgcatctcctgcctggcagcgcccgaacgcgggggcaacaatgcgtcgaacgcctcgccggcaccgcagcagccgaggtggggtgccgcggtatccgccgcgctcgcggcggccgtggttgccgcctctatgccagcttacgcggacctgaacaagtttgaggccgagcagcggggcgaatttggcattggctctgccgcgcagttcggctcggccgatctcaagaaggctgtccacgttaacgagaacttcaggcgggccaacttcacatccgctgatatgagagagtcagatttcagtggttccacattcaatggtgcctatcttgaaaaggctgttgcttataaggcaaatttcactggtgctgatttgagtgatacattaatggaccgcatggttctgaatgaagctaaccttacaaatgctgttcttgtacggtcagtcctcacacgtagtgatcttggaggagccatcattgaaggtgctgacttcagtgatgctgttattgacctatcacagaaacaggcattatgcaaatatgcaagtgggaccaaccccatgacaggggtgagcactcgaaaaagcctaggatgtggcaatagccgtcgaaatgcatatgggagcccttcatcccctctgttgagtgccccgccacagaagatccttgaccgagatggtttctgtgatccagctactggtatgtgcgatgcaagctgagaggtttgatccaacatggaaactggtcaatggatggtgtacatacattggagattgagtaagagcagaacagtgcagagaaacaagtcgtttttcttttcctcttgccattgttgtaacattgcaacacggaatcaggtaaaattcaggatgtagatgagatatgcacgctgagtactgaatggcatgtatagcatagtatgtatacgaaaatagatcatatcaatcatgtgcttcatgcttgaaaggagtggcccctgccttgttctaaagccaacatagccaaaagcagaagttcaacagaggagtgtctcagcaaataaactttccactccatttcacaaacattgctgatgcatcggcagcaaccagagctgccgttctggatgaaccgcacaaatagacgtccatcgacagcttgactgtttgtgcagattgtcaggtcagttgctgaagtccctccttagcttcagctttcagctagctaccttgttaacatcaggtcctgaaacctgatatcaaataacaatatatatatatataaccacttcggttacatgtttattatgcatatggagatttttcatgtgccatgacacgcattgcatgatacatatttgtacactaataaatcaggtgtgggaggcatattttatatatatgaattgtatagggcttccaatggattcatgtacgttgtgtagtagctacttccacatgctcgcctcgccgtccccagaggcagatgtagaggcgaagtccagtgcttcttccggctgcctgttctcagactgaaatgcctgcgccgggctggagtaagcggtctctttcgctgtgtcatcgccgccgtggctgacgagctgagacgcgacgaacttgtcgagcactctccagtcggtgaccgagtcgtccatgtaagcggcttccgtcatcggcagttgccgcgcggtgtacccagaagcatcgtcgggggactggaggctgcagctgccctgggcggcgatgtaggcgggaggaggcttggggctctccaactgtgggagctgctgcaagaaggcgtcttggctgggcagaaggtgatggtactccagctccggcttgcagtggtagagctgctgctggccgctgtacaccgccgct

SEQ ID NO: 50874 - DNA, 2309 bp, Zea Mays
gtgggtgaatcgcggggggcggggggcgctggatccgcgtgcgggctgacgtgagcgctgagcgggattcgcggcgtggacgttgaggcgggggcagtctacgctccactcttaatagttgtagagatgttatcggctatgtgcactctagttgtgtagaggatggcttccatgttgtatctgcgtgatgctaactcttgagggcgtttagtttgtgaatgtgataatgcagtagcgccggatcttttcttcgcgcccgtgtcgcgagacggctccgctagcagttacgtgttcgcgcgcaagccgccaccaccaccagtctgtcccgttccccacctcaccctcttcttccctatactcgggctacacctgcgaccactgctcacctgtcgcggccatgactcccgcatccacctcccctctcgccgccgccgtcctgcccacgaacttatcttccttctctcgctgcccacctcgccgcctcccgcgcatctcctgcctggcagcgcccgaacgcgggggcaacaatgcgtcgaacgcctcgccggcaccgcagcagccgaggtggggtgccgcggtatccgccgcgctcgcggcggccgtggttgccgcctctatgccagcttacgcggacctgaacaagtttgaggccgagcagcggggcgaatttggcattggctctgccgcgcagttcggctcggccgatctcaagaaggctgtccacgttaacgagaacttcaggcgggccaacttcacatccgctgatatgagagagtcagatttcagtggttccacattcaatggtgcctatcttgaaaaggctgttgcttataaggcaaatttcactggttctgaatgaagctaaccttacaaatgctgttcttgtacggtcagtcctcacacgtagtgatcttggaggagccatcattgaaggtgctgacttcagtgatgctgttattgacctatcacagaaacaggcattatgcaaatatgcaagtgggaccaaccccatgacaggggtgagcactcgaaaaagcctaggatgtggcaatagccgtcgaaatgcatatgggagcccttcatcccctctgttgagtgccccgccacagaagatccttgaccgagatggtttctgtgatccagctactggtatgtgcgatgcaagctgagaggtttgatccaacatggaaactggtcaatggatggtgtacatacattggagattgagtaagagcagaacagtgcagagaaacaagtcgtttttcttttcctcttgccattgttgtaacattgcaacacggaatcaggtaaaattcaggatgtagatgagatatgcacgctgagtactgaatggcatgtatagcatagtatgtatacgaaaatagatcatatcaatcatgtgcttcatgcttgaaaggagtggcccctgccttgttctaaagccaacatagccaaaagcagaagttcaacagaggagtgtctcagcaaataaactttccactccatttcacaaacattgctgatgcatcggcagcaaccagagctgccgttctggatgaaccgcacaaatagacgtccatcgacagcttgactgtttgtgcagattgtcaggtcagttgctgaagtccctccttagcttcagctttcagctagctaccttgttaacatcaggtcctgaaacctgatatcaaataacaatatatatatatataaccacttcggttacatgtttattatgcatatggagatttttcatgtgccatgacacgcattgcatgatacatatttgtacactaataaatcaggtgtgggaggcatattttatatatatgaattgtatagggcttccaatggattcatgtacgttgtgtagtagctacttccacatgctcgcctcgccgtccccagaggcagatgtagaggcgaagtccagtgcttcttccggctgcctgttctcagactgaaatgcctgcgccgggctggagtaagcggtctctttcgctgtgtcatcgccgccgtggctgacgagctgagacgcgacgaacttgtcgagcactctccagtcggtgaccgagtcgtccatgtaagcggcttccgtcatcggcagttgccgcgcggtgtacccagaagcatcgtcgggggactggaggctgcagctgccctgggcggcgatgtaggcgggaggaggcttggggctctccaactgtgggagctgctgcaagaaggcgtcttggctgggcagaaggtgatggtactccagctccggcttgcagtggtagagctgctgctggccgctgtacaccgccgct

SEQ ID NO: 50875 - DNA, 2374 bp, Zea Mays
gtgggtgaatcgcggggggcggggggcgctggatccgcgtgcgggctgacgtgagcgctgagcgggattcgcggcgtggacgttgaggcgggggcagtctacgctccactcttaatagttgtagagatgttatcggctatgtgcactctagttgtgtagaggatggcttccatgttgtatctgcgtgatgctaactcttgagggcgtttagtttgtgaatgtgataatgcagtagcgccggatcttttcttcgcgcccgtgtcgcgagacggctccgctagcagttacgtgttcgcgcgcaagccgccaccaccaccagtctgtcccgttccccacctcaccctcttcttccctatactcgggctacacctgcgaccactgctcacctgtcgcggccatgactcccgcatccacctcccctctcgccgccgccgtcctgcccacgaacttatcttccttctctcgctgcccacctcgccgcctcccgcgcatctcctgcctggcagcgcccgaacgcgggggcaacaatgcgtcgaacgcctcgccggcaccgcagcagccgaggtggggtgccgcggtatccgccgcgctcgcggcggccgtggttgccgcctctatgccagcttacgcggacctgaacaagtttgaggccgagcagcggggcgaatttggcattggctctgccgcgcagttcggctcggccgatctcaagtaatttgctttgttttaatggtcttacaggaaggctgtccacgttaacgagaacttcaggcgggccaacttcacatccgctgatatgagagagtcagatttcagtggttccacattcaatggtgcctatcttgaaaaggctgttgcttataaggcaaatttcactggtgctgatttgagtgatacattaatggaccgcatggttctgaatgaagctaaccttacaaatgctgttcttgtacggtcagtcctcacacgtagtgatcttggaggagccatcattgaaggtgctgacttcagtgatgctgttattgacctatcacagaaacaggcattatgcaaatatgcaagtgggaccaaccccatgacaggggtgagcactcgaaaaagcctaggatgtggcaatagccgtcgaaatgcatatgggagcccttcatcccctctgttgagtgccccgccacagaagatccttgaccgagatggtttctgtgatccagctactggtatgtgcgatgcaagctgagaggtttgatccaacatggaaactggtcaatggatggtgtacatacattggagattgagtaagagcagaacagtgcagagaaacaagtcgtttttcttttcctcttgccattgttgtaacattgcaacacggaatcaggtaaaattcaggatgtagatgagatatgcacgctgagtactgaatggcatgtatagcatagtatgtatacgaaaatagatcatatcaatcatgtgcttcatgcttgaaaggagtggcccctgccttgttctaaagccaacatagccaaaagcagaagttcaacagaggagtgtctcagcaaataaactttccactccatttcacaaacattgctgatgcatcggcagcaaccagagctgccgttctggatgaaccgcacaaatagacgtccatcgacagcttgactgtttgtgcagattgtcaggtcagttgctgaagtccctccttagcttcagctttcagctagctaccttgttaacatcaggtcctgaaacctgatatcaaataacaatatatatatatataaccacttcggttacatgtttattatgcatatggagatttttcatgtgccatgacacgcattgcatgatacatatttgtacactaataaatcaggtgtgggaggcatattttatatatatgaattgtatagggcttccaatggattcatgtacgttgtgtagtagctacttccacatgctcgcctcgccgtccccagaggcagatgtagaggcgaagtccagtgcttcttccggctgcctgttctcagactgaaatgcctgcgccgggctggagtaagcggtctctttcgctgtgtcatcgccgccgtggctgacgagctgagacgcgacgaacttgtcgagcactctccagtcggtgaccgagtcgtccatgtaagcggcttccgtcatcggcagttgccgcgcggtgtacccagaagcatcgtcgggggactggaggctgcagctgccctgggcggcgatgtaggcgggaggaggcttggggctctccaactgtgggagctgctgcaagaaggcgtcttggctgggcagaaggtgatggtactccagctccggcttgcagtggtagagctgctgctggccgctgtacaccgccgct

SEQ ID NO: 50876 - DNA, 3285 bp, Zea Mays
gtgggtgaatcgcggggggcggggggcgctggatccgcgtgcgggctgacgtgagcgctgagcgggattcgcggcgtggacgttgaggcgggggcagtctacgctccactcttaatagttgtagagatgttatcggctatgtgcactctagttgtgtagaggatggcttccatgttgtatctgcgtgatgctaactcttgagggcgtttagtttgtgaatgtgataatgcagtagcgccggatcttttcttcgcgcccgtgtcgcgagacggctccgctagcagttacgtgttcgcgcgcaagccgccaccaccaccagtctgtcccgttccccacctcaccctcttcttccctatactcgggctacacctgcgaccactgctcacctgtcgcggccatgactcccgcatccacctcccctctcgccgccgccgtcctgcccacgaacttatcttccttctctcgctgcccacctcgccgcctcccgcgcatctcctgcctggcagcgcccgaacgcgggggcaacaatgcgtcgaacgcctcgccggcaccgcagcagccgaggtggggtgccgcggtatccgccgcgctcgcggcggccgtggttgccgcctctatgccagcttacgcggacctgaacaagtttgaggccgagcagcggggcgaatttggcattggctctgccgcgcagttcggctcggccgatctcaagtatgccagcacctctgcttcttcatctcttcttcatgaccattttgttgttacattgcctaggtaatttgctttgttttaatggtcttacaggaaggctgtccacgttaacgagaacttcaggtgggtccttaatttcacttgtaccgagttagaatcccctagtttttcaatggcaacattaaaggaatagttagtagaaaggaaatatattttcaacttcgataattataccggatataacttagcttgctttctgcctgtttcggtctgatgtgattttggccgtatggaaatttaagtattagcgataaacttcacggatataacgatggcagttgtgagtttataaactgaattgtttccaaaatagtccagcattgtgtgtgtatgcattttatgagcattgctttaactcatagttacaagttactagatggaaacaacttgttgtatgaaatgcctatttatggagaaagtgtgtaacaaatatgctacagaattactataacgccccgtttggatccttggaattgaattccattctaataatagtaatttagacacatatcaattaagttaatttggttttatacaaaatatattgtatactattattagcataatgtcggggatatttatgtgctacatttttactatggatgagtgagtcgtagagcgtcaagttgtagagtagaaacaaattctactgatacataaaatcatttcacgtcctctaccctattaatttgagatatgcttatatctgaactttagaaagtggtggaatgttaaattccaaggtaatatgttactttattaagtaaattccaattcctccaaaatgaatgaatccaaacgacccgtaactgtaagtacagtgttgtcaaaccagaataagagtaattatctgtgatatggataaggtcataaggataactaaaggaacaatagttttttctattcctcatctctcatttacataatgcatcatttgttgctttaggcgggccaacttcacatccgctgatatgagagagtcagatttcagtggttccacattcaatggtgcctatcttgaaaaggctgttgcttataaggcaaatttcactggttctgaatgaagctaaccttacaaatgctgttcttgtacggtcagtcctcacacgtagtgatcttggaggagccatcattgaaggtgctgacttcagtgatgctgttattgacctatcacagaaacaggcattatgcaaatatgcaagtgggaccaaccccatgacaggggtgagcactcgaaaaagcctaggatgtggcaatagccgtcgaaatgcatatgggagcccttcatcccctctgttgagtgccccgccacagaagatccttgaccgagatggtttctgtgatccagctactggtatgtgcgatgcaagctgagaggtttgatccaacatggaaactggtcaatggatggtgtacatacattggagattgagtaagagcagaacagtgcagagaaacaagtcgtttttcttttcctcttgccattgttgtaacattgcaacacggaatcaggtaaaattcaggatgtagatgagatatgcacgctgagtactgaatggcatgtatagcatagtatgtatacgaaaatagatcatatcaatcatgtgcttcatgcttgaaaggagtggcccctgccttgttctaaagccaacatagccaaaagcagaagttcaacagaggagtgtctcagcaaataaactttccactccatttcacaaacattgctgatgcatcggcagcaaccagagctgccgttctggatgaaccgcacaaatagacgtccatcgacagcttgactgtttgtgcagattgtcaggtcagttgctgaagtccctccttagcttcagctttcagctagctaccttgttaacatcaggtcctgaaacctgatatcaaataacaatatatatatatataaccacttcggttacatgtttattatgcatatggagatttttcatgtgccatgacacgcattgcatgatacatatttgtacactaataaatcaggtgtgggaggcatattttatatatatgaattgtatagggcttccaatggattcatgtacgttgtgtagtagctacttccacatgctcgcctcgccgtccccagaggcagatgtagaggcgaagtccagtgcttcttccggctgcctgttctcagactgaaatgcctgcgccgggctggagtaagcggtctctttcgctgtgtcatcgccgccgtggctgacgagctgagacgcgacgaacttgtcgagcactctccagtcggtgaccgagtcgtccatgtaagcggcttccgtcatcggcagttgccgcgcggtgtacccagaagcatcgtcgggggactggaggctgcagctgccctgggcggcgatgtaggcgggaggaggcttggggctctccaactgtgggagctgctgcaagaaggcgtcttggctgggcagaaggtgatggtactccagctccggcttgcagtggtagagctgctgctggccgctgtacaccgccgct

SEQ ID NO: 50877 - DNA, 3320 bp, Zea Mays
gtgggtgaatcgcggggggcggggggcgctggatccgcgtgcgggctgacgtgagcgctgagcgggattcgcggcgtggacgttgaggcgggggcagtctacgctccactcttaatagttgtagagatgttatcggctatgtgcactctagttgtgtagaggatggcttccatgttgtatctgcgtgatgctaactcttgagggcgtttagtttgtgaatgtgataatgcagtagcgccggatcttttcttcgcgcccgtgtcgcgagacggctccgctagcagttacgtgttcgcgcgcaagccgccaccaccaccagtctgtcccgttccccacctcaccctcttcttccctatactcgggctacacctgcgaccactgctcacctgtcgcggccatgactcccgcatccacctcccctctcgccgccgccgtcctgcccacgaacttatcttccttctctcgctgcccacctcgccgcctcccgcgcatctcctgcctggcagcgcccgaacgcgggggcaacaatgcgtcgaacgcctcgccggcaccgcagcagccgaggtggggtgccgcggtatccgccgcgctcgcggcggccgtggttgccgcctctatgccagcttacgcggacctgaacaagtttgaggccgagcagcggggcgaatttggcattggctctgccgcgcagttcggctcggccgatctcaagtatgccagcacctctgcttcttcatctcttcttcatgaccattttgttgttacattgcctaggtaatttgctttgttttaatggtcttacaggaaggctgtccacgttaacgagaacttcaggtgggtccttaatttcacttgtaccgagttagaatcccctagtttttcaatggcaacattaaaggaatagttagtagaaaggaaatatattttcaacttcgataattataccggatataacttagcttgctttctgcctgtttcggtctgatgtgattttggccgtatggaaatttaagtattagcgataaacttcacggatataacgatggcagttgtgagtttataaactgaattgtttccaaaatagtccagcattgtgtgtgtatgcattttatgagcattgctttaactcatagttacaagttactagatggaaacaacttgttgtatgaaatgcctatttatggagaaagtgtgtaacaaatatgctacagaattactataacgccccgtttggatccttggaattgaattccattctaataatagtaatttagacacatatcaattaagttaatttggttttatacaaaatatattgtatactattattagcataatgtcggggatatttatgtgctacatttttactatggatgagtgagtcgtagagcgtcaagttgtagagtagaaacaaattctactgatacataaaatcatttcacgtcctctaccctattaatttgagatatgcttatatctgaactttagaaagtggtggaatgttaaattccaaggtaatatgttactttattaagtaaattccaattcctccaaaatgaatgaatccaaacgacccgtaactgtaagtacagtgttgtcaaaccagaataagagtaattatctgtgatatggataaggtcataaggataactaaaggaacaatagttttttctattcctcatctctcatttacataatgcatcatttgttgctttaggcgggccaacttcacatccgctgatatgagagagtcagatttcagtggttccacattcaatggtgcctatcttgaaaaggctgttgcttataaggcaaatttcactggtgctgatttgagtgatacattaatggaccgcatggttctgaatgaagctaaccttacaaatgctgttcttgtacggtcagtcctcacacgtagtgatcttggaggagccatcattgaaggtgctgacttcagtgatgctgttattgacctatcacagaaacaggcattatgcaaatatgcaagtgggaccaaccccatgacaggggtgagcactcgaaaaagcctaggatgtggcaatagccgtcgaaatgcatatgggagcccttcatcccctctgttgagtgccccgccacagaagatccttgaccgagatggtttctgtgatccagctactggtatgtgcgatgcaagctgagaggtttgatccaacatggaaactggtcaatggatggtgtacatacattggagattgagtaagagcagaacagtgcagagaaacaagtcgtttttcttttcctcttgccattgttgtaacattgcaacacggaatcaggtaaaattcaggatgtagatgagatatgcacgctgagtactgaatggcatgtatagcatagtatgtatacgaaaatagatcatatcaatcatgtgcttcatgcttgaaaggagtggcccctgccttgttctaaagccaacatagccaaaagcagaagttcaacagaggagtgtctcagcaaataaactttccactccatttcacaaacattgctgatgcatcggcagcaaccagagctgccgttctggatgaaccgcacaaatagacgtccatcgacagcttgactgtttgtgcagattgtcaggtcagttgctgaagtccctccttagcttcagctttcagctagctaccttgttaacatcaggtcctgaaacctgatatcaaataacaatatatatatatataaccacttcggttacatgtttattatgcatatggagatttttcatgtgccatgacacgcattgcatgatacatatttgtacactaataaatcaggtgtgggaggcatattttatatatatgaattgtatagggcttccaatggattcatgtacgttgtgtagtagctacttccacatgctcgcctcgccgtccccagaggcagatgtagaggcgaagtccagtgcttcttccggctgcctgttctcagactgaaatgcctgcgccgggctggagtaagcggtctctttcgctgtgtcatcgccgccgtggctgacgagctgagacgcgacgaacttgtcgagcactctccagtcggtgaccgagtcgtccatgtaagcggcttccgtcatcggcagttgccgcgcggtgtacccagaagcatcgtcgggggactggaggctgcagctgccctgggcggcgatgtaggcgggaggaggcttggggctctccaactgtgggagctgctgcaagaaggcgtcttggctgggcagaaggtgatggtactccagctccggcttgcagtggtagagctgctgctggccgctgtacaccgccgct

SEQ ID NO: 50878 - DNA, 2306 bp, Zea Mays
gtgggtgaatcgcggggggcggggggcgctggatccgcgtgcgggctgacgtgagcgctgagcgggattcgcggcgtggacgttgaggcgggggcagtctacgctccactcttaatagttgtagagatgttatcggctatgtgcactctagttgtgtagaggatggcttccatgttgtatctgcgtgatgctaactcttgagggcgtttagtttgtgaatgtgataatgcagtagcgccggatcttttcttcgcgcccgtgtcgcgagacggctccgctagcagttacgtgttcgcgcgcaagccgccaccaccaccagtctgtcccgttccccacctcaccctcttcttccctatactcgggctacacctgcgaccactgctcacctgtcgcggccatgactcccgcatccacctcccctctcgccgccgccgtcctgcccacgaacttatcttccttctctcgctgcccacctcgccgcctcccgcgcatctcctgcctggcagcgcccgaacgcgggggcaacaatgcgtcgaacgcctcgccggcaccgcagcagccgaggtggggtgccgcggtatccgccgcgctcgcggcggccgtggttgccgcctctatgccagcttacgcggacctgaacaagtttgaggccgagcagcggggcgaatttggcattggctctgccgcgcagttcggctcggccgatctcaagaaggctgtccacgttaacgagaacttcagatttcagtggttccacattcaatggtgcctatcttgaaaaggctgttgcttataaggcaaatttcactggtgctgatttgagtgatacattaatggaccgcatggttctgaatgaagctaaccttacaaatgctgttcttgtacggtcagtcctcacacgtagtgatcttggaggagccatcattgaaggtgctgacttcagtgatgctgttattgacctatcacagaaacaggcattatgcaaatatgcaagtgggaccaaccccatgacaggggtgagcactcgaaaaagcctaggatgtggcaatagccgtcgaaatgcatatgggagcccttcatcccctctgttgagtgccccgccacagaagatccttgaccgagatggtttctgtgatccagctactggtatgtgcgatgcaagctgagaggtttgatccaacatggaaactggtcaatggatggtgtacatacattggagattgagtaagagcagaacagtgcagagaaacaagtcgtttttcttttcctcttgccattgttgtaacattgcaacacggaatcaggtaaaattcaggatgtagatgagatatgcacgctgagtactgaatggcatgtatagcatagtatgtatacgaaaatagatcatatcaatcatgtgcttcatgcttgaaaggagtggcccctgccttgttctaaagccaacatagccaaaagcagaagttcaacagaggagtgtctcagcaaataaactttccactccatttcacaaacattgctgatgcatcggcagcaaccagagctgccgttctggatgaaccgcacaaatagacgtccatcgacagcttgactgtttgtgcagattgtcaggtcagttgctgaagtccctccttagcttcagctttcagctagctaccttgttaacatcaggtcctgaaacctgatatcaaataacaatatatatatatataaccacttcggttacatgtttattatgcatatggagatttttcatgtgccatgacacgcattgcatgatacatatttgtacactaataaatcaggtgtgggaggcatattttatatatatgaattgtatagggcttccaatggattcatgtacgttgtgtagtagctacttccacatgctcgcctcgccgtccccagaggcagatgtagaggcgaagtccagtgcttcttccggctgcctgttctcagactgaaatgcctgcgccgggctggagtaagcggtctctttcgctgtgtcatcgccgccgtggctgacgagctgagacgcgacgaacttgtcgagcactctccagtcggtgaccgagtcgtccatgtaagcggcttccgtcatcggcagttgccgcgcggtgtacccagaagcatcgtcgggggactggaggctgcagctgccctgggcggcgatgtaggcgggaggaggcttggggctctccaactgtgggagctgctgcaagaaggcgtcttggctgggcagaaggtgatggtactccagctccggcttgcagtggtagagctgctgctggccgctgtacaccgccgct

SEQ ID NO: 50879 - DNA, 1485 bp, Zea Mays
ctacattctaggtcaactttaaaggttctgaatgaagctaaccttacaaatgctgttcttgtacggtcagtcctcacacgtagtgatcttggaggagccatcattgaaggtgctgacttcagtgatgctgttattgacctatcacagaaacaggcattatgcaaatatgcaagtgggaccaaccccatgacaggggtgagcactcgaaaaagcctaggatgtggcaatagccgtcgaaatgcatatgggagcccttcatcccctctgttgagtgccccgccacagaagatccttgaccgagatggtttctgtgatccagctactggtatgtgcgatgcaagctgagaggtttgatccaacatggaaactggtcaatggatggtgtacatacattggagattgagtaagagcagaacagtgcagagaaacaagtcgtttttcttttcctcttgccattgttgtaacattgcaacacggaatcaggtaaaattcaggatgtagatgagatatgcacgctgagtactgaatggcatgtatagcatagtatgtatacgaaaatagatcatatcaatcatgtgcttcatgcttgaaaggagtggcccctgccttgttctaaagccaacatagccaaaagcagaagttcaacagaggagtgtctcagcaaataaactttccactccatttcacaaacattgctgatgcatcggcagcaaccagagctgccgttctggatgaaccgcacaaatagacgtccatcgacagcttgactgtttgtgcagattgtcaggtcagttgctgaagtccctccttagcttcagctttcagctagctaccttgttaacatcaggtcctgaaacctgatatcaaataacaatatatatatatataaccacttcggttacatgtttattatgcatatggagatttttcatgtgccatgacacgcattgcatgatacatatttgtacactaataaatcaggtgtgggaggcatattttatatatatgaattgtatagggcttccaatggattcatgtacgttgtgtagtagctacttccacatgctcgcctcgccgtccccagaggcagatgtagaggcgaagtccagtgcttcttccggctgcctgttctcagactgaaatgcctgcgccgggctggagtaagcggtctctttcgctgtgtcatcgccgccgtggctgacgagctgagacgcgacgaacttgtcgagcactctccagtcggtgaccgagtcgtccatgtaagcggcttccgtcatcggcagttgccgcgcggtgtacccagaagcatcgtcgggggactggaggctgcagctgccctgggcggcgatgtaggcgggaggaggcttggggctctccaactgtgggagctgctgcaagaaggcgtcttggctgggcagaaggtgatggtactccagctccggcttgcagtggtagagctgctgctggccgctgtacaccgccgct

SEQ ID NO: 50880 - DNA, 3764 bp, Zea Mays
atcaggctccatagagatggcgggagtttcagccggtggccccatgggaggcacaccattgtcatcatcattgttgttgaggtcgcgacgtgctgagggagaagaggaagaaaaacgtcgacgtacagctcctcacctcctctgaccacgacgagtgcgccttctcctgccacctccatatccagtgcactgtctccattgtcaccctccttcatcacggcaggggcaggaacgggagcagagagtgatggattgacaaggcgccacaccaaaacacgccgcgggtggggcgacaccatccgctggcgtgggcacacgtgagcacggtgccccagcagccaccagatgaagcagcgcacctgtcgtcgacacgctgccgcacggtggtagaaaagcagttgaaacaccttccgtgaagatcaccaggaacaaccctgggaggtggcttcgagggacgagagcgtcgccgccgagctttttcgctttccaccttcacccaaccgtcgccatcctcttttttgttggggcaaaagacaggagacttggtagataacaaagcgtctttgaagaaatcccgctggacaggacaaccatcaatggaggaagcagggtagtcgtccctccatcgctgggctttggatcgactagtagccagagaaggggatggagtggtccccggcgccagggaaggaaggtgggtggccgccgggcttggagcagacaccggcgtggggctgagaggccggagagggagtggagggtgggggactgggggtgagacgacacatagtagatctaggagtcggtttagctagataaaagggagaagattatctaggagtcggttatcagtccttgtttagtcttatgccttcagtagttcaattactacgtctttgaaataagtgatgaaaactattgttgtgagggcctgagcttcctctaggacttagggcatgtacaacccagagactttggaacgggttttccaagtataatacgtgctacatccctaagcttttagatcataaatacaattaagatacaatatatataaagagtcgtgtagagacagtctgttcgcgaagagcctgcctcttgtatttttttttcaattaccacttggagacccctcaagagaccccgtattaaatggagttgtacatgcctagcgaggccacacggctcgattgatttgtttgttgtgttagaagccttgttgctgtttgcctgtaagcttattccggtactgatttgtgttttaggcgtcgagatataagtgtcacgggagcagggagtactgaaagaagatttttgtgactggttcaggaggaaatttgttcctaattgttgtgtagcttagatcttgtgtggaggtttcctatttagttgggataaaggatgttttctgtacttccatgatggtgtattcagcaacttgttgatcactatgctagcgagttccaacactggtttgtgctttaggtgttccgactcaatcaagcatgaatgatcaaggaggaggcgatctagttaatttaggagaaatttggtttataggcgtgaccttagatctaattggtcttctcggtcttttctgggacaaaggcaattttattgtttgattatttaatcagcagcttgatgcatcttatctgtcaatcactactcctttgaaaactgacggaacatgttgctccttttaggttaaggttgcaggcttttagcttgggattctgaaagatggggacctcttctggcgcgaatttccatcagcaacctcctccgacccaggggatgttgcctccaaggcatggtccacgcccctcagggttgcagacctcgctctcgctggcctcttcggagcaggttggctcgcctgacatgcaggagcctggttcaaactcggagccagggcatgattccgccactgagagcgccagttccaaagacacatggccagctgagccgaaccagagcaatggtggagtggctgccagtgatgttgtgagtaaggcggcggagaaggaggtggcaaatggtgtatccaagccgcaggttatccatggaccctcctcccgtatgagtgggatgcttctgcgggaggttgcacgggagagggttgatctggtcgctgagaagatgaagatgatgtcggatgagcacctagaggaggtcaagaatgagctcaggtcgattctggagggcactggaggttctcaccacatcgaggagttcttgtacttgcagaagcttgtccaggacaggcatgatttgacaccatccatgctttcagtggcacaccatgtgcagcttgagatccttgttgcaatcaagactgggatacaggcctttctgcaccccagtgttaccattccacacaatcgcttggtggaggtcttcttgtacaagaggtgccggaacattgcttgccagagtgctctccctgctgaggagtgcagatgcaacgtgtgcgctagcaggaatggcttttgcaacctgtgcatgtgtgtcatctgcaacaagtttgattttgaggtcaatacatgccgttggattggctgtgatttttgctctcactggacacatacagattgtgcaattcacaatggccagatcggaatgggacaatcagtgaaaagcagcattggtcatgctgaaatgctttttaggtgccgagcttgtcagaggacctcagagctgctgggttgggttaaggatgtcttccaacaatgcgctcctggttgggatagggatgctttgttacgcgagcttgagttcgtttgtaagatattccgtttaagtgaggatgcaaaagggagagtgttgttcaggaaatgtctagatctgattgaaaggctgaggaacactccagctgattccatcaatcctaggatgatactacaagcactccaagagcttgagatggactcccccaagatctctgaaaatgaagatgttgggcatctgatcacaccccaggaagcctgcaaccgcatagcagaggtagtccaagaggccgtgagaaagatggagctcgtggctgaagaaaagatgcgactttacaagaaggcgaacgaggcccggcaggaggcggagcgtctgcagagcattgcgctcaccaagtccaagacagccgagcaggactatgccagcatgtacctaaagcggcgcctggaggaggcggaggcagagaagcagttcctcttcgagaagatcaagctgcaggagaaccagaggccaacggtcggcgtgggcagcagcagcggtgcgggaggggactccacgccgacgatgatgctatccaagattcaggatctgctcaagaacgtccgcagcatgccagcaaagtcggagggtcactagtcggagtaagagctttcgctgctgacactttcggtaattatgtgtgatctgctgacttgttcgagcagaggtgtaacgaaatcgtgtggtgctgtgagaaattcgaatcccttcgcgttactgtcggtactcgctaggcgtgctgatgtattaactctgttggcgcaggtgatcatagtgtcttgaaacaatgttaaaagttacatcggtagacacgaaacaaccaacagttgtggccctccctttgcatcttaaatctacgtatacacccgcatgcatttttaacggagcccttgaccaaacacggtatggttggtgagtatgtattgatctgtgagaaatctgttagattatataatccaaacagattataatctcatgcaaatatccttttatct

SEQ ID NO: 50881 - DNA, 2633 bp, Zea Mays
cagccaccagatgaagcagcgcacctgtcgtcgacacgctgccgcacggtggtagaaaagcagttgaaacaccttccgtgaagatcaccaggaacaaccctgggaggtggcttcgagggacgagagcgtcgccgccgagctttttcgctttccaccttcacccaaccgtcgccatcctcttttttgttggggcaaaagacaggagacttggtagataacaaagcgtctttgaagaaatcccgctggacaggacaaccatcaatggaggaagcagggtagtcgtccctccatcgctgggctttggatcgactagtagccagagaaggggatggagtggtccccggcgccagggaaggaaggtgggtggccgccgggcttggagcagacaccggcgtggggctgagaggccggagagggagtggagggtgggggactgggggtgagacgacacatagtagatctaggagtcggtttagctagataaaagggagaagattatctaggagtcggttatcagtccttgtttagtcttatgccttcagtagttcaattactacgtctttgaaataagtgatgaaaactattgttgtgagggcctgagcttcctctaggacttagggcatgtacaacccagagactttggaacgggttttccaagtataatacgtgctacatccctaagcttttagatcataaatacaattaagatacaatatatataaagagtcgtgtagagacagtctgttcgcgaagagcctgcctcttgtatttttttttcaattaccacttggagacccctcaagagaccccgtattaaatggagttgtacatgcctagcgaggccacacggctcgattgatttgtttgttgtgttagaagccttgttgctgtttgcctgtaagcttattccggtactgatttgtgttttaggcgtcgagatataagtgtcacgggagcagggagtactgaaagaagatttttgtgactggttcaggaggaaatttgttcctaattgttgtgtagcttagatcttgtgtggaggtttcctatttagttgggataaaggatgttttctgtacttccatgatggtgtattcagcaacttgttgatcactatgctagcgagttccaacactggtttgtgctttaggtgttccgactcaatcaagcatgaatgatcaaggaggaggcgatctagttaatttaggagaaatttggtttataggcgtgaccttagatctaattggtcttctcggtcttttctgggacaaaggcaattttattgtttgattatttaatcagcagcttgatgcatcttatctgtcaatcactactcctttgaaaactgacggaacatgttgctccttttaggttaaggttgcaggcttttagcttgggattctgaaagatggggacctcttctggcgcgaatttccatcagcaacctcctccgacccaggggatgttgcctccaaggcatggtccacgcccctcagggttgcagacctcgctctcgctggcctcttcggagcaggttggctcgcctgacatgcaggagcctggttcaaactcggagccagggcatgattccgccactgagagcgccagttccaaagacacatggccagctgagccgaaccagagcaatggtggagtggctgccagtgatgttgtgagtaaggcggcggagaaggaggtggcaaatggtgtatccaagccgcaggttatccatggaccctcctcccgtatgagtgggatgcttctgcgggaggttgcacgggagagggttgatctggtcgctgagaagatgaagatgatgtcggatgagcacctagaggaggtcaagaatgagctcaggtcgattctggagggcactggaggttctcaccacatcgaggagttcttgtacttgcagaagcttgtccaggacaggcatgatttgacaccatccatgctttcagtggcacaccatgtgcagcttgagatccttgttgcaatcaagactgggatacaggcctttctgcaccccagtgttaccattccacacaatcgcttggtggaggtcttcttgtacaagaggtgccggaacattgcttgccagagtgctctccctgctgaggagtgcagatgcaacgtgtgcgctagcaggaatggcttttgcaacctgtgcatgtgtgtcatctgcaacaagtttgattttgaggtcaatacatgccgttggattggctgtgatttttgctctcactggacacatacagattgtgcaattcacaatggccagatcggaatgggacaatcagtgaaaagcagcattggtcatgctgaaatgctttttaggtgccgagcttgtcagaggacctcagagctgctgggttgggttaaggatgtcttccaacaatgcgctcctggttgggatagggatgctttgttacgcgagcttgagttcgtttgtaagatattccgtttaagtgaggatgcaaaagggagagtgttgttcaggaaatgtctagatctgattgaaaggctgaggaacactccagctgattccatcaatcctaggatgatactacaagcactccaagctttctgacttctgagtatattgatgggttgatgtactatggacatatctt

SEQ ID NO: 50882 - DNA, 1699 bp, Zea Mays
aaagcttgaggtgaaatttgggggtgcgggtcggggctggagggtcgcattaagagcacactatgttggattaatctccactaagatggacccaaccctatatggttggtgggcccctatcacaatgcgctataaatgatgggtgggggctggcggctctaatgacgcagttcgctagagccgcattccccaccgacaaactctaacaccgatctgagagagggtgcgcagctagcaacaggaagacaccatcgttcttagccgtcgccagcctcgctgcatcgaccatagctgccctagcgcagatcttcaccaacgaacctgatggcgactggatctgcatcctccaacacgcctgcgctttctactgacggatcaaaaccttgataaaggtaaagcttctcgcccttgaaggtcttgtcaccatattccatgacgtgagagcctgcaccatagctattgaagtctgaagtacgcttcttcacctgtgcacaatgctgtgactaagtacaagtttataaagcgatcaaatgaaatgcctagaagtacgatgaatgcatcaaggactgtgataaggctgtggagaggggaagagaacttcgtgctgatttcaagatgatctcaagggcactgacaagaaaaggaacagctctagtcaagcttgctaagacctctaaggattttgatattgccatcgagacctaccagaaggctctaactgagcatcggaacccagacactcttaaaaagttgaatgaggctgagagagcgaaaaaagagttggagcaacaagagtactatgatccaaaattagcagatgaggagagagagaaaggcaacgagttcttcaaggagcaaaaatacccagaagcaataaaacactacacggaggctctcaagagaaacccaaaggatcctagggtttacagcaatagggctgcctgctacaccaagttaggagccatgcctgaaggtcttaaagatgcagagaagtgtcttgaactagaccccaccttcactaaagggtacacaaggaaaggtgcaattcaattcttcatgaaagaatatgacaaggccatggaaacctatcaggctggcctgaagcatgacccgaaaaaccaggaactgcttgatggtgttaggaggtgcattgaacaaattaacaaggctaacagaggtgaaataagtcaggatgaattgcaagaaagacagaacaaagctatgcaagacccagagatccagaacattcttaccgaccctatcatgagacaggtgctaaatgatttccaggagaacccaagggcggcccaggagcacctgaagaaccctggagttatgcaaaagattcagaagcttgtaagtgctgggatagtccaaatgagatgatcaggcacacgatgcgattgtacctgcttgttcgtcccttgtgcttggctttgttagttaacgtgccctttaacaagcagcgacggcaaaagaatgaggggctaatcttttttcccaattggattgtaagtgcagttaacattggattattcatgtttgtggcagagtctgagtataggcgccgtcttgctttattgatgctggactttgcgtgcttgtgggtgggggttggttccctagctaaagtttagttcatgtcccattaaatatttgaatataatatatatttaattaggtttcataaaattttctc

SEQ ID NO: 50883 - DNA, 820 bp, Zea Mays
gtcagctagtcaagaattgaaagatgagctcgtcatctgaaggtttacagcaatagggctgcctgctacaccaagttaggagccatgcctgaaggtcttaaagatgcagagaagtgtcttgaactagaccccaccttcactaaagggtacacaaggaaaggtgcaattcaattcttcatgaaagaatatgacaaggccatggaaacctatcaggctggcctgaagcatgacccgaaaaaccaggaactgcttgatggtgttaggaggtgcattgaacaaattaacaaggctaacagaggtgaaataagtcaggatgaattgcaagaaagacagaacaaagctatgcaagacccagagatccagaacattcttaccgaccctatcatgagacaggtgctaaatgatttccaggagaacccaagggcggcccaggagcacctgaagaaccctggagttatgcaaaagattcagaagcttgtaagtgctgggatagtccaaatgagatgatcaggcacacgatgcgattgtacctgcttgttcgtcccttgtgcttggctttgttagttaacgtgccctttaacaagcagcgacggcaaaagaatgaggggctaatcttttttcccaattggattgtaagtgcagttaacattggattattcatgtttgtggcagagtctgagtataggcgccgtcttgctttattgatgctggactttgcgtgcttgtgggtgggggttggttccctagctaaagtttagttcatgtcccattaaatatttgaatataatatatatttaattaggtttcataaaattttctc

SEQ ID NO: 50884 - DNA, 1856 bp, Zea Mays
catatctttccgcgctaaccccggtctagtagctaggaagtaacacactagtagcatcccccatcatccagcctcgcggttgctacagttagcttcgctttcctccagcccatccttctatacacgattgacctgagctgagccgcctccgacccgtctcgagagggagggagagggagagcgagagctagcgcgcgcgatcgcaaagagagcggtgaaagatgaaggtgcagtgcgacgtgtgcgcggccgaggcggcgtctgtgttctgctgcgccgtcgaggccgcgctgtgcgaggcgtgcgaccgccgcgtgcaccgcgccaacaagctcgccggcaagcaccgccggctctcgctgctcagcccggcggcgccgtcctcgtcggcgcagcagacaccgccgcctccgctctgcgacatctgccaggagaagcgcgggctcctgttctgcaaggaggaccgggcgatcctgtgccccgactgcgacgtgccggtgcacacggccagcgagctggccatgcgccacacccggttcctgctcacgggcgtgcgcctctccggctctccgcagagcccgccgcgcgcccgccgccgtcggaggaggacgagaacgacagcagcagcagcagcatctccgagtacctgaccaagacgctgcccgggtggcatgtcgaggacttcctggtggacgagaccgccgccgcaactgccattggcgtctccgcagacgtgtcgtatcaggttggtggtggtgtcggtcccatgcgtatatgtatacgtgctactgctactacgtactcttcagtttagccattgccgcgcgtgcaggaaaagtttagcagtccatgaacgactcttgtctttgttcctgagctgacccgccgcacccaaagcatggcatggcatagcatagcatatcccgagcacgcacgtacaggtctgcgtcgtcggcattagtgcgctgcttccaatccaaccagtaaccatccattatgggcgcgctgtagtatgcctatgctctcgctgcctggtccaggctccagggtgtgtgtgtactgtgaggtggatcataatatctccaggaacaactttatttaatctcgcggggccagtttagccacggctcgctgatgaccctgaccctaaaattaataatactagtactactgtttgtgataatagaatagatcggtttgtacgataagcaaatctaccgctcacgggctttgacatgcacgtgtgatgtgtttaacctggtttcccgctgcggcatctgactgagcaggcgggagggctagctcggacaggcggcccgcaggacggctactactccgcgtggatggcgccggagcagatcttctgcgagggcaagggcagcaggatgccgcagatggcgatgtgcagcagcagcaagagacccagagccacgtcctcctattcttactggtgaacaacccaacaggagacgaccgtgtcaggagaccacctctctctccccagggaactgcagaagcacgtgtaggactcgcaatttctggaattcttccacgtgcagcggaattcggcgtggggtccaagttgattggagtttagtgcaaacttgtcaaatttaaaccaaagttgaaggagatgccgcgagcaatatacatgttgggcaacagaatacggtcatgggtagtagaaaagcacgccctacacattcgcggggctagcggcggcttatgttcacacgtcaaatcacaccgtcatatgtatttctttttttttaaaaaaaatcctccgtatatcccctccaactctcttgccaccaagacagtcctgaatgaaattaaaatttagaaatagagttcgg

SEQ ID NO: 50885 - DNA, 11976 bp, Zea Mays
cgacaacgagttcggatttaagcacgtaatataagtggatgaaacggatactaaaatttaatcgtcttcgcctattgtgattttaatatcgcatctctttcgtctgtcgcgggtgcgacatcgtttttatttcatctattcgggctcgtcctaaatttttgtgttgttcggaacatagtggttccgaaaatcggtgcgtccggtgattatttaaaattcatcgctcgcgtatatacgaatttggaaatttattccagtcctccgatttcttctcaaacgagatttattagaactcgacaactaaagttttaggtgaaaaataattctatctcagcccattagctgagaaatcacatccgaggatttgaaattgagatttattcgctcagtaaattatctaccctaaattaaatcaagcgcaggctgtactagtttgactggtatcttttatttcatccagcttacctcccgcgtagatttaatttgagaactaaattatctgtatagtcttttgtgtaaaaaaaagagaagaaaaattctatttttctttcaccattttatatcccagtattatctcttccccatcgtaacttctctcatccaatggacagcgttcttcgtttttttttttcggccaccgctttggacttctgtattatcccgacgccgctttaatccctggagttccatctcccgtagctgtacttggtcttatccgtgtacagagctcgttcatttctccaacacgacatccctctccagctcattccagcgcattccaccagttgctctctgccgcgcccctggcccctctgtgcgagctcgttccatagccggcttcgagctcgccctgctcggtcatggcgtggacaccagacgagctccctagtgctcgcccctctccagccgagctcctctcatctctccctcgcgtcttcctctccctgccatggacgccggagttccgctactcgccatggctgccggacgagtctcttccgtctttgctcgacatcttcgagcttggttcctgcgtgcgcgctgcactactcccatggcgtgttcctgcgcccggctggatttccctgctgagctcggtcacatgcctgggcaccgtgttctgcacgctcgccggtttcttcgcctccatcagccgcggcaacgtgctcttgctggcgcccctagtcacaactcgagttgtctttctggctggccaccagcgtgtcgtctagggacgattcttcactgttgcttctccacggccgtcaccttccatggccggcgttcccctctcttccattgccgcgatgctccctcgctcctgctgctcgccgtggccagcagcttcaaatccttgtagcatgtctccgcactctgcgtcatcaccgtcgtggtttttggagttcgtcgtgacgcgctgccgatgatctgtgtatagcgggagatcttcgcaagttcacgcagcttcgtggtacgtttattgactacgtgatacggaggatcagaactgagtcgaccacaagatgtcgccgcgcgtgagtttctccacaagatgatgctgacggacgaaactgaagatggacagacgaagcaagtatcagaacaaaaggatgatcgccaagtggtcgtcgtctaacaaacactaacgtagtgtttattccaggcaagccccggtgcatttaccccttccttgtgtttttaaaaagatttttatacactttaagtctagcgaaatgtgcattaagtttataggagttgcttggaaaccctttgatgcattgcctaccttgatatccatacctttatagatacttctggtgaagtatcaaaacatgatttacaaaaatgcttagccctgcttataagcagatggagtttgtcctttgcacttatgcccagctcaggtttatcctgaggaaggatggcttctacctgcaacaatatttttcttgggagcatggtgggatcttactgcaaagttccctataatgctcttttcatcctaaggaacacaaaacaatcctaaggatggaagtacttaaatcgggacttgggctaggaacaggtgatgctccgcccaagttagttaaggattggatgcgtatgtaggcctgtatgatcaaggactatcttaactagccacatgccctggatatgggacaggataagcttgaacccggctattccatacatgaaaagacaatcgcgcactgggagtggagagatggcgagagtggcacgtaccctcctggcaaaggaccgcctaaaaagggtggtgtgctctcgggtggcgcggacctgttcatgcagtggaggatccgtgggaatggttgacatatgcaagggttaagtgctacatatgtcgtgtggttagaaatcctcagctgagtaaatcgattcggatcgccgttatatccccggagagtggagacttgatcgctgccctgcaacctaagtcaggatgtgaacctcatgaataaaaatgatgttgtattgatgagatggtgaaattagaccagatgcaaatagagtctattaatatttaatctgacgttaaaatattgaaagtaaggactcactttagtaagctatttctgcaaaagtatctaagttgatttttgctaaagcctctccttgattcccaaatccagcatatccttgagagtcttttctttagtcgggtaagtcttgctgagtaattccatactcagggttttattccctattgtttttcaggtcatagttttgtgctgctgatgatggtgttaagtgtcggtgggctcgaccttcttataagtctaagtaacccttctatacttcttaatgaggatggtcccttgagctagcatatatttcaaacttatacttttgtaatcactccgataaactaatgtaaaatttttgtaacctgtaaaatttggtagtaagatttacgctgcaacaatattggtgtgtgtgatttgtgttacttaatcccgcggttctggttgtaagtggtttatccgatgtccttgggacactcggacggatcctgttaagttatttggtgcacatgcatagtcgtctgaggtctttgagacaaggacaggtgcatgtgggcccaataacttgggaggttctgccacagctggtatcggagcaggattaagtataatacggtcacatacatattttaaaaacaaagttttagttttagaaaacctattttcaacttaacacattgttggctttgaaaaacagttttgaaaaactataatgctagcgacatcctctattaagccctaaattaaggactatcaggtggcttagttgaaaaccataacctggtggatattgcatacatgtgtattgttatttttgaggccattcagttttgaatggatcgacgctcaaggtaaggtgagatgtgagagcatgaccgaacaaccgtcggtctagggaagagtgtaaaaagcgcttgactatatacatgttctacatatgtatatatgaaggttgcgatgtggagtatttacttttctgggaattcagtaccccatggatgtgtatgggtatacagacatgggaatactgagaagtgtaatgtacttgtaacgacgcacctacgctcaggtgagaaggtaagttaccataatgagttgccctatggttaaagtgtggcaacggcgcctatgcctggctcggcgcttaatgatgagctagcctccatatagaaatatatggagtataaactgtgataaactgtcatgtgtgaactgcatcatgggaaaatgggctgtgatgaaattttctgcaggtacactaacctcgaaaacgtatgtgtagctgacgactagcaaaataccgtgagagtcgttagtatgccaccgagatagaacgctatcgccacattatgttggcaaactcgtgaggacgtctaggacgagcatgcatcctgattgttgcatcatgtttgtcacctatacacccaaaatgcttctctcatctttgttccagtaaccattgattgtagataatgtggtgtaatgctgaattatgaacttcgatgaaatagctatcctctgttctttaggtaacctgttaaggtcttatatggtgtttgctcttgtgctggaagtgccgatagaatgtttgtgacctatttgtgtaaaccctaaactagaccatgttcgtgtttagtgaaccatgaccctaaagttgatttttccgttacccttccttgacccaaacttatacaaataaatgcttagataatttctttgctggacataaagtgtaccctagcttaaaacaagaatctcaagtcatgtttccaaccaaaaccattcccttgttcggttggtgcaagctgatgtcccttatccagttttggctcttcttatggatcatgtcgttattttatcaacctaacctaggaaagacatgtccgaccattttcttgagtttgatgcctttggtttctccatatttatcgaaggcatactaaattaatccttgaccttgtaatcgctacagtgggtatcagtaacagtctcccatcatactccttttatcaagtttaggttatggccatgccttgttcatttcatcgggccataatctatttggctctctacttgtaaccgttttgacaggtagagtctctttgtatattgtcacccttgcctaatccattggtgtcgcgcgaagtttcttattggttatgtctggtaatggtgctatgactaaaactgatggtgccgtgacgaaaccgagggccttctgtgtgtgcgcacacatggttgtgctgctcggcacgcgctggtatcacagttagtagttgtaatccattatgagactatgtcaatgcgttatcttggcacaatctgtttttgctatgtgagattgttattggtgccagttcggtagtggtgtcacgattaatgacttatggtgccgcagcgaaactgagagcctcctgtgaatgcgcacacaggactgtgctactcgtcggatgctggtatcaaggtctctggtcatgatccattgtggaactacactaatgtgttatcttccataaactacttccttgaaacaatttctatgttgtttgtcaagtgatcaagcaacatccatcatctctgttggatcaaaagggcatacccctttaatgtgtggtctcttgtccctttactttggtagtgactacacacatacaagttccctttatgtcctttgtgtaaaggtgaagccttggagctttttagtgtcgagagacaactgattagctctcaaaatggtgatctgtttcccctgctgctgagatgcaggagtttattcattcgctctcttatttaatccatgtattcccgaaccaagtcaattcatctcgcatggaagaaatggatgaacaacctgaccaaatggatttctatccaaatacatgatcttttgctagcagatgtgaactctcaacccttggcttaccgatggtactgagaggacatgcccaatgtcaaaagtagttcaacaagttggttttactaacttgtaactgcactgtaacaaaggttgagtttagagatcgttttatcgatttgcctgaactcactttggttcaacccaccctaaagaaagtacttacaagaatcaagttaagtcgactaataaccacctaattatcgctctagccatgcctcaatcgtctcacgtgtgcttttccagcatgtgtgattaagtcgatccatgattagtgctggataaaatggagtggttgtaaagttcgtatctactgatccatccgctggtgattttctcgaatctatatcacctttcagggacttggattttttggttagccacgagtcaactgtgatgttattcgacattcacacccgtctcttgtgctaagaacttaccatgaccgcttgttggtaaacccctttctgtgtgttttacccaagaggttgcatctggttctgtttgggtaaggtcatatatctaccgctcacccaacagaatcagatagtatggtgtcatcaggaaaaagcaaactgcacacatgggaccttatgtgttcttctggcagacatcgtctctattggtggacatctctaaattggcttaagtcgatacatgttatgcccactagagaaaccacatcctgagacacttgccttcgctcagaactgccttatgattatcgctgatatggacgtgggttacatgcttctctactcttgaaagtctttcgctccgaatctcgggacgagattcttttaaggggggagggctgtaacaccccaggtgtttatattccgctcgacaacgagttcggatttaagcacgtaatataagtggatgaaacggatactaaaatttaatcgtcttcgcctattgtgattttaatatcgcatctctttcgtctgtcgcgggtgcgacatcgtttttatttcatctattcgggctcgtcctaaatttttgtgttgttcggaacatagtggttccgaaaatcggtgcgtccggtgattatttaaaattcatcgctcgcgtatatacgaatttggaaatttattccagtcctccgatttcttctcaaacgagatttattagaactcgacaactaaagttttaggtgaaaaataattctatctcagcccattagctgagaaatcacatccgaggatttgaaattgagatttattcgctcagtaaattatctaccctaaattaaatcaagcgcaggctgtactagtttgactggtatcttttatttcatccagcttacctcccgcgtagatttaatttgagaactaaattatctgtatagtcttttgtgtaaaaaaaagagaagaaaaattctatttttctttcaccattttatatcccagtattatctcttccccatcgtaacttctctcatccaatggacagcgttcttcgtttttttttttcggccaccgctttggacttctgtattatcccgacgccgctttaatccctggagttccatctcccgtagctgtacttggtcttatccgtgtacagagctcgttcatttctccaatacgacatccctctccagctcattccagcgcattccaccagttgctctctgccgcgcccctggcccctctgtgcgagctcgttccatagccggcttcgagctcgccctgctcggtcatggcgtggacaccagacgagctccctagtgctcgcccctctccagccgagctcctctcatctctccctcgcgtcttcctctccctgccatggacgccggagttccgctactcgccatggctgccggacgagtctcttccgtctttgctcgacatcttcgagcttggttcctgcgtgcgcgctgcactactcccatggcgtgttcctgcgcccggctggatttccctgctgagctcggtcacatgcctgggcaccgtgttctgcacgctcgccggtttcttcgcctccatcagccgcggcaacgtgctcttgctggcgcccctagtcacaactcgagttgtctttctggctggccaccagcgtgtcgtctagggacgattcttcactgttgcttctccacggccgtcaccttccatggccggcgttcccctctcttccattgccgcgatgctccctcgctcctgctgctcgccgtggccagcagcttcaaatccttgtagcatgtctccgcactctgcgtcatcaccgtcgtggtttttggagttcgtcgtgacgcgctgccgatgatctgtgtatagcgggagatcttcgcaagttcacgcagcttcgtggtaattaattttgatggtgatttgtgttatttagcgctatgtttgtttcctttgtgtgtttttgtgtgcgaccgtggagaaagatttgatgctgaagccgaagccagcgcgatgcttctcgattgttcgatgaaatggtcaagttgagtattagtgaactatattcgctacctccgttagcagagttattagatggattagctaagtatgttgatttgattatcttatttgcctatacccatagtggcggtgttagatattggttcaactgcttcgtatatacggtgtgtagtttaattaatatcgtaaaatatagttttagtattcgaaacgattagctgttaagtcctgatattgttgattgtactaattgtatttatatagtaaaatcgatagcctgtcttaatcgtctttttatcctatatgtagtagtcgattaaatgtcatggttagatgttacttgtgcttccgaatatttagaaccgagccacattgatgaatttgcttccactaaaatatgtgatatacaagttagtctaagtgaataatttagaaatactcattaaattacttctgttctatattaatgaacctagatttttggtgatcttttgatgtatgcgctagctttaaaaaaatatagaacctatgcatggtttaatatttcttgatatttgagttaggtctggttaagatagagagggtgattgttgtatttagtaatatgttgatattagtatcatgaatgttgtaatgcatctcgcctttaagtgtttaattctatatcgtgtagcattatttaggtttgtaatattcatgtttatatgcattcatgtgcattatgcaaatcatttaggtacgtttattgactacgtgatacggaggatcagaactgagtcgaccacaagatgtcgccgcgcgtgagtttctccacaagatgatgctgacggacgaaactgaagatggacagacgaagcaagtatcagaacaaaaggatgatcgccaagtggtcgtcgtctaacaaacactaacgtagtgtttattccaggcaagccccggtgcatttaccccttccttgtgtttttaaaaagatttttatacactttaagtctagcgaaatgtgcattaagtttataggagttgcttggaaaccctttgatgcattgcctaccttgatatccatacctttatagatacttctggtgaagtatcaaaacatgatttacaaaaatgcttagccctgcttataagcagatggagtttgtcctttgcacttatgcccagctcaggtttatcctgaggaaggatggcttctacctgcaacaatatttttcttgggagcatggtgggatcttactgcaaagttccctataatgctcttttcatcctaaggaacacaaaacaatcctaaggatggaagtacttaaatcgggacttgggctaggaacaggtgatgctccgcccaagttagttaaggattggatgcgtatgtaggcctgtatgatcaaggactatcttaactagccacatgccctggatatgggacaggataagcttgaacccggctattccatacatgaaaagacaatcgcgcactgggagtggagagatggcgagagtggcacgtaccctcctggcaaaggaccgcctaaaaagggtggtgtgctctcgggtggcgcggacctgttcatgcagtggaggatccgtgggaatggttgacatatgcaagggttaagtgctacatatgtcgtgtggttagaaatcctcagctgagtaaatcgattcggatcgccgttatatccccggagagtggagacttgatcgctgccctgcaacctaagtcaggatgtgaacctcatgaataaaaatgatgttgtattgatgagatggtgaaattagaccagatgcaaatagagtctattaatatttaatctgacgttaaaatattgaaagtaaggactcactttagtaagctatttctgcaaaagtatctaagttgatttttgctaaagcctctccttgattcccaaatccagcatatccttgagagtcttttctttagtcgggtaagtcttgctgagtaattccatactcagggttttattccctattgtttttcaggtcatagttttgtgctgctgatgatggtgttaagtgtcggtgggctcgaccttcttataagtctaagtaacccttctatacttcttaatgaggatggtcccttgagctagcatatatttcaaacttatacttttgtaatcactccgataaactaatgtaaaatttttgtaacctgtaaaatttggtagtaagatttacgctgcaacaatattggtgtgtgtgatttgtgttacttaatcccgcggttctggttgtaagtggtttatccgatgtccttgggacactcggacggatcctgttaagttatttggtgcacatgcatagtcgtctgaggtctttgagacaaggacaggtgcatgtgggcccaataacttgggaggttctgccacactggggctaggcatgccgcttttaaaaatttgctttgcttttaaagatttgctgacaagctgaagaattcgatacaggtagaatgctaatacatgagagcacaacacaactaattaatgtctgtttacatctaattttatacagatataagaggacaaataattgatgaactaatgctagaaaattgcagttaagaacactgtaggcacacaacaataatcaaaagtctgcaaatgtggactacaagaagattgaacgatttcagttaaatctgctataaccgataagagaataagtcaaattaatagtttgaagtgaagcaatgctatggcttataattgaatgctatttgagagactatccataggatatgtcatttggaaacaacatattcaatactgattgcttcaagtagaagataggctatctgtaatttctgaatcttcaaaagtttgcatccaatggcaaatagataccggaatgagctcaagtgatacatttagagcaatgattaattccatctacttctttgcaatatttaagcaaatgcatttctaacgttacaaatttgatcacttttgaggtatgaacatttagaagccgaagaccatggcggcataggtacacagtgccaacgttgcctccgtcgatgcggcgcagcagcctagtgtcacgcggtctcaacggcgccgcggccggcgccgacgccacgtggatggtcacccacgccatcgacgaggtcagagcagcagtagccgccatgggtagcgcgcagatgtggagcagtcgaatgagaaagacgggctggagcaccacagcaggttggtgttgctgctggccagcagccgctcctctccccaccggcgccgagaggggacctgtgacccaaggatctgtttttcggggggatatggtgttcgcggtcgtcaaggatctcaggctcaaccactccaaggacccatcggccatgtggttacgcaatccaaaggcctccctcaccgatttcatctagggtccagttcttgaaagggtgggaatgtgtccaagaagacaaaggcatcgacccgccaattcttcgctacaaattcaaacagcactaggttaagctgaatgcaaaccatcgagatggtccaggtcgaggacctccatggcacctacgttggtgtgggttatgccacctcatcgtgactgtcatcgattgggcctccgagtccaggagaatacctacgatgaagaaagagacatgctgcacatgcacgagggtacttgcagatagatgtcggctctatggacgaacactcgaccaagtcagttgaggagtatgagggcctagccatgcgcgacgtgatgactactggtccgacgatgtgcagcaagttgtgagttaaagatgaactcacctgccctggagagcaacattcataggagtgaggcaaaatggctggtaccaccacaacatggacccattcctgaagatgtccaaggaggtggtagtcgacaccataatgtcttgcgcgtcattgtgtcaccaacaggcaacacgctgcgctggtaccgacgggtgttgtgtttcttaggcatctgcttctgtgctttgagctgtgctatagagtggttgtgccaactactgattttaaaagaaaaaggtgagctgagaaccattgttgaaaacaaatatgtaacggttcgttct

SEQ ID NO: 50886 - DNA, 1437 bp, Zea Mays
attgtttttcaggtcatagttttgtgctgctgatgatggtgttaagtgtcggtgggctcgaccttcttataagtctaagtatgaacatttagaagccgaagaccatggcggcataggtacacagtgccaacgttgcctccgtcgatgcggcgcagcagcctagtgtcacgcggtctcaacggcgccgcggccggcgccgacgccacgtggatggtcacccacgccatcgacgaggtcagagcagcagtagccgccatgggtagcgcgcagatgtggagcagtcgaatgagaaagacgggctggagcaccacagcaggttggtgttgctgctggccagcagccgctcctctccccaccggcgccgagaggggacctgtgacccaaggatctgtttttcggggggatatggtgttcgcggtcgtcaaggatctcaggctcaaccactccaaggacccatcggccatgtggttacgcaatccaaaggcctccctcaccgatttcatctagggtccagttcttgaaagggtgggaatgtgtccaagaagacaaaggcatcgacccgccaattcttcgctacaaattcaaacagcactagggtgagatcagtgggcttgagagtagcatcatccttcaaacaagatcaatattttgccacaactcataatgagatcgagatttcattgtacatgcatccacaaggcatctttttatattttttaacatgagtgtactgatgcaatgtcgttctgttttgtcattttatttttgttatatcttggagatgtcgagcttgatcaatattttgccattgaatttatgagtggcctatatgttcactgtttgcccatttcttcagttaagctgaatgcaaaccatcgagatggtccaggtcgaggacctccatggcacctacgttggtgtgggttatgccacctcatcgtgactgtcatcgattgggcctccgagtccaggagaatacctacgatgaagaaagagacatgctgcacatgcacgagatagatgtcggctctatggacgaacactcgaccaagtcagttgaggagtatgagggcctagccatgcgcgacgtgatgactactggtccgacgatgtgcagcaagttgtgagttaaagatgaactcacctgccctggagagcaacattcataggagtgaggcaaaatggctggtaccaccacaacatggacccattcctgaagatgtccaaggaggtggtagtcgacaccataatgtcttgcgcgtcattgtgtcaccaacaggcaacacgctgcgctggtaccgacgggtgttgtgtttcttaggcatctgcttctgtgctttgagctgtgctatagagtggttgtgccaactactgattttaaaagaaaaaggtgagctgagaaccattgttgaaaacaaatatgtaacggttcgttct

SEQ ID NO: 50887 - DNA, 4459 bp, Zea Mays
tttttttttttcggccaccgctttggacttctgtattatcccgacgccgctttaatccctggagttccatctcccgtagctgtacttggtcttatccgtgtacagagctcgttcatttctccaatacgacatccctctccagctcattccagcgcattccaccagttgctctctgccgcgcccctggcccctctgtgcgagctcgttccatagccggcttcgagctcgccctgctcggtcatggcgtggacaccagacgagctccctagtgctcgcccctctccagccgagctcctctcatctctccctcgcgtcttcctctccctgccatggacgccggagttccgctactcgccatggctgccggacgagtctcttccgtctttgctcgacatcttcgagcttggttcctgcgtgcgcgctgcactactcccatggcgtgttcctgcgcccggctggatttccctgctgagctcggtcacatgcctgggcaccgtgttctgcacgctcgccggtttcttcgcctccatcagccgcggcaacgtgctcttgctggcgcccctagtcacaactcgagttgtctttctggctggccaccagcgtgtcgtctagggacgattcttcactgttgcttctccacggccgtcaccttccatggccggcgttcccctctcttccattgccgcgatgctccctcgctcctgctgctcgccgtggccagcagcttcaaatccttgtagcatgtctccgcactctgcgtcatcaccgtcgtggtttttggagttcgtcgtgacgcgctgccgatgatctgtgtatagcgggagatcttcgcaagttcacgcagcttcgtggtacgtttattgactacgtgatacggaggatcagaactgagtcgaccacaagatgtcgccgcgcgtgagtttctccacaagatgatgctgacggacgaaactgaagatggacagacgaagcaagtatcagaacaaaaggatgatcgccaagtggtcgtcgtctaacaaacactaacgtagtgtttattccaggcaagccccggtgcatttaccccttccttgtgtttttaaaaagatttttatacactttaagtctagcgaaatgtgcattaagtttataggagttgcttggaaaccctttgatgcattgcctaccttgatatccatacctttatagatacttctggtgaagtatcaaaacatgatttacaaaaatgcttagccctgcttataagcagatggagtttgtcctttgcacttatgcccagctcaggtttatcctgaggaaggatggcttctacctgcaacaatatttttcttgggagcatggtgggatcttactgcaaagttccctataatgctcttttcatcctaaggaacacaaaacaatcctaaggatggaagtacttaaatcgggacttgggctaggaacaggtgatgctccgcccaagttagttaaggattggatgcgtatgtaggcctgtatgatcaaggactatcttaactagccacatgccctggatatgggacaggataagcttgaacccggctattccatacatgaaaagacaatcgcgcactgggagtggagagatggcgagagtggcacgtaccctcctggcaaaggaccgcctaaaaagggtggtgtgctctcgggtggcgcggacctgttcatgcagtggaggatccgtgggaatggttgacatatgcaagggttaagtgctacatatgtcgtgtggttagaaatcctcagctgagtaaatcgattcggatcgccgttatatccccggagagtggagacttgatcgctgccctgcaacctaagtcaggatgtgaacctcatgaataaaaatgatgttgtattgatgagatggtgaaattagaccagatgcaaatagagtctattaatatttaatctgacgttaaaatattgaaagtaaggactcactttagtaagctatttctgcaaaagtatctaagttgatttttgctaaagcctctccttgattcccaaatccagcatatccttgagagtcttttctttagtcgggtaagtcttgctgagtaattccatactcagggttttattccctattgtttttcaggtcatagttttgtgctgctgatgatggtgttaagtgtcggtgggctcgaccttcttataagtctaagtaacccttctatacttcttaatgaggatggtcccttgagctagcatatatttcaaacttatacttttgtaatcactccgataaactaatgtaaaatttttgtaacctgtaaaatttggtagtaagatttacgctgcaacaatattggtgtgtgtgatttgtgttacttaatcccgcggttctggttgtaagtggtttatccgatgtccttgggacactcggacggatcctgttaagttatttggtgcacatgcatagtcgtctgaggtctttgagacaaggacaggtgcatgtgggcccaataacttgggaggttctgccacactggggctaggcatgccgcttttaaaaatttgctttgcttttaaagatttgctgacaagctgaagaattcgatacaggtagaatgctaatacatgagagcacaacacaactaattaatgtctgtttacatctaattttatacagatataagaggacaaataattgatgaactaatgctagaaaattgcagttaagaacactgtaggcacacaacaataatcaaaagtctgcaaatgtggactacaagaagattgaacgatttcagttaaatctgctataaccgataagagaataagtcaaattaatagtttgaagtgaagcaatgctatggcttataattgaatgctatttgagagactatccataggatatgtcatttggaaacaacatattcaatactgattgcttcaagtagaagataggctatctgtaatttctgaatcttcaaaagtttgcatccaatggcaaatagataccggaatgagctcaagtgatacatttagagcaatgattaattccatctacttctttgcaatatttaagcaaatgcatttctaacgttacaaatttgatcacttttgaggtatgaacatttagaagccgaagaccatggcggcataggtacacagtgccaacgttgcctccgtcgatgcggcgcagcagcctagtgtcacgcggtctcaacggcgccgcggccggcgccgacgccacgtggatggtcacccacgccatcgacgaggtcagagcagcagtagccgccatgggtagcgcgcagatgtggagcagtcgaatgagaaagacgggctggagcaccacagcaggttggtgttgctgctggccagcagccgctcctctccccaccggcgccgagaggggacctgtgacccaaggatctgtttttcggggggatatggtgttcgcggtcgtcaaggatctcaggctcaaccactccaaggacccatcggccatgtggttacgcaatccaaaggcctccctcaccgatttcatctagggtccagttcttgaaagggtgggaatgtgtccaagaagacaaaggcatcgacccgccaattcttcgctacaaattcaaacagcactagggtgagatcagtgggcttgagagtagcatcatccttcaaacaagatcaatattttgccacaactcataatgagatcgagatttcattgtacatgcatccacaaggcatctttttatattttttaacatgagtgtactgatgcaatgtcgttctgttttgtcattttatttttgttatatcttggagatgtcgagcttgatcaatattttgccattgaatttatgagtggcctatatgttcactgtttgcccatttcttcagttaagctgaatgcaaaccatcgagatggtccaggtcgaggacctccatggcacctacgttggtgtgggttatgccacctcatcgtgactgtcatcgattgggcctccgagtccaggagaatacctacgatgaagaaagagacatgctgcacatgcacgagggtacttgcagatagatgtcggctctatggacgaacactcgaccaagtcagttgaggagtatgagggcctagccatgcgcgacgtgatgactactggtccgacgatgtgcagcaagttgtgagttaaagatgaactcacctgccctggagagcaacattcataggagtgaggcaaaatggctggtaccaccacaacatggacccattcctgaagatgtccaaggaggtggtagtcgacaccataatgtcttgcgcgtcattgtgtcaccaacaggcaacacgctgcgctggtaccgacgggtgttgtgtttcttaggcatctgcttctgtgctttgagctgtgctatagagtggttgtgccaactactgattttaaaagaaaaaggtgagctgagaaccattgttgaaaacaaatatgtaacggttcgttct

SEQ ID NO: 50888 - DNA, 828 bp, Zea Mays
ctcgtgtcttcctctacggggatgcttagactccccttcctcaccaggcttcctggattcaccaacacgaagatatcaaatgcagaatttacatttgcaccgtggacaccttttcctaccaagaggttattaccaagaatccttgatccaaatccaagacgttgagcatcatagcaatatttcaatagttaatcatttttttacaaaagaagtcaattgtgtttctacctttgaaggttcaaattttactgcaaaatcaacgagttcttggtggtgttggtatggcataagatccaatggtggcacgtataagtggaaagaaactttaatggaagacatgagcttttgccagtgtcctctggagggtgttgaacataacaatacttgatttgctatctgacggtaggggacgatccctcgacttcgttgtcgccaccaagatacactgactggcctagatctgacctgttaccagtagatgcctacaaccatgccaggttaaaagccccctttcagagttctgtcgtatggtgtccgaccatcttttggctgaaggggaactaccaatttacattatcttgcccggtacaactccaaggcttagctaatgctatagtaaagttgtgggagaaaagttctattgctaaaattgctttgaagggaggagtatagcttaccacaagtgagaggatgtcgaagatattaaagtaagtacaaaaagtgtctcttgttagattttgtatagtttgggtagcatatgtaaaaatttatatcctagttagaagtgttaattgatcactagcaacaacacattacagatttgtagtc

SEQ ID NO: 50889 - DNA, 966 bp, Zea Mays
cagccacgcaatcacgtgggtcaggaaaaggacgagagcggaaaggaccgaacggctcgggttgatccatcggatccgaaggggcatggctctggtcagattggcgtttcccgtgttcttcttcctcgcagcggcggagttcgcggcggggacgcggtcgccgtcggctttcgtacaaaacgccatctactccaaccgcatcaccatcttctccaagacttactgccccatacgaagcctagatgtttggtgtatcgatttgtaatatgtatttatcagaaaaaggctactccatgcgtgctaagcacatatttcgagaccttaaggaagatccatatgttgttgaactagatacccgagtggatgggcgtgacattcaaagtgttctcctggacctagttgggcgtcgtactgtgccacaggtgtttgtcaatggacagcatattggtggctcagacgatacagtaaatgcgctttcaaatggacagctccagaaacttctcgggaagagtcagtcacaatgatgggtcgctggacaagcttgcactgtcaagaacacgtgagtatatgtttgggaggggtgttcttttgtgtttagggctgaacagaatctggtgttgtgacaaccatctgtactgctggatttgtgatctgctcaattgcacccatccatgttttaccttgttcattatggaaattattagtataggtagctcaatgaactagctgcataggctatcctcagaaaaaaaattcctaaacttctgacgactttattggtatcgacatcctccgttacaaagtcattttagattttctaggtacataatttttgctatatatatggacctcagacatagcacatttaggtccttttaacttgcgtcgcttgtttcagtcctctctcaattgtatttgtatcacgtcactctaaaatcatactacctccgtttttgaatatttgtc

SEQ ID NO: 50890 - DNA, 1230 bp, Zea Mays
cacgcaatcacgtgggtcaggaaaaggacgagagcggaaaggaccgaacggctcgggttgatccatcggatccgaaggggcatggctctggtcagattggcgtttcccgtgttcttcttcctcgcagcggcggagttcgcggcggggacgcggtcgccgtcggctttcgtacaaaacgccatctactccaaccgcatcaccatcttctccaagacttactgccccatacgaagcctagatgtttggtgtatcgatttgtaatatgtatttatcagaaaaagggtaaatacagggaaggccttttttgtttttttggtaaatatgcttcctacaaggattgtgtatattgagcagagaacagtgagaatcccccttcaacatgccctcaccttccctgcctaccgtgttgtcaatggctattcaagggaaggggatcgttccttttttttatcttgatgcactttgtttgttttattcttacttttagcttgtctcattcttctctccaatgttgctactgtgccctttctgttatgggcacgatgttgtctgttatttcttccaccaccaccagaacaaagccttttcgttctaagcaagttcgggtatgctatatttgaaacctaacaaaaactacaaatcaaggttcagtcacgtggacagctatttttcatttgcttttattcaagtctaagtctttgggtgcattccattctttcaagtctgcttttactgcatctttccatgccaacttcgacttccccctgtctctcttcccatttactataacaccttagtattccactacacactggtgcctctggatgtttccattggatatgtccaaactatcttaatcgatgttgcataaactgtttttcaattggtgatacctctaacctacacatattatcgattcagacacgatcacttcttgtatggccacaaatccaacgtaacatatgtatttctatagcacttatctactgaacatgacgtctttcgtagactaacatcctgcatcatacaacttagtaggtctaattaatgttctataaaactttccttttagcttatgtggtatcctcttgtcatatagaacgttagagacttgatgccacttcatcccaccatgctttgattatatggctaacatcttcatcaatatcccatttttctgtagcattgatcctgaatactgaaagacatccttcttagacactgcttgac

SEQ ID NO: 50891 - DNA, 867 bp, Zea Mays
cacgcaatcacgtgggtcaggaaaaggacgagagcggaaaggaccgaacggctcgggttgatccatcggatccgaaggggcatggctctggtcagattggcgtttcccgtgttcttcttcctcgcagcggcggagttcgcggcggggacgcggtcgccgtcggctttcgtacaaaacgccatctactccaaccgcatcaccatcttctccaagacttactgcccctactccatgcgtgctaagcacatatttcgagaccttaaggaagatccatatgttgttgaactagatacccgagtggatgggcgtgacattcaaagtgttctcctggacctagttgggcgtcgtactgtgccacagatacagtaaatgcgctttcaaatggacagctccagaaacttctcgggaagagtcagtcacaatgatgggtcgctggacaagcttgcactgtcaagaacacgtgagtatatgtttgggaggggtgttcttttgtgtttagggctgaacagaatctggtgttgtgacaaccatctgtactgctggatttgtgatctgctcaattgcacccatccatgttttaccttgttcattatggaaattattagtataggtagctcaatgaactagctgcataggctatcctcagaaaaaaaattcctaaacttctgacgactttattggtatcgacatcctccgttacaaagtcattttagattttctaggtacataatttttgctatatatatggacctcagacatagcacatttaggtccttttaacttgcgtcgcttgtttcagtcctctctcaattgtatttgtatcacgtcactctaaaatcatactacctccgtttttgaatatttgtc

SEQ ID NO: 50892 - DNA, 749 bp, Zea Mays
caaacaccaaccgcttcggcataccgctgcctctgcttgctcactttcgccctcgaaatctggcggaagctactccatgcgtgctaagcacatatttcgagaccttaaggaagatccatatgttgttgaactagatacccgagtggatgggcgtgacattcaaagtgttctcctggacctagttgggcgtcgtactgtgccacaggtgtttgtcaatggacagcatattggtggctcagacgatacagtaaatgcgctttcaaatggacagctccagaaacttctcgggaagagtcagtcacaatgatgggtcgctggacaagcttgcactgtcaagaacacgtgagtatatgtttgggaggggtgttcttttgtgtttagggctgaacagaatctggtgttgtgacaaccatctgtactgctggatttgtgatctgctcaattgcacccatccatgttttaccttgttcattatggaaattattagtataggtagctcaatgaactagctgcataggctatcctcagaaaaaaaattcctaaacttctgacgactttattggtatcgacatcctccgttacaaagtcattttagattttctaggtacataatttttgctatatatatggacctcagacatagcacatttaggtccttttaacttgcgtcgcttgtttcagtcctctctcaattgtatttgtatcacgtcactctaaaatcatactacctccgtttttgaatatttgtc

SEQ ID NO: 50893 - DNA, 700 bp, Zea Mays
cccgcctccgcttcagaaagctactccatgcgtgctaagcacatatttcgagaccttaaggaagatccatatgttgttgaactagatacccgagtggatgggcgtgacattcaaagtgttctcctggacctagttgggcgtcgtactgtgccacaggtgtttgtcaatggacagcatattggtggctcagacgatacagtaaatgcgctttcaaatggacagctccagaaacttctcgggaagagtcagtcacaatgatgggtcgctggacaagcttgcactgtcaagaacacgtgagtatatgtttgggaggggtgttcttttgtgtttagggctgaacagaatctggtgttgtgacaaccatctgtactgctggatttgtgatctgctcaattgcacccatccatgttttaccttgttcattatggaaattattagtataggtagctcaatgaactagctgcataggctatcctcagaaaaaaaattcctaaacttctgacgactttattggtatcgacatcctccgttacaaagtcattttagattttctaggtacataatttttgctatatatatggacctcagacatagcacatttaggtccttttaacttgcgtcgcttgtttcagtcctctctcaattgtatttgtatcacgtcactctaaaatcatactacctccgtttttgaatatttgtc

SEQ ID NO: 50894 - DNA, 858 bp, Zea Mays
caaccgccgggcccgcgggggcgacgacgacgtcgacgggccgcggcagggcacgcggccgcgcgcgagtggcgcggaggccgcgtcaacgtcgagcgcgcggtcctcgtgggggggtcctgacctggggctggggtgcgccgcgccgcgccgctggtgcgcgcgtcgacggcggacaaagtgaccccctcgcggagcggcgcgtggacggagagcctttttgtcccgctcgcctttcgcccgctttccgcttctgcttttgggtaagtgcttcgttcccgcatcggcacttcgctgggtacgcagcacttggtgcggaggccggaggatcataatctgttcggtcattgggagaagtaaggaagtcgtagcacgtttcccgcgatgcaaatctgttgtagagcgtgtccgtttcttgcacggttgtgcacaccgtccattgccttggagatctagtgcgcctgcatctgataagatgcaggaaatgcactagtcgtcgacagacaccctggaagcctgaaattgtctcataaagaattaggctccgtttgattcattcgaatcgaattttattccaataattataatttgggcacatgtccattaaacaaatatatttttaggtggaatgtatttatatactattgtcgctactttcaatattgtcgctaatttggtattgaacttacatttaattccatctcctccaatattcatattaaaatggagcattagtatttgatcagattgcataaatagttgctcgagttgtgcattgaattgaaaagtcgtcaattcaaattttagaggcataaccaagacaatcgaactattctgctgagcgtttgagatgcatat

SEQ ID NO: 50895 - DNA, 3781 bp, Zea Mays
gccaaatatctcgaatgcccaccttctgacagacactcctcctctcattgacatcttctcactgacatctcagtggggcatgcatagtccgtccccagcaatcctttacccgggcgccgcggcgccgtgcaattatctcaaaaaccaaacggatgagctccacccgacggtcgcccaagctgaaatcagcaataagcagtcactgacgatgggcctaaggccttgtgtcccagcttgacggcgtgacaggcagcaaacggccgcccccttctccttccctccacccctcttcgtctcgtctcggcctctttccttcctctgttcctcatcttcgtctcggcctcacccccgacgaccccgcaccgatccctccacgcgctcgcgcgcagcacgggcggagttgggcgaactccgtgctcgttcaacccgtactctagtacctccagggttcgggtcgggtctgccttcctcttcgtatggcttccgccgccgcggaaaccctcgcctcgttcccaatcgcatccccgtcccgctcgctcctacgccccttccccaggcgaccagccggcgctaggacaggcgcaccgtcgatccggatatccgccgtgccgccgcggggcctcgggctcgcgctcgtacaccgccgctgcccgccagcggcgcgcgcgaatgttgagcgcgacggcgacggcgcctccgggaacggcgagccgtcgtcctcgtctggggatggcgaccgcgacgcggctgcggagtcggggggcgatagcaccagcacgagcaccacgagcacggccgcgacaccgccgccgccctcgtcgaagaggaacgaaaataagtggcggcggaggctgactaagggaggcggcgtggggcggtggctatgggagcccatagtccagggacgggagatgggcttcctcctgctccagctgggcttcgccatatttgcgctacgcatgcttcgcccagagatcgcgttgcccggttcagagccccgcccacagacgacgtacgtcagtgtaccatacagcgacttcctggccagcataaacaaggaccaggtgaagaaggttgaggtggacggggtgcatatcatgttccgactccgcccagaggtggagtcccaggtccgtgttgagcagacaccgacacagcgcggagcagattatgtcattgataatgctggagtttcaaggagaattgtgttcacgacgactcgtccagtggacataaagacaccatacgagaagatggtggaaaacatggttgaatttgggtcaccggacaagaggtctggcggcatgctcaattctgccctggtaggtcttatctatgttgtattgattgcggtagttttgcagcgcctgccaataagcttttctcagcaatcacccggtcagttgaggaataggaagaattctaattccggcggagcaaaagtttctgaaagttcggatatagttacatttgctgatgtggctggagtagatgaggcaaaagaagagcttgaagaaattgtggagttcttaaggaacccagaaagatatattcgtctcggtgctcgccctcctcgtggtgtcttattggtgggtcttccagggactggaaagacacttcttgcaaaagccgtagcaggagaagcagaagtcccattcataagttgctctgctagtgaatttgttgagctatatgtaggcatgggagcagctcgagtacgtgacctatttgctaaggccaaaaaggaatcgccatcgattatttttatcgatgagattgatgccgttgcaaaaagccgtgatagtcgatatcgcattgtcagtaatgatgaacgtgagcagacattaaaccaattgctcacggtaggacagtgccctttcttatttcttgagcattcaccaaattagcttcatcgcaagttgggacccaattaaagcttatacttgtatttttattggctgataattgattttttgctcttggtaaaacttaaaaggggtttgagccacactctacttcactactaaggatactgctttatcatgcaatatttgtttttgagaaagggcggaaatggtattattattggtttagctgccttgattttgggttctccccaggaaatggatggctttgataccaactcggctgtcattgtattgggggcaacaaatcgagctgatgttttggatcctgcccttaggcgccctgggagatttgaccgtgtggttatggttgaagctcctgataggtttggaagagaatcaattctaaaagttcatgtgaaaagaagagagcttccactgagtaaagatgtagatctagccaatattgctgcaatgacaactggttttactggagcagaccttgcaaacttggtaaacgaagctgctctgttggctgggcgattaaataaagaaatagtggaaaaggttgacttcatccgtgcggttgagcgatctatagcagggatagagaaaaagcatgcaaaattgaagggtaatgaaaaagctgttgttgcgcggcatgaagtaggtcatgcactcgtgggaactgctgtagcaaacctccttcctggacagccacgtgtggagaaattgagtatattgccaagatctggaggtgcattaggcttcacgtacacccctcccgtcacagaggatagatatttactctttgttgatgaactacgtggccgtttagtaacactactgggtgggagggcagcagaggaagttgttttagcaggacgggtttcgactggtgcacttgatgacataagacgtgctactgacatggcctacaaagctgtagcagaatacggtcttagtcagcgcatcgggccaatatcacttgctacactgtcaaatggtggtttagatgactctggtggctctccatggggaaaggaccagggacatctagttgatctcgttcagagggaagtaaaagcgcttttacagtcgtcactggaagtagctctttcagttattcgtgctaatcctgcagttttggaaggcctcggagcatacttagaagagaaagaaaaggttgaaggcgaggagcttcaagagtggctaaaatcggttgttgcatcaaaagagttgacctcttttatcagaggacagcaagagcaagttcttcagctggaagcaggctcctagcgtcaggagtatgcaccgggctcttaaaattaattacttaacaaaagtgactcagcaattagaacatacaatatgagacacaaggtatgcaatggaaaccttcatatactgggaagagacctgtggccatgtgtggtgggttgtatgaacccccacccattcatgctaagacaaaccgggtctgctaagacaaactggtcggatgcccaccctttgttcggtgaatcatgagatcgagccctatacgagaattcaggaaaaaaaaagaaaatctacatgcccgagtgaccatgtaaatatctatcattgcagttcctgaacccttgactacaaaaaaagaaatccagagatgattcatattgagctgtaacattgtacgatcaacctcaggaatattgtaagtgattcagcttcacatgttgttccatagattaggtcggtgttacacatgtaaaagattcttttttggcaatatattcttgtactcaccctattggaagttgttttcctctatataccatcctagaaatgatcaataggataatgcttatacggactatggttcctgtattgagaattgttcttcagaaatcagaatagtgatcgctttttgaaag

SEQ ID NO: 50896 - DNA, 3485 bp, Zea Mays
gacatctcagtggggcatgcatagtccgtccccagcaatcctttacccgggcgccgcggcgccgtgcaattatctcaaaaaccaaacggatgagctccacccgacggtcgcccaagctgaaatcagcaataagcagtcactgacgatgggcctaaggccttgtgtcccagcttgacggcgtgacaggcagcaaacggccgcccccttctccttccctccacccctcttcgtctcgtctcggcctctttccttcctctgttcctcatcttcgtctcggcctcacccccgacgaccccgcaccgatccctccacgcgctcgcgcgcagcacgggcggagttgggcgaactccgtgctcgttcaacccgtactctagtacctccagggttcgggtcgggtctgccttcctcttcgtatggcttccgccgccgcggaaaccctcgcctcgttcccaatcgcatccccgtcccgctcgctcctacgccccttccccaggcgaccagccggcgctaggacaggcgcaccgtcgatccggatatccgccgtgccgccgcggggcctcgggctcgcgctcgtacaccgccgctgcccgccagcggcgcgcgcgaatgttgagcgcgacggcgacggcgcctccgggaacggcgagccgtcgtcctcgtctggggatggcgaccgcgacgcggctgcggagtcggggggcgatagcaccagcacgagcaccacgagcacggccgcgacaccgccgccgccctcgtcgaagaggaacgaaaataagtggcggcggaggctgactaagggaggcggcgtggggcggtggctatgggagcccatagtccagggacgggagatgggcttcctcctgctccagctgggcttcgccatatttgcgctacgcatgcttcgcccagagatcgcgttgcccggttcagagccccgcccacagacgacgtacgtcagtgtaccatacagcgacttcctggccagcataaacaaggaccaggtgaagaaggttgaggtggacggggtgcatatcatgttccgactccgcccagaggtggagtcccaggtccgtgttgagcagacaccgacacagcgcggagcagattatgtcattgataatgctggagtttcaaggagaattgtgttcacgacgactcgtccagtggacataaagacaccatacgagaagatggtggaaaacatggttgaatttgggtcaccggacaagaggtctggcggcatgctcaattctgccctggtaggtcttatctatgttgtattgattgcggtagttttgcagcgcctgccaataagcttttctcagcaatcacccggtcagttgaggaataggaagaattctaattccggcggagcaaaagtttctgaaagttcggatatagttacatttgctgatgtggctggagtagatgaggcaaaagaagagcttgaagaaattgtggagttcttaaggaacccagaaagatatatcccattcataagttgctctgctagtgaatttgttgagctatatgtaggcatgggagcagctcgagtacgtgacctatttgctaaggccaaaaaggaatcgccatcgattatttttatcgatgagattgatgccgttgcaaaaagccgtgatagtcgatatcgcattgtcagtaatgatgaacgtgagcagacattaaaccaattgctcacggggtttgagccacactctacttcactactaaggatactgctttatcatgcaatatttgtttttgagaaagggcggaaatggtattattattggtttagctgccttgattttgggttctccccaggaaatggatggctttgataccaactcggctgtcattgtattgggggcaacaaatcgagctgatgttttggatcctgcccttaggcgccctgggagatttgaccgtgtggttatggttgaagctcctgataggtttggaagagaatcaattctaaaagttcatgtgaaaagaagagagcttccactgagtaaagatgtagatctagccaatattgctgcaatgacaactggttttactggagcagaccttgcaaacttggtaaacgaagctgctctgttggctgggcgattaaataaagaaatagtggaaaaggttgacttcatccgtgcggttgagcgatctatagcagggatagagaaaaagcatgcaaaattgaagggtaatgaaaaagctgttgttgcgcggcatgaagtaggtcatgcactcgtgggaactgctgtagcaaacctccttcctggacagccacgtgtggagaaattgagtatattgccaagatctggaggtgcattaggcttcacgtacacccctcccgtcacagaggatagatatttactctttgttgatgaactacgtggccgtttagtaacactactgggtgggagggcagcagaggaagttgttttagcaggacgggtttcgactggtgcacttgatgacataagacgtgctactgacatggcctacaaagctgtagcagaatacggtcttagtcagcgcatcgggccaatatcacttgctacactgtcaaatggtggtttagatgactctggtggctctccatggggaaaggaccagggacatctagttgatctcgttcagagggaagtaaaagcgcttttacagtcgtcactggaagtagctctttcagttattcgtgctaatcctgcagttttggaaggcctcggagcatacttagaagagaaagaaaaggttgaaggcgaggagcttcaagagtggctaaaatcggttgttgcatcaaaagagttgacctcttttatcagaggacagcaagagcaagttcttcagctggaagcaggctcctagcgtcaggagtatgcaccgggctcttaaaattaattacttaacaaaagtgactcagcaattagaacatacaatatgagacacaaggtatgcaatggaaaccttcatatactgggaagagacctgtggccatgtgtggtgggttgtatgaacccccacccattcatgctaagacaaaccgggtctgctaagacaaactggtcggatgcccaccctttgttcggtgaatcatgagatcgagccctatacgagaattcaggaaaaaaaaagaaaatctacatgcccgagtgaccatgtaaatatctatcattgcagttcctgaacccttgactacaaaaaaagaaatccagagatgattcatattgagctgtaacattgtacgatcaacctcaggaatattgtaagtgattcagcttcacatgttgttccatagattaggtcggtgttacacatgtaaaagattcttttttggcaatatattcttgtactcaccctattggaagttgttttcctctatataccatcctagaaatgatcaataggataatgcttatacggactatggttcctgtattgagaattgttcttcagaaatcagaatagtgatcgctttttgaaag

SEQ ID NO: 50897 - DNA, 3615 bp, Zea Mays
cgcggcgccgtgcaattatctcaaaaaccaaacggatgagctccacccgacggtcgcccaagctgaaatcagcaataagcagtcactgacgatgggcctaaggccttgtgtcccagcttgacggcgtgacaggcagcaaacggccgcccccttctccttccctccacccctcttcgtctcgtctcggcctctttccttcctctgttcctcatcttcgtctcggcctcacccccgacgaccccgcaccgatccctccacgcgctcgcgcgcagcacgggcggagttgggcgaactccgtgctcgttcaacccgtactctagtacctccagggttcgggtcgggtctgccttcctcttcgtatggcttccgccgccgcggaaaccctcgcctcgttcccaatcgcatccccgtcccgctcgctcctacgccccttccccaggcgaccagccggcgctaggacaggcgcaccgtcgatccggatatccgccgtgccgccgcggggcctcgggctcgcgctcgtacaccgccgctgcccgccagcggcgcgcgcgaatgttgagcgcgacggcgacggcgcctccgggaacggcgagccgtcgtcctcgtctggggatggcgaccgcgacgcggctgcggagtcggggggcgatagcaccagcacgagcaccacgagcacggccgcgacaccgccgccgccctcgtcgaagaggaacgaaaataagtggcggcggaggctgactaagggaggcggcgtggggcggtggctatgggagcccatagtccagggacgggagatgggcttcctcctgctccagctgggcttcgccatatttgcgctacgcatgcttcgcccagagatcgcgttgcccggttcagagccccgcccacagacgacgtacgtcagtgtaccatacagcgacttcctggccagcataaacaaggaccaggtgaagaaggttgaggtggacggggtgcatatcatgttccgactccgcccagaggtggagtcccaggtccgtgttgagcagacaccgacacagcgcggagcagattatgtcattgataatgctggagtttcaaggagaattgtgttcacgacgactcgtccagtggacataaagacaccatacgagaagatggtggaaaacatggttgaatttgggtcaccggacaagaggtctggcggcatgctcaattctgccctggtaggtcttatctatgttgtattgattgcggtagttttgcagcgcctgccaataagcttttctcagcaatcacccggtcagttgaggaataggaagaattctaattccggcggagcaaaagtttctgaaagttcggatatagttacatttgctgatgtggctggagtagatgaggcaaaagaagagcttgaagaaattgtggtcgtggtgtcttattggtgggtcttccagggactggaaagacacttcttgcaaaagccgtagcaggagaagcagaagtcccattcataagttgctctgctagtgaatttgttgagctatatgtaggcatgggagcagctcgagtacgtgacctatttgctaaggccaaaaaggaatcgccatcgattatttttatcgatgagattgatgccgttgcaaaaagccgtgatagtcgatatcgcattgtcagtaatgatgaacgtgagcagacattaaaccaattgctcacggtaggacagtgccctttcttatttcttgagcattcaccaaattagcttcatcgcaagttgggacccaattaaagcttatacttgtatttttattggctgataattgattttttgctcttggtaaaacttaaaaggggtttgagccacactctacttcactactaaggatactgctttatcatgcaatatttgtttttgagaaagggcggaaatggtattattattggtttagctgccttgattttgggttctccccaggaaatggatggctttgataccaactcggctgtcattgtattgggggcaacaaatcgagctgatgttttggatcctgcccttaggcgccctgggagatttgaccgtgtggttatggttgaagctcctgataggtttggaagagaatcaattctaaaagttcatgtgaaaagaagagagcttccactgagtaaagatgtagatctagccaatattgctgcaatgacaactggttttactggagcagaccttgcaaacttggtaaacgaagctgctctgttggctgggcgattaaataaagaaatagtggaaaaggttgacttcatccgtgcggttgagcgatctatagcagggatagagaaaaagcatgcaaaattgaagggtaatgaaaaagctgttgttgcgcggcatgaagtaggtcatgcactcgtgggaactgctgtagcaaacctccttcctggacagccacgtgtggagaaattgagtatattgccaagatctggaggtgcattaggcttcacgtacacccctcccgtcacagaggatagatatttactctttgttgatgaactacgtggccgtttagtaacactactgggtgggagggcagcagaggaagttgttttagcaggacgggtttcgactggtgcacttgatgacataagacgtgctactgacatggcctacaaagctgtagcagaatacggtcttagtcagcgcatcgggccaatatcacttgctacactgtcaaatggtggtttagatgactctggtggctctccatggggaaaggaccagggacatctagttgatctcgttcagagggaagtaaaagcgcttttacagtcgtcactggaagtagctctttcagttattcgtgctaatcctgcagttttggaaggcctcggagcatacttagaagagaaagaaaaggttgaaggcgaggagcttcaagagtggctaaaatcggttgttgcatcaaaagagttgacctcttttatcagaggacagcaagagcaagttcttcagctggaagcaggctcctagcgtcaggagtatgcaccgggctcttaaaattaattacttaacaaaagtgactcagcaattagaacatacaatatgagacacaaggtatgcaatggaaaccttcatatactgggaagagacctgtggccatgtgtggtgggttgtatgaacccccacccattcatgctaagacaaaccgggtctgctaagacaaactggtcggatgcccaccctttgttcggtgaatcatgagatcgagccctatacgagaattcaggaaaaaaaaagaaaatctacatgcccgagtgaccatgtaaatatctatcattgcagttcctgaacccttgactacaaaaaaagaaatccagagatgattcatattgagctgtaacattgtacgatcaacctcaggaatattgtaagtgattcagcttcacatgttgttccatagattaggtcggtgttacacatgtaaaagattcttttttggcaatatattcttgtactcaccctattggaagttgttttcctctatataccatcctagaaatgatcaataggataatgcttatacggactatggttcctgtattgagaattgttcttcagaaatcagaatagtgatcgctttttgaaag

SEQ ID NO: 50898 - DNA, 3503 bp, Zea Mays
cccagcttgacggcgtgacaggcagcaaacggccgcccccttctccttccctccacccctcttcgtctcgtctcggcctctttccttcctctgttcctcatcttcgtctcggcctcacccccgacgaccccgcaccgatccctccacgcgctcgcgcgcagcacgggcggagttgggcgaactccgtgctcgttcaacccgtactctagtacctccagggttcgggtcgggtctgccttcctcttcgtatggcttccgccgccgcggaaaccctcgcctcgttcccaatcgcatccccgtcccgctcgctcctacgccccttccccaggcgaccagccggcgctaggacaggcgcaccgtcgatccggatatccgccgtgccgccgcggggcctcgggctcgcgctcgtacaccgccgctgcccgccagcggcgcgcgcgaatgttgagcgcgacggcgacggcgcctccgggaacggcgagccgtcgtcctcgtctggggatggcgaccgcgacgcggctgcggagtcggggggcgatagcaccagcacgagcaccacgagcacggccgcgacaccgccgccgccctcgtcgaagaggaacgaaaataagtggcggcggaggctgactaagggaggcggcgtggggcggtggctatgggagcccatagtccagggacgggagatgggcttcctcctgctccagctgggcttcgccatatttgcgctacgcatgcttcgcccagagatcgcgttgcccggttcagagccccgcccacagacgacgtacgtcagtgtaccatacagcgacttcctggccagcataaacaaggaccaggtgaagaaggttgaggtggacggggtgcatatcatgttccgactccgcccagaggtggagtcccaggtccgtgttgagcagacaccgacacagcgcggagcagattatgtcattgataatgctggagtttcaaggagaattgtgttcacgacgactcgtccagtggacataaagacaccatacgagaagatggtggaaaacatggttgaatttgggtcaccggacaagaggtctggcggcatgctcaattctgccctggtaggtcttatctatgttgtattgattgcggtagttttgcagcgcctgccaataagcttttctcagcaatcacccggtcagttgaggaataggaagaattctaattccggcggagcaaaagtttctgaaagttcggatatagttacatttgctgatgtggctggagtagatgaggcaaaagaagagcttgaagaaattgtggcgtggtgtcttattggtgggtcttccagggactggaaagacacttcttgcaaaagccgtagcaggagaagcagaagtcccattcataagttgctctgctagtgaatttgttgagctatatgtaggcatgggagcagctcgagtacgtgacctatttgctaaggccaaaaaggaatcgccatcgattatttttatcgatgagattgatgccgttgcaaaaagccgtgatagtcgatatcgcattgtcagtaatgatgaacgtgagcagacattaaaccaattgctcacggtaggacagtgccctttcttatttcttgagcattcaccaaattagcttcatcgcaagttgggacccaattaaagcttatacttgtatttttattggctgataattgattttttgctcttggtaaaacttaaaaggggtttgagccacactctacttcactactaaggatactgctttatcatgcaatatttgtttttgagaaagggcggaaatggtattattattggtttagctgccttgattttgggttctccccaggaaatggatggctttgataccaactcggctgtcattgtattgggggcaacaaatcgagctgatgttttggatcctgcccttaggcgccctgggagatttgaccgtgtggttatggttgaagctcctgataggtttggaagagaatcaattctaaaagttcatgtgaaaagaagagagcttccactgagtaaagatgtagatctagccaatattgctgcaatgacaactggttttactggagcagaccttgcaaacttggtaaacgaagctgctctgttggctgggcgattaaataaagaaatagtggaaaaggttgacttcatccgtgcggttgagcgatctatagcagggatagagaaaaagcatgcaaaattgaagggtaatgaaaaagctgttgttgcgcggcatgaagtaggtcatgcactcgtgggaactgctgtagcaaacctccttcctggacagccacgtgtggagaaattgagtatattgccaagatctggaggtgcattaggcttcacgtacacccctcccgtcacagaggatagatatttactctttgttgatgaactacgtggccgtttagtaacactactgggtgggagggcagcagaggaagttgttttagcaggacgggtttcgactggtgcacttgatgacataagacgtgctactgacatggcctacaaagctgtagcagaatacggtcttagtcagcgcatcgggccaatatcacttgctacactgtcaaatggtggtttagatgactctggtggctctccatggggaaaggaccagggacatctagttgatctcgttcagagggaagtaaaagcgcttttacagtcgtcactggaagtagctctttcagttattcgtgctaatcctgcagttttggaaggcctcggagcatacttagaagagaaagaaaaggttgaaggcgaggagcttcaagagtggctaaaatcggttgttgcatcaaaagagttgacctcttttatcagaggacagcaagagcaagttcttcagctggaagcaggctcctagcgtcaggagtatgcaccgggctcttaaaattaattacttaacaaaagtgactcagcaattagaacatacaatatgagacacaaggtatgcaatggaaaccttcatatactgggaagagacctgtggccatgtgtggtgggttgtatgaacccccacccattcatgctaagacaaaccgggtctgctaagacaaactggtcggatgcccaccctttgttcggtgaatcatgagatcgagccctatacgagaattcaggaaaaaaaaagaaaatctacatgcccgagtgaccatgtaaatatctatcattgcagttcctgaacccttgactacaaaaaaagaaatccagagatgattcatattgagctgtaacattgtacgatcaacctcaggaatattgtaagtgattcagcttcacatgttgttccatagattaggtcggtgttacacatgtaaaagattcttttttggcaatatattcttgtactcaccctattggaagttgttttcctctatataccatcctagaaatgatcaataggataatgcttatacggactatggttcctgtattgagaattgttcttcagaaatcagaatagtgatcgctttttgaaag

SEQ ID NO: 50899 - DNA, 3190 bp, Zea Mays
ttgacggcgtgacaggcagcaaacggccgcccccttctccttccctccacccctcttcgtctcgtctcggcctctttccttcctctgttcctcatcttcgtctcggcctcacccccgacgaccccgcaccgatccctccacgcgctcgcgcgcagcacgggcggagttgggcgaactccgtgctcgttcaacccgtactctagtacctccagggttcgggtcgggtctgccttcctcttcgtatggcttccgccgccgcggaaaccctcgcctcgttcccaatcgcatccccgtcccgctcgctcctacgccccttccccaggcgaccagccggcgctaggacaggcgcaccgtcgatccggatatccgccgtgccgccgcggggcctcgggctcgcgctcgtacaccgccgctgcccgccagcggcgcgcgcgaatgttgagcgcgacggcgacggcgcctccgggaacggcgagccgtcgtcctcgtctggggatggcgaccgcgacgcggctgcggagtcggggggcgatagcaccagcacgagcaccacgagcacggccgcgacaccgccgccgccctcgtcgaagaggaacgaaaataagtggcggcggaggctgactaagggaggcggcgtggggcggtggctatgggagcccatagtccagggacgggagatgggcttcctcctgctccagctgggcttcgccatatttgcgctacgcatgcttcgcccagagatcgcgttgcccggttcagagccccgcccacagacgacgtacgtcagtgtaccatacagcgacttcctggccagcataaacaaggaccaggtgaagaaggttgaggtggacggggtgcatatcatgttccgactccgcccagaggtggagtcccaggtccgtgttgagcagacaccgacacagcgcggagcagattatgtcattgataatgctggagtttcaaggagaattgtgttcacgacgactcgtccagtggacataaagacaccatacgagaagatggtggaaaacatggttgaatttgggtcaccggacaagaggtctggcggcatgctcaattctgccctggtaggtcttatctatgttgtattgattgcggtagttttgcagcgcctgccaataagcttttctcagcaatcacccggtcagttgaggaataggaagaattctaattccggcggagcaaaagtttctgaaagttcggatatagttacatttgctgatgtggctggagtagatgaggcaaaagaagagcttgaagaaattgtggagttcttaaggaacccagaaagatatatcccattcataagttgctctgctagtgaatttgttgagctatatgtaggcatgggagcagctcgagtacgtgacctatttgctaaggccaaaaaggaatcgccatcgattatttttatcgatgagattgatgccgttgcaaaaagccgtgatagtcgatatcgcattgtcagtaatgatgaacgtgagcagacattaaaccaattgctcacggaaatggatggctttgataccaactcggctgtcattgtattgggggcaacaaatcgagctgatgttttggatcctgcccttaggcgccctgggagatttgaccgtgtggttatggttgaagctcctgataggtttggaagagaatcaattctaaaagttcatgtgaaaagaagagagcttccactgagtaaagatgtagatctagccaatattgctgcaatgacaactggttttactggagcagaccttgcaaacttggtaaacgaagctgctctgttggctgggcgattaaataaagaaatagtggaaaaggttgacttcatccgtgcggttgagcgatctatagcagggatagagaaaaagcatgcaaaattgaagggtaatgaaaaagctgttgttgcgcggcatgaagtaggtcatgcactcgtgggaactgctgtagcaaacctccttcctggacagccacgtgtggagaaattgagtatattgccaagatctggaggtgcattaggcttcacgtacacccctcccgtcacagaggatagatatttactctttgttgatgaactacgtggccgtttagtaacactactgggtgggagggcagcagaggaagttgttttagcaggacgggtttcgactggtgcacttgatgacataagacgtgctactgacatggcctacaaagctgtagcagaatacggtcttagtcagcgcatcgggccaatatcacttgctacactgtcaaatggtggtttagatgactctggtggctctccatggggaaaggaccagggacatctagttgatctcgttcagagggaagtaaaagcgcttttacagtcgtcactggaagtagctctttcagttattcgtgctaatcctgcagttttggaaggcctcggagcatacttagaagagaaagaaaaggttgaaggcgaggagcttcaagagtggctaaaatcggttgttgcatcaaaagagttgacctcttttatcagaggacagcaagagcaagttcttcagctggaagcaggctcctagcgtcaggagtatgcaccgggctcttaaaattaattacttaacaaaagtgactcagcaattagaacatacaatatgagacacaaggtatgcaatggaaaccttcatatactgggaagagacctgtggccatgtgtggtgggttgtatgaacccccacccattcatgctaagacaaaccgggtctgctaagacaaactggtcggatgcccaccctttgttcggtgaatcatgagatcgagccctatacgagaattcaggaaaaaaaaagaaaatctacatgcccgagtgaccatgtaaatatctatcattgcagttcctgaacccttgactacaaaaaaagaaatccagagatgattcatattgagctgtaacattgtacgatcaacctcaggaatattgtaagtgattcagcttcacatgttgttccatagattaggtcggtgttacacatgtaaaagattcttttttggcaatatattcttgtactcaccctattggaagttgttttcctctatataccatcctagaaatgatcaataggataatgcttatacggactatggttcctgtattgagaattgttcttcagaaatcagaatagtgatcgctttttgaaag

SEQ ID NO: 50900 - DNA, 3173 bp, Zea Mays
caggcagcaaacggccgcccccttctccttccctccacccctcttcgtctcgtctcggcctctttccttcctctgttcctcatcttcgtctcggcctcacccccgacgaccccgcaccgatccctccacgcgctcgcgcgcagcacgggcggagttgggcgaactccgtgctcgttcaacccgtactctagtacctccagggttcgggtcgggtctgccttcctcttcgtatggcttccgccgccgcggaaaccctcgcctcgttcccaatcgcatccccgtcccgctcgctcctacgccccttccccaggcgaccagccggcgctaggacaggcgcaccgtcgatccggatatccgccgtgccgccgcggggcctcgggctcgcgctcgtacaccgccgctgcccgccagcggcgcgcgcgaatgttgagcgcgacggcgacggcgcctccgggaacggcgagccgtcgtcctcgtctggggatggcgaccgcgacgcggctgcggagtcggggggcgatagcaccagcacgagcaccacgagcacggccgcgacaccgccgccgccctcgtcgaagaggaacgaaaataagtggcggcggaggctgactaagggaggcggcgtggggcggtggctatgggagcccatagtccagggacgggagatgggcttcctcctgctccagctgggcttcgccatatttgcgctacgcatgcttcgcccagagatcgcgttgcccggttcagagccccgcccacagacgacgtacgtcagtgtaccatacagcgacttcctggccagcataaacaaggaccaggtgaagaaggttgaggtggacggggtgcatatcatgttccgactccgcccagaggtggagtcccaggtccgtgttgagcagacaccgacacagcgcggagcagattatgtcattgataatgctggagtttcaaggagaattgtgttcacgacgactcgtccagtggacataaagacaccatacgagaagatggtggaaaacatggttgaatttgggtcaccggacaagaggtctggcggcatgctcaattctgccctggtaggtcttatctatgttgtattgattgcggtagttttgcagcgcctgccaataagcttttctcagcaatcacccggtcagttgaggaataggaagaattctaattccggcggagcaaaagtttctgaaagttcggatatagttacatttgctgatgtggctggagtagatgaggcaaaagaagagcttgaagaaattgtggagttcttaaggaacccagaaagatatatcccattcataagttgctctgctagtgaatttgttgagctatatgtaggcatgggagcagctcgagtacgtgacctatttgctaaggccaaaaaggaatcgccatcgattatttttatcgatgagattgatgccgttgcaaaaagccgtgatagtcgatatcgcattgtcagtaatgatgaacgtgagcagacattaaaccaattgctcacggaaatggatggctttgataccaactcggctgtcattgtattgggggcaacaaatcgagctgatgttttggatcctgcccttaggcgccctgggagatttgaccgtgtggttatggttgaagctcctgataggtttggaagagaatcaattctaaaagttcatgtgaaaagaagagagcttccactgagtaaagatgtagatctagccaatattgctgcaatgacaactggttttactggaccttgcaaacttggtaaacgaagctgctctgttggctgggcgattaaataaagaaatagtggaaaaggttgacttcatccgtgcggttgagcgatctatagcagggatagagaaaaagcatgcaaaattgaagggtaatgaaaaagctgttgttgcgcggcatgaagtaggtcatgcactcgtgggaactgctgtagcaaacctccttcctggacagccacgtgtggagaaattgagtatattgccaagatctggaggtgcattaggcttcacgtacacccctcccgtcacagaggatagatatttactctttgttgatgaactacgtggccgtttagtaacactactgggtgggagggcagcagaggaagttgttttagcaggacgggtttcgactggtgcacttgatgacataagacgtgctactgacatggcctacaaagctgtagcagaatacggtcttagtcagcgcatcgggccaatatcacttgctacactgtcaaatggtggtttagatgactctggtggctctccatggggaaaggaccagggacatctagttgatctcgttcagagggaagtaaaagcgcttttacagtcgtcactggaagtagctctttcagttattcgtgctaatcctgcagttttggaaggcctcggagcatacttagaagagaaagaaaaggttgaaggcgaggagcttcaagagtggctaaaatcggttgttgcatcaaaagagttgacctcttttatcagaggacagcaagagcaagttcttcagctggaagcaggctcctagcgtcaggagtatgcaccgggctcttaaaattaattacttaacaaaagtgactcagcaattagaacatacaatatgagacacaaggtatgcaatggaaaccttcatatactgggaagagacctgtggccatgtgtggtgggttgtatgaacccccacccattcatgctaagacaaaccgggtctgctaagacaaactggtcggatgcccaccctttgttcggtgaatcatgagatcgagccctatacgagaattcaggaaaaaaaaagaaaatctacatgcccgagtgaccatgtaaatatctatcattgcagttcctgaacccttgactacaaaaaaagaaatccagagatgattcatattgagctgtaacattgtacgatcaacctcaggaatattgtaagtgattcagcttcacatgttgttccatagattaggtcggtgttacacatgtaaaagattcttttttggcaatatattcttgtactcaccctattggaagttgttttcctctatataccatcctagaaatgatcaataggataatgcttatacggactatggttcctgtattgagaattgttcttcagaaatcagaatagtgatcgctttttgaaag

SEQ ID NO: 50901 - DNA, 3449 bp, Zea Mays
aggcagcaaacggccgcccccttctccttccctccacccctcttcgtctcgtctcggcctctttccttcctctgttcctcatcttcgtctcggcctcacccccgacgaccccgcaccgatccctccacgcgctcgcgcgcagcacgggcggagttgggcgaactccgtgctcgttcaacccgtactctagtacctccagggttcgggtcgggtctgccttcctcttcgtatggcttccgccgccgcggaaaccctcgcctcgttcccaatcgcatccccgtcccgctcgctcctacgccccttccccaggcgaccagccggcgctaggacaggcgcaccgtcgatccggatatccgccgtgccgccgcggggcctcgggctcgcgctcgtacaccgccgctgcccgccagcggcgcgcgcgaatgttgagcgcgacggcgacggcgcctccgggaacggcgagccgtcgtcctcgtctggggatggcgaccgcgacgcggctgcggagtcggggggcgatagcaccagcacgagcaccacgagcacggccgcgacaccgccgccgccctcgtcgaagaggaacgaaaataagtggcggcggaggctgactaagggaggcggcgtggggcggtggctatgggagcccatagtccagggacgggagatgggcttcctcctgctccagctgggcttcgccatatttgcgctacgcatgcttcgcccagagatcgcgttgcccggttcagagccccgcccacagacgacgtacgtcagtgtaccatacagcgacttcctggccagcataaacaaggaccaggtgaagaaggttgaggtggacggggtgcatatcatgttccgactccgcccagaggtggagtcccaggtccgtgttgagcagacaccgacacagcgcggagcagattatgtcattgataatgctggagtttcaaggagaattgtgttcacgacgactcgtccagtggacataaagacaccatacgagaagatggtggaaaacatggttgaatttgggtcaccggacaagaggtctggcggcatgctcaattctgccctggtaggtcttatctatgttgtattgattgcggtagttttgcagcgcctgccaataagcttttctcagcaatcacccggtcagttgaggaataggaagaattctaattccggcggagcaaaagtttctgaaagttcggatatagttacatttgctgatgtggctggagtagatgaggcaaaagaagagcttgaagaaattgtggtcgtggtgtcttattggtgggtcttccagggactggaaagacacttcttgcaaaagccgtagcaggagaagcagaagtcccattcataagttgctctgctagtgaatttgttgagctatatgtaggcatgggagcagctcgagtacgtgacctatttgctaaggccaaaaaggaatcgccatcgattatttttatcgatgagattgatgccgttgcaaaaagccgtgatagtcgatatcgcattgtcagtaatgatgaacgtgagcagacattaaaccaattgctcacggtaggacagtgccctttcttatttcttgagcattcaccaaattagcttcatcgcaagttgggacccaattaaagcttatacttgtatttttattggctgataattgattttttgctcttggtaaaacttaaaaggggtttgagccacactctacttcactactaaggatactgctttatcatgcaatatttgtttttgagaaagggcggaaatggtattattattggtttagctgccttgattttgggttctccccaggaaatggatggctttgataccaactcggctgtcattgtattgggggcaacaaatcgagctgatgttttggatcctgcccttaggcgccctgggagatttgaccgtgtggttatggttgaagctcctgataggtttggaagagaatcaattctaaaagttcatgtgaaaagaagagagcttccactgagtaaagatgtagatctagccaatattgctgcaatgacaactggttttactggagcagaccttgcaaacttggtaaacgaagctgctctgttggctgggcgattaaataaagaaatagtggaaaaggggatagagaaaaagcatgcaaaattgaagggtaatgaaaaagctgttgttgcgcggcatgaagtaggtcatgcactcgtgggaactgctgtagcaaacctccttcctggacagccacgtgtggagaaattgagtatattgccaagatctggaggtgcattaggcttcacgtacacccctcccgtcacagaggatagatatttactctttgttgatgaactacgtggccgtttagtaacactactgggtgggagggcagcagaggaagttgttttagcaggacgggtttcgactggtgcacttgatgacataagacgtgctactgacatggcctacaaagctgtagcagaatacggtcttagtcagcgcatcgggccaatatcacttgctacactgtcaaatggtggtttagatgactctggtggctctccatggggaaaggaccagggacatctagttgatctcgttcagagggaagtaaaagcgcttttacagtcgtcactggaagtagctctttcagttattcgtgctaatcctgcagttttggaaggcctcggagcatacttagaagagaaagaaaaggttgaaggcgaggagcttcaagagtggctaaaatcggttgttgcatcaaaagagttgacctcttttatcagaggacagcaagagcaagttcttcagctggaagcaggctcctagcgtcaggagtatgcaccgggctcttaaaattaattacttaacaaaagtgactcagcaattagaacatacaatatgagacacaaggtatgcaatggaaaccttcatatactgggaagagacctgtggccatgtgtggtgggttgtatgaacccccacccattcatgctaagacaaaccgggtctgctaagacaaactggtcggatgcccaccctttgttcggtgaatcatgagatcgagccctatacgagaattcaggaaaaaaaaagaaaatctacatgcccgagtgaccatgtaaatatctatcattgcagttcctgaacccttgactacaaaaaaagaaatccagagatgattcatattgagctgtaacattgtacgatcaacctcaggaatattgtaagtgattcagcttcacatgttgttccatagattaggtcggtgttacacatgtaaaagattcttttttggcaatatattcttgtactcaccctattggaagttgttttcctctatataccatcctagaaatgatcaataggataatgcttatacggactatggttcctgtattgagaattgttcttcagaaatcagaatagtgatcgctttttgaaag

SEQ ID NO: 50902 - DNA, 3471 bp, Zea Mays
aacggccgcccccttctccttccctccacccctcttcgtctcgtctcggcctctttccttcctctgttcctcatcttcgtctcggcctcacccccgacgaccccgcaccgatccctccacgcgctcgcgcgcagcacgggcggagttgggcgaactccgtgctcgttcaacccgtactctagtacctccagggttcgggtcgggtctgccttcctcttcgtatggcttccgccgccgcggaaaccctcgcctcgttcccaatcgcatccccgtcccgctcgctcctacgccccttccccaggcgaccagccggcgctaggacaggcgcaccgtcgatccggatatccgccgtgccgccgcggggcctcgggctcgcgctcgtacaccgccgctgcccgccagcggcgcgcgcgaatgttgagcgcgacggcgacggcgcctccgggaacggcgagccgtcgtcctcgtctggggatggcgaccgcgacgcggctgcggagtcggggggcgatagcaccagcacgagcaccacgagcacggccgcgacaccgccgccgccctcgtcgaagaggaacgaaaataagtggcggcggaggctgactaagggaggcggcgtggggcggtggctatgggagcccatagtccagggacgggagatgggcttcctcctgctccagctgggcttcgccatatttgcgctacgcatgcttcgcccagagatcgcgttgcccggttcagagccccgcccacagacgacgtacgtcagtgtaccatacagcgacttcctggccagcataaacaaggaccaggtgaagaaggttgaggtggacggggtgcatatcatgttccgactccgcccagaggtggagtcccaggtccgtgttgagcagacaccgacacagcgcggagcagattatgtcattgataatgctggagtttcaaggagaattgtgttcacgacgactcgtccagtggacataaagacaccatacgagaagatggtggaaaacatggttgaatttgggtcaccggacaagaggtctggcggcatgctcaattctgccctggtaggtcttatctatgttgtattgattgcggtagttttgcagcgcctgccaataagcttttctcagcaatcacccggtcagttgaggaataggaagaattctaattccggcggagcaaaagtttctgaaagttcggatatagttacatttgctgatgtggctggagtagatgaggcaaaagaagagcttgaagaaattgtggcgtggtgtcttattggtgggtcttccagggactggaaagacacttcttgcaaaagccgtagcaggagaagcagaagtcccattcataagttgctctgctagtgaatttgttgagctatatgtaggcatgggagcagctcgagtacgtgacctatttgctaaggccaaaaaggaatcgccatcgattatttttatcgatgagattgatgccgttgcaaaaagccgtgatagtcgatatcgcattgtcagtaatgatgaacgtgagcagacattaaaccaattgctcacggtaggacagtgccctttcttatttcttgagcattcaccaaattagcttcatcgcaagttgggacccaattaaagcttatacttgtatttttattggctgataattgattttttgctcttggtaaaacttaaaaggggtttgagccacactctacttcactactaaggatactgctttatcatgcaatatttgtttttgagaaagggcggaaatggtattattattggtttagctgccttgattttgggttctccccaggaaatggatggctttgataccaactcggctgtcattgtattgggggcaacaaatcgagctgatgttttggatcctgcccttaggcgccctgggagatttgaccgtgtggttatggttgaagctcctgataggtttggaagagaatcaattctaaaagttcatgtgaaaagaagagagcttccactgagtaaagatgtagatctagccaatattgctgcaatgacaactggttttactggaccttgcaaacttggtaaacgaagctgctctgttggctgggcgattaaataaagaaatagtggaaaaggttgacttcatccgtgcggttgagcgatctatagcagggatagagaaaaagcatgcaaaattgaagggtaatgaaaaagctgttgttgcgcggcatgaagtaggtcatgcactcgtgggaactgctgtagcaaacctccttcctggacagccacgtgtggagaaattgagtatattgccaagatctggaggtgcattaggcttcacgtacacccctcccgtcacagaggatagatatttactctttgttgatgaactacgtggccgtttagtaacactactgggtgggagggcagcagaggaagttgttttagcaggacgggtttcgactggtgcacttgatgacataagacgtgctactgacatggcctacaaagctgtagcagaatacggtcttagtcagcgcatcgggccaatatcacttgctacactgtcaaatggtggtttagatgactctggtggctctccatggggaaaggaccagggacatctagttgatctcgttcagagggaagtaaaagcgcttttacagtcgtcactggaagtagctctttcagttattcgtgctaatcctgcagttttggaaggcctcggagcatacttagaagagaaagaaaaggttgaaggcgaggagcttcaagagtggctaaaatcggttgttgcatcaaaagagttgacctcttttatcagaggacagcaagagcaagttcttcagctggaagcaggctcctagcgtcaggagtatgcaccgggctcttaaaattaattacttaacaaaagtgactcagcaattagaacatacaatatgagacacaaggtatgcaatggaaaccttcatatactgggaagagacctgtggccatgtgtggtgggttgtatgaacccccacccattcatgctaagacaaaccgggtctgctaagacaaactggtcggatgcccaccctttgttcggtgaatcatgagatcgagccctatacgagaattcaggaaaaaaaaagaaaatctacatgcccgagtgaccatgtaaatatctatcattgcagttcctgaacccttgactacaaaaaaagaaatccagagatgattcatattgagctgtaacattgtacgatcaacctcaggaatattgtaagtgattcagcttcacatgttgttccatagattaggtcggtgttacacatgtaaaagattcttttttggcaatatattcttgtactcaccctattggaagttgttttcctctatataccatcctagaaatgatcaataggataatgcttatacggactatggttcctgtattgagaattgttcttcagaaatcagaatagtgatcgctttttgaaag

SEQ ID NO: 50903 - DNA, 3214 bp, Zea Mays
ccgcccccttctccttccctccacccctcttcgtctcgtctcggcctctttccttcctctgttcctcatcttcgtctcggcctcacccccgacgaccccgcaccgatccctccacgcgctcgcgcgcagcacgggcggagttgggcgaactccgtgctcgttcaacccgtactctagtacctccagggttcgggtcgggtctgccttcctcttcgtatggcttccgccgccgcggaaaccctcgcctcgttcccaatcgcatccccgtcccgctcgctcctacgccccttccccaggcgaccagccggcgctaggacaggcgcaccgtcgatccggatatccgccgtgccgccgcggggcctcgggctcgcgctcgtacaccgccgctgcccgccagcggcgcgcgcgaatgttgagcgcgacggcgacggcgcctccgggaacggcgagccgtcgtcctcgtctggggatggcgaccgcgacgcggctgcggagtcggggggcgatagcaccagcacgagcaccacgagcacggccgcgacaccgccgccgccctcgtcgaagaggaacgaaaataagtggcggcggaggctgactaagggaggcggcgtggggcggtggctatgggagcccatagtccagggacgggagatgggcttcctcctgctccagctgggcttcgccatatttgcgctacgcatgcttcgcccagagatcgcgttgcccggttcagagccccgcccacagacgacgtacgtcagtgtaccatacagcgacttcctggccagcataaacaaggaccaggtgaagaaggttgaggtggacggggtgcatatcatgttccgactccgcccagaggtggagtcccaggtccgtgttgagcagacaccgacacagcgcggagcagattatgtcattgataatgctggagtttcaaggagaattgtgttcacgacgactcgtccagtggacataaagacaccatacgagaagatggtggaaaacatggttgaatttgggtcaccggacaagaggtctggcggcatgctcaattctgccctggtaggtcttatctatgttgtattgattgcggtagttttgcagcgcctgccaataagcttttctcagcaatcacccggtcagttgaggaataggaagaattctaattccggcggagcaaaagtttctgaaagttcggatatagttacatttgctgatgtggctggagtagatgaggcaaaagaagagcttgaagaaattgtggtcgtggtgtcttattggtgggtcttccagggactggaaagacacttcttgcaaaagccgtagcaggagaagcagaagtcccattcataagttgctctgctagtgaatttgttgagctatatgtaggcatgggagcagctcgagtacgtgacctatttgctaaggccaaaaaggaatcgccatcgattatttttatcgatgagattgatgccgttgcaaaaagccgtgatagtcgatatcgcattgtcagtaatgatgaacgtgagcagacattaaaccaattgctcacggaaatggatggctttgataccaactcggctgtcattgtattgggggcaacaaatcgagctgatgttttggatcctgcccttaggcgccctgggagatttgaccgtgtggttatggttgaagctcctgataggtttggaagagaatcaattctaaaagttcatgtgaaaagaagagagcttccactgagtaaagatgtagatctagccaatattgctgcaatgacaactggttttactggagcagaccttgcaaacttggtaaacgaagctgctctgttggctgggcgattaaataaagaaatagtggaaaaggttgacttcatccgtgcggttgagcgatctatagcagggatagagaaaaagcatgcaaaattgaagggtaatgaaaaagctgttgttgcgcggcatgaagtaggtcatgcactcgtgggaactgctgtagcaaacctccttcctggacagccacgtgtggagaaattgagtatattgccaagatctggaggtgcattaggcttcacgtacacccctcccgtcacagaggatagatatttactctttgttgatgaactacgtggccgtttagtaacactactgggtgggagggcagcagaggaagttgttttagcaggacgggtttcgactggtgcacttgatgacataagacgtgctactgacatggcctacaaagctgtagcagaatacggtcttagtcagcgcatcgggccaatatcacttgctacactgtcaaatggtggtttagatgactctggtggctctccatggggaaaggaccagggacatctagttgatctcgttcagagggaagtaaaagcgcttttacagtcgtcactggaagtagctctttcagttattcgtgctaatcctgcagttttggaaggcctcggagcatacttagaagagaaagaaaaggttgaaggcgaggagcttcaagagtggctaaaatcggttgttgcatcaaaagagttgacctcttttatcagaggacagcaagagcaagttcttcagctggaagcaggctcctagcgtcaggagtatgcaccgggctcttaaaattaattacttaacaaaagtgactcagcaattagaacatacaatatgagacacaaggtatgcaatggaaaccttcatatactgggaagagacctgtggccatgtgtggtgggttgtatgaacccccacccattcatgctaagacaaaccgggtctgctaagacaaactggtcggatgcccaccctttgttcggtgaatcatgagatcgagccctatacgagaattcaggaaaaaaaaagaaaatctacatgcccgagtgaccatgtaaatatctatcattgcagttcctgaacccttgactacaaaaaaagaaatccagagatgattcatattgagctgtaacattgtacgatcaacctcaggaatattgtaagtgattcagcttcacatgttgttccatagattaggtcggtgttacacatgtaaaagattcttttttggcaatatattcttgtactcaccctattggaagttgttttcctctatataccatcctagaaatgatcaataggataatgcttatacggactatggttcctgtattgagaattgttcttcagaaatcagaatagtgatcgctttttgaaag

SEQ ID NO: 50904 - DNA, 3179 bp, Zea Mays
ctcgtctcggcctctttccttcctctgttcctcatcttcgtctcggcctcacccccgacgaccccgcaccgatccctccacgcgctcgcgcgcagcacgggcggagttgggcgaactccgtgctcgttcaacccgtactctagtacctccagggttcgggtcgggtctgccttcctcttcgtatggcttccgccgccgcggaaaccctcgcctcgttcccaatcgcatccccgtcccgctcgctcctacgccccttccccaggcgaccagccggcgctaggacaggcgcaccgtcgatccggatatccgccgtgccgccgcggggcctcgggctcgcgctcgtacaccgccgctgcccgccagcggcgcgcgcgaatgttgagcgcgacggcgacggcgcctccgggaacggcgagccgtcgtcctcgtctggggatggcgaccgcgacgcggctgcggagtcggggggcgatagcaccagcacgagcaccacgagcacggccgcgacaccgccgccgccctcgtcgaagaggaacgaaaataagtggcggcggaggctgactaagggaggcggcgtggggcggtggctatgggagcccatagtccagggacgggagatgggcttcctcctgctccagctgggcttcgccatatttgcgctacgcatgcttcgcccagagatcgcgttgcccggttcagagccccgcccacagacgacgtacgtcagtgtaccatacagcgacttcctggccagcataaacaaggaccaggtgaagaaggttgaggtggacggggtgcatatcatgttccgactccgcccagaggtggagtcccaggtccgtgttgagcagacaccgacacagcgcggagcagattatgtcattgataatgctggagtttcaaggagaattgtgttcacgacgactcgtccagtggacataaagacaccatacgagaagatggtggaaaacatggttgaatttgggtcaccggacaagaggtctggcggcatgctcaattctgccctggtaggtcttatctatgttgtattgattgcggtagttttgcagcgcctgccaataagcttttctcagcaatcacccggtcagttgaggaataggaagaattctaattccggcggagcaaaagtttctgaaagttcggatatagttacatttgctgatgtggctggagtagatgaggcaaaagaagagcttgaagaaattgtggcgtggtgtcttattggtgggtcttccagggactggaaagacacttcttgcaaaagccgtagcaggagaagcagaagtcccattcataagttgctctgctagtgaatttgttgagctatatgtaggcatgggagcagctcgagtacgtgacctatttgctaaggccaaaaaggaatcgccatcgattatttttatcgatgagattgatgccgttgcaaaaagccgtgatagtcgatatcgcattgtcagtaatgatgaacgtgagcagacattaaaccaattgctcacggaaatggatggctttgataccaactcggctgtcattgtattgggggcaacaaatcgagctgatgttttggatcctgcccttaggcgccctgggagatttgaccgtgtggttatggttgaagctcctgataggtttggaagagaatcaattctaaaagttcatgtgaaaagaagagagcttccactgagtaaagatgtagatctagccaatattgctgcaatgacaactggttttactggagcagaccttgcaaacttggtaaacgaagctgctctgttggctgggcgattaaataaagaaatagtggaaaaggttgacttcatccgtgcggttgagcgatctatagcagggatagagaaaaagcatgcaaaattgaagggtaatgaaaaagctgttgttgcgcggcatgaagtaggtcatgcactcgtgggaactgctgtagcaaacctccttcctggacagccacgtgtggagaaattgagtatattgccaagatctggaggtgcattaggcttcacgtacacccctcccgtcacagaggatagatatttactctttgttgatgaactacgtggccgtttagtaacactactgggtgggagggcagcagaggaagttgttttagcaggacgggtttcgactggtgcacttgatgacataagacgtgctactgacatggcctacaaagctgtagcagaatacggtcttagtcagcgcatcgggccaatatcacttgctacactgtcaaatggtggtttagatgactctggtggctctccatggggaaaggaccagggacatctagttgatctcgttcagagggaagtaaaagcgcttttacagtcgtcactggaagtagctctttcagttattcgtgctaatcctgcagttttggaaggcctcggagcatacttagaagagaaagaaaaggttgaaggcgaggagcttcaagagtggctaaaatcggttgttgcatcaaaagagttgacctcttttatcagaggacagcaagagcaagttcttcagctggaagcaggctcctagcgtcaggagtatgcaccgggctcttaaaattaattacttaacaaaagtgactcagcaattagaacatacaatatgagacacaaggtatgcaatggaaaccttcatatactgggaagagacctgtggccatgtgtggtgggttgtatgaacccccacccattcatgctaagacaaaccgggtctgctaagacaaactggtcggatgcccaccctttgttcggtgaatcatgagatcgagccctatacgagaattcaggaaaaaaaaagaaaatctacatgcccgagtgaccatgtaaatatctatcattgcagttcctgaacccttgactacaaaaaaagaaatccagagatgattcatattgagctgtaacattgtacgatcaacctcaggaatattgtaagtgattcagcttcacatgttgttccatagattaggtcggtgttacacatgtaaaagattcttttttggcaatatattcttgtactcaccctattggaagttgttttcctctatataccatcctagaaatgatcaataggataatgcttatacggactatggttcctgtattgagaattgttcttcagaaatcagaatagtgatcgctttttgaaag

SEQ ID NO: 50905 - DNA, 3117 bp, Zea Mays
ctcggcctctttccttcctctgttcctcatcttcgtctcggcctcacccccgacgaccccgcaccgatccctccacgcgctcgcgcgcagcacgggcggagttgggcgaactccgtgctcgttcaacccgtactctagtacctccagggttcgggtcgggtctgccttcctcttcgtatggcttccgccgccgcggaaaccctcgcctcgttcccaatcgcatccccgtcccgctcgctcctacgccccttccccaggcgaccagccggcgctaggacaggcgcaccgtcgatccggatatccgccgtgccgccgcggggcctcgggctcgcgctcgtacaccgccgctgcccgccagcggcgcgcgcgaatgttgagcgcgacggcgacggcgcctccgggaacggcgagccgtcgtcctcgtctggggatggcgaccgcgacgcggctgcggagtcggggggcgatagcaccagcacgagcaccacgagcacggccgcgacaccgccgccgccctcgtcgaagaggaacgaaaataagtggcggcggaggctgactaagggaggcggcgtggggcggtggctatgggagcccatagtccagggacgggagatgggcttcctcctgctccagctgggcttcgccatatttgcgctacgcatgcttcgcccagagatcgcgttgcccggttcagagccccgcccacagacgacgtacgtcagtgtaccatacagcgacttcctggccagcataaacaaggaccaggtgaagaaggttgaggtggacggggtgcatatcatgttccgactccgcccagaggtggagtcccaggtccgtgttgagcagacaccgacacagcgcggagcagattatgtcattgataatgctggagtttcaaggagaattgtgttcacgacgactcgtccagtggacataaagacaccatacgagaagatggtggaaaacatggttgaatttgggtcaccggacaagaggtctggcggcatgctcaattctgccctggtaggtcttatctatgttgtattgattgcggtagttttgcagcgcctgccaataagcttttctcagcaatcacccggtcagttgaggaataggaagaattctaattccggcggagcaaaagtttctgaaagttcggatatagttacatttgctgatgtggctggagtagatgaggcaaaagaagagcttgaagaaattgtggagttcttaaggaacccagaaagatatatcccattcataagttgctctgctagtgaatttgttgagctatatgtaggcatgggagcagctcgagtacgtgacctatttgctaaggccaaaaaggaatcgccatcgattatttttatcgatgagattgatgccgttgcaaaaagccgtgatagtcgatatcgcattgtcagtaatgatgaacgtgagcagacattaaaccaattgctcacggaaatggatggctttgataccaactcggctgtcattgtattgggggcaacaaatcgagctgatgttttggatcctgcccttaggcgccctgggagatttgaccgtgtggttatggttgaagctcctgataggtttggaagagaatcaattctaaaagttcatgtgaaaagaagagagcttccactgagtaaagatgtagatctagccaatattgctgcaatgacaactggttttactggagcagaccttgcaaacttggtaaacgaagctgctctgttggctgggcgattaaataaagaaatagtggaaaaggttgacttcatccgtgcggttgagcgatctatagcagggatagagaaaaagcatgcaaaattgaagggtaatgaaaaagctgttgttgcgcggcatgaagtaggtcatgcactcgtgggaactgctgtagcaaacctccttcctggacagccacaaattgagtatattgccaagatctggaggtgcattaggcttcacgtacacccctcccgtcacagaggatagatatttactctttgttgatgaactacgtggccgtttagtaacactactgggtgggagggcagcagaggaagttgttttagcaggacgggtttcgactggtgcacttgatgacataagacgtgctactgacatggcctacaaagctgtagcagaatacggtcttagtcagcgcatcgggccaatatcacttgctacactgtcaaatggtggtttagatgactctggtggctctccatggggaaaggaccagggacatctagttgatctcgttcagagggaagtaaaagcgcttttacagtcgtcactggaagtagctctttcagttattcgtgctaatcctgcagttttggaaggcctcggagcatacttagaagagaaagaaaaggttgaaggcgaggagcttcaagagtggctaaaatcggttgttgcatcaaaagagttgacctcttttatcagaggacagcaagagcaagttcttcagctggaagcaggctcctagcgtcaggagtatgcaccgggctcttaaaattaattacttaacaaaagtgactcagcaattagaacatacaatatgagacacaaggtatgcaatggaaaccttcatatactgggaagagacctgtggccatgtgtggtgggttgtatgaacccccacccattcatgctaagacaaaccgggtctgctaagacaaactggtcggatgcccaccctttgttcggtgaatcatgagatcgagccctatacgagaattcaggaaaaaaaaagaaaatctacatgcccgagtgaccatgtaaatatctatcattgcagttcctgaacccttgactacaaaaaaagaaatccagagatgattcatattgagctgtaacattgtacgatcaacctcaggaatattgtaagtgattcagcttcacatgttgttccatagattaggtcggtgttacacatgtaaaagattcttttttggcaatatattcttgtactcaccctattggaagttgttttcctctatataccatcctagaaatgatcaataggataatgcttatacggactatggttcctgtattgagaattgttcttcagaaatcagaatagtgatcgctttttgaaag

SEQ ID NO: 50906 - DNA, 1976 bp, Zea Mays
ctcaaataatagtataatatcaagtatgcaatatatatttggtctcaaagtacaagttcaaccaccttctgcaataggctaaccaactataaggataacaaaatgtagcatgtcgtaagtataaaactctcacttccaacttaatattacagactgaggttcaacacaatatgaagctcttcattgccccatatattttaaaagaattgctccaaagaaaatgcatatcttgttttgtacaggtgatcgaacattgagtgactctaatattttactttaccttgtctcgaggtgtgctctccactcagaccatttcagtaatttgcattaggttttcttgagatattaataatgtgtaaaggtatagatgctaccttcagacatttattcgaataaaattttcacttaactggatagtggctctgattgtcattaagtattttgacttttggcatgatcactgcactcttcagcactgtgtccttgcttggagccatcacctctctgtctccggtttccttggcatgatgactgttggtattgctgtaatcattgtctgcttgatcacccactcctttttagctctgttcgtatcattgtctgcttgatcaccaccctttttgctactgatttctttgaagtcaaggctgtgaaagaaattgagcctgcacttaagaagcagctcatcatctccaccaccctgatgactgttggtattgctgtaatcagctggttggcccttctagctaagttcaccatcttcaactttggtactcagaaggatgtctccaactagggcttgttcttctgtgttgcaattggtccatggctggtctgattattggttttgtcacagaatactacactagcaatgcatacaatcctgtgcaagacgttgcagattcctgcagaactggtgctgtcactaatgtcattttgggtcttgctcttggatacaagtcggttatcatcccgattttcgctatcgctgttatcatctatgttagtttctccattgctgcaatgtacgacatcgcagttgccgctcttggtatgctgagcacaatcgcaactggtcttgctattgatgcttatgctcccatcagtgacaatgctggtggtattgctgagaactgatgctgttgatgctgctggcaacaccactgccgctattggaaagggatttgccattggttcagctgctcttgtgtctctggcgctttttggtgcctttgtcagcagagctggagtcaaggttgtcgatgtcctctcccccaaggttttcattggtttgattgttggagccatgcttccctattggttctctgccatgaccgtgaagagtgttggaagtgctgccctaaagatggtggaggaggtccgcagacagttcaacaccattcctgggttgatggagggaactgccaagcctgactatgcaacctattggaagatctccactgatgcttccatcaaggagatgattcctcctggtgctctggtcatgctcactcccctcattgttggaaccctcttcggtgttgagactctctatggtgttcttgctggtgccctggtttctggagtgcaaccgtcgttttctcttaacagaaaagaactataaaaacgtcgccgctgtcaaaacccagaaattacgaggcgcgaaatggaaagcttccagcagattaacgatcggctagatttgattcattccgcccgcccactacctctcacggtcacggccaatccggccaacccagagatcacgtgtcagtgctattttgtgtacaagtactacttaatatatgtttgaaaacttttttaagtgatttccaaacttgaacgggaatcattcttattcttttaaatgtctgatagtagttattgtttgtgtgacattgtactgttttgtttcttaaacaaacaccattctacaaattttgcatcgtccctgtagtgcgcccgtaagggcgccg

SEQ ID NO: 50907 - DNA, 2234 bp, Zea Mays
atgtcctctgttcgtatcattgtctgcttgatcaccaccctttttgctactgatttctttgaagtcaaggctgtgaaagaaattgagcctgcacttaagaagcagctcatcatctccaccaccctgatgactgttggtattgctgtaatcagctggttggcccttctagctaagttcaccatcttcaactttggtactcagaaggatgtctccaactagggcttgttcttctgtgttgcaattggtccatggctggtctgattattggttttgtcacagaatactacactagcaatgcatacaatttcaaagcctacaagtctcttatgttttttcttctcatcgtttctttgtgatggtgttttaataatcctaacatgtttattctgtggtagtcctgtgcaagacgttgcagattcctgcagaactggtgctgtcactaatgtcattttgggtcttgctcttggatacaagtcggttatcatcccgattttcgctatcgctgttatcatctatgttagtttctccattgctgcaatgtacgacatcgcagttgccgctcttggtatgctgagcacaatcgcaactggtcttgctattgatgcttatgctcccatcagtgacaatgctggtggtattgctgagaactgatgctgttgatgctgctggcaacaccactgccgctattggaaagggatttgccattggttcagctgctcttgtgtctctggcgctttttggtgcctttgtcagcaaagctggagtcaaggttgtcgatgtcctctcccccaaggttttcattggtttgattgttggagccatgcttccctattggttctctgccatgaccatgaagagtgttggaagtgctgccctaaagatggtggaggaggtccgcagacagttcaacaccattcctgggttgatggagggaactgccaagcctgactatgcaacctattggaagatctccactgatgcttccatcaaggagatgattcctcctggtgctctgccggctgccaggggcgcgtggaggatgtagattggtcctggtggcggcgacagcggagggccagcaactgcgagcggtaccgtgctcctgcggtggcttcgtatgcagggaccggaggtctacagtagcgcgcatctagccggctcagcatcgtggatctaaccagaggaggccacggctgttgctcctccctcggcaatggcgagggttcgagacaggacgaagcacttcaaaggggtcgcaatgctctcacatggatacatcgagaaaatgggaaccactcgaaaacgtcgctcactctggctgaggtaatggaaaatcactacgcatccaaaatcagcactttcaatctttagaaaatagcactggttattggagtcattttttgaccgatggagttatcctttgattcagtaagtattttttcctaaaaaacaaatcaaccatgtggcacctgaaccaccatcagagattgcagaggagcacgatggtttagagagtgttttagtgcctatgcaggggattgtggttaatgggaaaagtacttcagagctattgagtggctctgtatcattgaggtcagctgaggtggttggaacacctgttggacgaattgtgaagtgtgaggagtttctgaaggctgcaggacctgttatgagcggcatgttcaagttcagttgaatgaatggcgctctggtgcactaatgagcggatagcgagagaacctctaacatagtatgcaagattttctttcctgatagaatcttccagagtacaaagctaacacaatacctttctaggataaatttgggagtatcaactctaatattttactttaccttgtctcgaggtgtgctctccactcaaaccatttcagtaatttgcattaggttttcttgagatattaataatgtgtaaaggtatagatgctaccttcagacatttattcgaataaaattttcacttaactggatagtggctctgattgtcattaagtattttgacttttggcatgatcactgcactcttcagcactgtgtccttgcttggagccatcacctctctgtctccggtttccttggcatgatgactgttggtattgctgtaatcattgtctgcttgatcacccactcctttttagctctgttcgtatcattgtctgcttgatcaccaccctttttgctactgatttctttgaagtcaaggctgtgaaagaaat

SEQ ID NO: 50908 - DNA, 1871 bp, Zea Mays
atgtcctctgttcgtatcattgtctgcttgatcaccaccctttttgctactgatttctttgaagtcaaggctgtgaaagaaattgagcctgcacttaagaagcagctcatcatctccaccaccctgatgactgttggtattgctgtaatcagctggttggcccttctagctaagttcaccatcttcaactttggtactcagaaggatgtctccaactagggcttgttcttctgtgttgcaattggtccatggctggtctgattattggttttgtcacagaatactacactagcaatgcatacaatcctgtgcaagacgttgcagattcctgcagaactggtgctgtcactaatgtcattttgggtcttgctcttggatacaagtcggttatcatcccgattttcgctatcgctgttatcatctatgttagtttctccattgctgcaatgtacgacatcgcagttgccgctcttggtatgctgagcacaatcgcaactggtcttgctattgatgcttatgctcccatcagtgacaatgctggtggtattgctgagaactgatgctgttgatgctgctggcaacaccactgccgctattggaaagggatttgccattggttcagctgctcttgtgtctctggcgctttttggtgcctttgtcagcaaagctggagtcaaggttgtcgatgtcctctcccccaaggttttcattggtttgattgttggagccatgcttccctattggttctctgccatgaccatgaagagtgttggaagtgctgccctaaagatggtggaggaggtccgcagacagttcaacaccattcctgggttgatggagggaactgccaagcctgactatgcaacctattggaagatctccactgatgcttccatcaaggagatgattcctcctggtgctctggtcatgctcactcccctcattgttggaaccctcttcggttttgagactctctatggtgttcttgctggtgccctggtttctggagtgcaaccgtcgttttctcgcggatgcgattttttatttcattgcattggatacgacttgcgtccgctttctcacccaatcaggcggccctccgcctgcgcacgcctcgtgttttccgtctcgccaccgtgatgtcgcctctgctgcttcgtcgcgtcgtcgcctctctgctgctccacggatccctgaagtgctgctgctccggcgccacgggcggcgccctctggcagccggctgccaggggcgcgtggaggatgtagattggtcctggtggcggcgacagcggagggccagcaactgcgagcggtaccgtgctcctgcggtggcttcgtatgcagggaccggaggtctacagtagcgcgcatctagccggctcagcatcgtggatctaaccagaggaggccacggctgttgctcctccctcggcaatggcgagggttcgagacaggacgaagcacttcaaaggggtcgcaatgctctcacatggatacatcgagaaaatgggaaccactcgaaaacgtcgctcactctggctgaggggattgtggttaatgggaaaagtacttcagagctattgagtggctctgtatcattgaggtcagctgaggtggttggaacacctgttggacgaattgtgaagtgtgaggagtttctgaaggctgcaggacctgttatgcactgtgtccttgcttggagccatcacctctctgtctccggtttccttggcatgatgactgttggtattgctgtaatcattgtctgcttgatcacccactcctttttagctctgttcgtatcattgtctgcttgatcaccaccctttttgctactgatttctttgaagtcaaggctgtgaaagaaat

SEQ ID NO: 50909 - DNA, 2082 bp, Zea Mays
atgtcctctgttcgtatcattgtctgcttgatcaccaccctttttgctactgatttctttgaagtcaaggctgtgaaagaaattgagcctgcacttaagaagcagctcatcatctccaccaccctgatgactgttggtattgctgtaatcagctggttggcccttctagctaagttcaccatcttcaactttggtactcagaaggatgtctccaactagggcttgttcttctgtgttgcaattggtccatggctggtctgattattggttttgtcacagaatactacactagcaatgcatacaatcctgtgcaagacgttgcagattcctgcagaactggtgctgtcactaatgtcattttgggtcttgctcttggatacaagtcggttatcatcccgattttcgctatcgctgttatcatctatgttagtttctccattgctgcaatgtacgacatcgcagttgccgctcttggtatgctgagcacaatcgcaactggtcttgctattgatgcttatgctcccatcagtgacaatgctggtggtattgctgagaactgatgctgttgatgctgctggcaacaccactgccgctattggaaagggatttgccattggttcagctgctcttgtgtctctggcgctttttggtgcctttgtcagcaaagctggagtcaaggttgtcgatgtcctctcccccaaggttttcattggtttgattgttggagccatgcttccctattggttctctgccatgaccatgaagagtgttggaagtgctgccctaaagatggtggaggaggtccgcagacagttcaacaccattcctgggttgatggagggaactgccaagcctgactatgcaacctattggaagatctccactgatgcttccatcaaggagatgattcctcctggtgctctggtcatgctcactcccctcattgttggaaccctcttcggttttgagactctctatggtgttcttgctggtgccctggtttctggagtgcaaccgtcgttttctcgcggatgcgattttttatttcattgcattggatacgacttgcgtccgctttctcacccaatcaggcggccctccgcctgcgcacgcctcgtgttttccgtctcgccaccgtgatgtcgcctctgctgcttcgtcgcgtcgtcgcctctctgctgctccacggatccctgaagtgctgctgctccggcgccacgggcggcgccctctggcagccggctgccaggggcgcgtggaggatgtagattggtcctggtggcggcgacagcggagggccagcaactgcgagcggtaccgtgctcctgcggtggcttcgtatgcagggaccggaggtctacagtagcgcgcatctagccggctcagcatcgtggatctaaccagaggaggccacggctgttgctcctccctcggcaatggcgagggttcgagacaggacgaagcacttcaaaggggtcgcaatgctctcacatggatacatcgagaaaatgggaaccactcgaaaacgtcgctcactctggctgaggtaatggaaaatcactacgcatccaaaatcagcactttcaatctttagaaaatagcactggttattggagtcattttttgaccgatggagttatcctttgattcagtaagtattttttcctaaaaaacaaatcaaccatgtggcacctgaaccaccatcagagattgcagaggagcacgatggtttagagagtgttttagtgcctatgcaggggattgtggttaatgggaaaagtacttcagagctattgagtggctctgtatcattgaggtcagctgaggtggttggaacacctgttggacgaattgtgaagtgtgaggagtttctgaaggctgcaggacctgttatgcactgtgtccttgcttggagccatcacctctctgtctccggtttccttggcatgatgactgttggtattgctgtaatcattgtctgcttgatcacccactcctttttagctctgttcgtatcattgtctgcttgatcaccaccctttttgctactgatttctttgaagtcaaggctgtgaaagaaat

SEQ ID NO: 50910 - DNA, 3224 bp, Zea Mays
atgtcctctgttcgtatcattgtctgcttgatcaccaccctttttgctactgatttctttgaagtcaaggctgtgaaagaaattgagcctgcacttaagaagcagctcatcatctccaccaccctgatgactgttggtattgctgtaatcagctggttggcccttctagctaagttcaccatcttcaactttggtactcagaaggatgtctccaactagggcttgttcttctgtgttgcaattggtccatggctggtctgattattggttttgtcacagaatactacactagcaatgcatacaatcctgtgcaagacgttgcagattcctgcagaactggtgctgtcactaatgtcattttgggtcttgctcttggatacaagtcggttatcatcccgattttcgctatcgctgttatcatctatgttagtttctccattgctgcaatgtacgacatcgcagttgccgctcttggtatgctgagcacaatcgcaactggtcttgctattgatgcttatgctcccatcagtgacaatgctggtggtattgctgagaactgatgctgttgatgctgctggcaacaccactgccgctattggaaagggatttgccattggttcagctgctcttgtgtctctggcgctttttggtgcctttgtcagcaaagctggagtcaaggttgtcgatgtcctctcccccaaggttttcattggtttgattgttggagccatgcttccctattggttctctgccatgaccatgaagagtgttggaagtgctgccctaaagatggtggaggaggtccgcagacagttcaacaccattcctgggttgatggagggaactgccaagcctgactatgcaacctattggaagatctccactgatgcttccatcaaggagatgattcctcctggtgctctggtcatgctcactcccctcattgttggaaccctcttcggttttgagactctctatggtgttcttgctggtgccctggtttctggagtgcaaccgtcgttttctcgcggatgcgattttttatttcattgcattggatacgacttgcgtccgctttctcacccaatcaggcggccctccgcctgcgcacgcctcgtgttttccgtctcgccaccgtgatgtcgcctctgctgcttcgtcgcgtcgtcgcctctctgctgctccacggatccctgaagtgctgctgctccggcgccacgggcggcgccctctggcagccggctgccaggggcgcgtggaggatgtagattggtcctggtggcggcgacagcggagggccagcaactgcgagcggtaccgtgctcctgcggtggcttcgtatgcagggaccggaggtctacagtagcgcgcatctagccggctcagcatcgtggatctaaccagaggaggccacggctgttgctcctccctcggcaatggcgagggttcgagacaggacgaagcacttcaaaggggtcgcaatgctctcacatggatacatcgagaaaatgggaaccactcgaaaacgtcgctcactctggctgaggtaatggaaaatcactacgcatccaaaatcagcactttcaatctttagaaaatagcactggttattggagtcattttttgaccgatggagttatcctttgattcagtaagtattttttcctaaaaaacaaatcaaccatgtggcacctgaaccaccatcagagattgcagaggagcacgatggtttagagagtgttttagtgcctatgcaggggattgtggttaatgggaaaagtacttcagagctattgagtggctctgtatcattgaggtggttggaacacctgttggacgaattgtgaagtgtgaggagtttctgaaggctgcaggacctgttatgctggttggcccttctagctaagttcaccatcttcaactttggtactcagaaggatgtctccaactggggcttgttcttctgtgttgcaattggtccatgggctggtctgattattggttttgtcacagaatactacactagcaatgcatacaagttcaaagcctacaagtctcttatgttttttcttctcatcgtttctttgtgatggtgttttaataatcctaacatgtttattctatggtagtcctgtgcaagacgttgcagattcctgcagaactggtgctgtcactaatgtcattttgggtcttgctcttggatacaagtcggttatcatcccgattttcgctatcgctgttatcatctatgttagtttctccattgctgcaatgtacgacatcgcagttgccgctcttggtatgctgagcacaatcgcaactggtcttgctattgatgcttatgctcccatcagtgacaatgctggtggtattgctgagaactgatgctgttgatgctgctggcaacaccactgccgctattggaaagggatttgccattggttcagctgctcttgtgtctctggcgctttttggtgcctttgtcagcagagctggagtcaaggttgtcgatgtcctctcccccaaggttttcattggtttgattgttggagccatgcttccctattggttctctgccatgaccgtgaagagtgttggaagtgctgccctaaagatggtggaggaggtccgcagacagttcaacaccattcctgggttgatggagggaactgccaagcctgactatgcaacctattggaagatctccactgatgcttccatcaaggagatgattcctcctggtgctctggtcatgctcactcccctcattgttggaaccctcttcggtgttgagactctctatggtgttcttgctggtgccctggtttctggagtgcaaccgtcgttttctcttaacagaaaagaactataaaaacgtcgccgctgtcaaaacccagaaattacgaggcgcgaaatggaaagcttccagcagattaacgatcggctagatttgattcattccgcccgcccactacctctcacggtcacggccaatccggccaacccagagatcacgtgtcagtgctattttgtgtacaagtactacttaatatatgtttgaaaacttttttaagtgatttccaaacttgaacgggaatcattcttattcttttaaatgtctgatagtagttattgtttgtgtgacattgtactgttttgtttcttaaacaaacaccattctacaaattttgcatcgtccctgtagtgcgcccgtaagggcgccg

SEQ ID NO: 50911 - DNA, 3023 bp, Zea Mays
atgtcctctgttcgtatcattgtctgcttgatcaccaccctttttgctactgatttctttgaagtcaaggctgtgaaagaaattgagcctgcacttaagaagcagctcatcatctccaccaccctgatgactgttggtattgctgtaatcagctggttggcccttctagctaagttcaccatcttcaactttggtactcagaaggatgtctccaactagggcttgttcttctgtgttgcaattggtccatggctggtctgattattggttttgtcacagaatactacactagcaatgcatacaatcctgtgcaagacgttgcagattcctgcagaactggtgctgtcactaatgtcattttgggtcttgctcttggatacaagtcggttatcatcccgattttcgctatcgctgttatcatctatgttagtttctccattgctgcaatgtacgacatcgcagttgccgctcttggtatgctgagcacaatcgcaactggtcttgctattgatgcttatgctcccatcagtgacaatgctggtggtattgctgagaactgatgctgttgatgctgctggcaacaccactgccgctattggaaagggatttgccattggttcagctgctcttgtgtctctggcgctttttggtgcctttgtcagcaaagctggagtcaaggttgtcgatgtcctctcccccaaggttttcattggtttgattgttggagccatgcttccctattggttctctgccatgaccatgaagagtgttggaagtgctgccctaaagatggtggaggaggtccgcagacagttcaacaccattcctgggttgatggagggaactgccaagcctgactatgcaacctattggaagatctccactgatgcttccatcaaggagatgattcctcctggtgctctggtcatgctcactcccctcattgttggaaccctcttcggttttgagactctctatggtgttcttgctggtgccctggtttctggagtgcaaccgtcgttttctcgcggatgcgattttttatttcattgcattggatacgacttgcgtccgctttctcacccaatcaggcggccctccgcctgcgcacgcctcgtgttttccgtctcgccaccgtgatgtcgcctctgctgcttcgtcgcgtcgtcgcctctctgctgctccacggatccctgaagtgctgctgctccggcgccacgggcggcgccctctggcagccggctgccaggggcgcgtggaggatgtagattggtcctggtggcggcgacagcggagggccagcaactgcgagcggtaccgtgctcctgcggtggcttcgtatgcagggaccggaggtctacagtagcgcgcatctagccggctcagcatcgtggatctaaccagaggaggccacggctgttgctcctccctcggcaatggcgagggttcgagacaggacgaagcacttcaaaggggtcgcaatgctctcacatggatacatcgagaaaatgggaaccactcgaaaacgtcgctcactctggctgaggggattgtggttaatgggaaaagtacttcagagctattgagtggctctgtatcattgaggtcagctgaggtggttggaacacctgttggacgaattgtgaagtgtgaggagtttctgaaggctgcaggacctgttatgctggttggcccttctagctaagttcaccatcttcaactttggtactcagaaggatgtctccaactggggcttgttcttctgtgttgcaattggtccatgggctggtctgattattggttttgtcacagaatactacactagcaatgcatacaagttcaaagcctacaagtctcttatgttttttcttctcatcgtttctttgtgatggtgttttaataatcctaacatgtttattctatggtagtcctgtgcaagacgttgcagattcctgcagaactggtgctgtcactaatgtcattttgggtcttgctcttggatacaagtcggttatcatcccgattttcgctatcgctgttatcatctatgttagtttctccattgctgcaatgtacgacatcgcagttgccgctcttggtatgctgagcacaatcgcaactggtcttgctattgatgcttatgctcccatcagtgacaatgctggtggtattgctgagaactgatgctgttgatgctgctggcaacaccactgccgctattggaaagggatttgccattggttcagctgctcttgtgtctctggcgctttttggtgcctttgtcagcagagctggagtcaaggttgtcgatgtcctctcccccaaggttttcattggtttgattgttggagccatgcttccctattggttctctgccatgaccgtgaagagtgttggaagtgctgccctaaagatggtggaggaggtccgcagacagttcaacaccattcctgggttgatggagggaactgccaagcctgactatgcaacctattggaagatctccactgatgcttccatcaaggagatgattcctcctggtgctctggtcatgctcactcccctcattgttggaaccctcttcggtgttgagactctctatggtgttcttgctggtgccctggtttctggagtgcaaccgtcgttttctcttaacagaaaagaactataaaaacgtcgccgctgtcaaaacccagaaattacgaggcgcgaaatggaaagcttccagcagattaacgatcggctagatttgattcattccgcccgcccactacctctcacggtcacggccaatccggccaacccagagatcacgtgtcagtgctattttgtgtacaagtactacttaatatatgtttgaaaacttttttaagtgatttccaaacttgaacgggaatcattcttattcttttaaatgtctgatagtagttattgtttgtgtgacattgtactgttttgtttcttaaacaaacaccattctacaaattttgcatcgtccctgtagtgcgcccgtaagggcgccg

SEQ ID NO: 50912 - DNA, 3301 bp, Zea Mays
atgtcctctgttcgtatcattgtctgcttgatcaccaccctttttgctactgatttctttgaagtcaaggctgtgaaagaaattgagcctgcacttaagaagcagctcatcatctccaccaccctgatgactgttggtattgctgtaatcagctggttggcccttctagctaagttcaccatcttcaactttggtactcagaaggatgtctccaactagggcttgttcttctgtgttgcaattggtccatggctggtctgattattggttttgtcacagaatactacactagcaatgcatacaatcctgtgcaagacgttgcagattcctgcagaactggtgctgtcactaatgtcattttgggtcttgctcttggatacaagtcggttatcatcccgattttcgctatcgctgttatcatctatgttagtttctccattgctgcaatgtacgacatcgcagttgccgctcttggtatgctgagcacaatcgcaactggtcttgctattgatgcttatgctcccatcagtgacaatgctggtggtattgctgagaactgatgctgttgatgctgctggcaacaccactgccgctattggaaagggatttgccattggttcagctgctcttgtgtctctggcgctttttggtgcctttgtcagcaaagctggagtcaaggttgtcgatgtcctctcccccaaggttttcattggtttgattgttggagccatgcttccctattggttctctgccatgaccatgaagagtgttggaagtgctgccctaaagatggtggaggaggtccgcagacagttcaacaccattcctgggttgatggagggaactgccaagcctgactatgcaacctattggaagatctccactgatgcttccatcaaggagatgattcctcctggtgctctggtcatgctcactcccctcattgttggaaccctcttcggttttgagactctctatggtgttcttgctggtgccctggtttctggagtgcaaccgtcgttttctcgcggatgcgattttttatttcattgcattggatacgacttgcgtccgctttctcacccaatcaggcggccctccgcctgcgcacgcctcgtgttttccgtctcgccaccgtgatgtcgcctctgctgcttcgtcgcgtcgtcgcctctctgctgctccacggatccctgaagtgctgctgctccggcgccacgggcggcgccctctggcagccggctgccaggggcgcgtggaggatgtagattggtcctggtggcggcgacagcggagggccagcaactgcgagcggtaccgtgctcctgcggtggcttcgtatgcagggaccggaggtctacagtagcgcgcatctagccggctcagcatcgtggatctaaccagaggaggccacggctgttgctcctccctcggcaatggcgagggttcgagacaggacgaagcacttcaaaggggtcgcaatgctctcacatggatacatcgaggtgtgttgcgtcctctgcctctccacccgcatcccctcttcagcgtagtgatgacgcctcactaatgaaaatgggaaccactcgaaaacgtcgctcactctggctgaggtaatggaaaatcactacgcatccaaaatcagcactttcaatctttagaaaatagcactggttattggagtcattttttgaccgatggagttatcctttgattcagtaagtattttttcctaaaaaacaaatcaaccatgtggcacctgaaccaccatcagagattgcagaggagcacgatggtttagagagtgttttagtgcctatgcaggggattgtggttaatgggaaaagtacttcagagctattgagtggctctgtatcattgaggtcagctgaggtggttggaacacctgttggacgaattgtgaagtgtgaggagtttctgaaggctgcaggacctgttatgctggttggcccttctagctaagttcaccatcttcaactttggtactcagaaggatgtctccaactggggcttgttcttctgtgttgcaattggtccatgggctggtctgattattggttttgtcacagaatactacactagcaatgcatacaagttcaaagcctacaagtctcttatgttttttcttctcatcgtttctttgtgatggtgttttaataatcctaacatgtttattctatggtagtcctgtgcaagacgttgcagattcctgcagaactggtgctgtcactaatgtcattttgggtcttgctcttggatacaagtcggttatcatcccgattttcgctatcgctgttatcatctatgttagtttctccattgctgcaatgtacgacatcgcagttgccgctcttggtatgctgagcacaatcgcaactggtcttgctattgatgcttatgctcccatcagtgacaatgctggtggtattgctgagaactgatgctgttgatgctgctggcaacaccactgccgctattggaaagggatttgccattggttcagctgctcttgtgtctctggcgctttttggtgcctttgtcagcagagctggagtcaaggttgtcgatgtcctctcccccaaggttttcattggtttgattgttggagccatgcttccctattggttctctgccatgaccgtgaagagtgttggaagtgctgccctaaagatggtggaggaggtccgcagacagttcaacaccattcctgggttgatggagggaactgccaagcctgactatgcaacctattggaagatctccactgatgcttccatcaaggagatgattcctcctggtgctctggtcatgctcactcccctcattgttggaaccctcttcggtgttgagactctctatggtgttcttgctggtgccctggtttctggagtgcaaccgtcgttttctcttaacagaaaagaactataaaaacgtcgccgctgtcaaaacccagaaattacgaggcgcgaaatggaaagcttccagcagattaacgatcggctagatttgattcattccgcccgcccactacctctcacggtcacggccaatccggccaacccagagatcacgtgtcagtgctattttgtgtacaagtactacttaatatatgtttgaaaacttttttaagtgatttccaaacttgaacgggaatcattcttattcttttaaatgtctgatagtagttattgtttgtgtgacattgtactgttttgtttcttaaacaaacaccattctacaaattttgcatcgtccctgtagtgcgcccgtaagggcgccg

SEQ ID NO: 50913 - DNA, 3314 bp, Zea Mays
cagtaatttgcattaggttttcttgagatattaataatgtgtaaagcactgtgtccttgcttggagccatcacctctctgtctccggtttccttggcatgatgactgttggtattgctgtaatcattgtctgcttgatcacccactcctttttagctctgttcgtatcattgtctgcttgatcaccaccctttttgctactgatttctttgaagtcaaggctgtgaaagaaattgagcctgcacttaagaagcagctcatcatctccaccaccctgatgactgttggtattgctgtaatcagctggttggcccttctagctaagttcaccatcttcaactttggtactcagaaggatgtctccaactagggcttgttcttctgtgttgcaattggtccatggctggtctgattattggttttgtcacagaatactacactagcaatgcatacaatttcaaagcctacaagtctcttatgttttttcttctcatcgtttctttgtgatggtgttttaataatcctaacatgtttattctgtggtagtcctgtgcaagacgttgcagattcctgcagaactggtgctgtcactaatgtcattttgggtcttgctcttggatacaagtcggttatcatcccgattttcgctatcgctgttatcatctatgttagtttctccattgctgcaatgtacgacatcgcagttgccgctcttggtatgctgagcacaatcgcaactggtcttgctattgatgcttatgctcccatcagtgacaatgctggtggtattgctgagaactgatgctgttgatgctgctggcaacaccactgccgctattggaaagggatttgccattggttcagctgctcttgtgtctctggcgctttttggtgcctttgtcagcaaagctggagtcaaggttgtcgatgtcctctcccccaaggttttcattggtttgattgttggagccatgcttccctattggttctctgccatgaccatgaagagtgttggaagtgctgccctaaagatggtggaggaggtccgcagacagttcaacaccattcctgggttgatggagggaactgccaagcctgactatgcaacctattggaagatctccactgatgcttccatcaaggagatgattcctcctggtgctctggtcatgctcactcccctcattgttggaaccctcttcggttttgagactctctatggtgttcttgctggtgccctggtttctggagtgcaaccgtcgttttctcgcggatgcgattttttatttcattgcattggatacgacttgcgtccgctttctcacccaatcaggcggccctccgcctgcgcacgcctcgtgttttccgtctcgccaccgtgatgtcgcctctgctgcttcgtcgcgtcgtcgcctctctgctgctccacggatccctgaagtgctgctgctccggcgccacgggcggcgccctctggcagccggctgccaggggcgcgtggaggatgtagattggtcctggtggcggcgacagcggagggccagcaactgcgagcggtaccgtgctcctgcggtggcttcgtatgcagggaccggaggtctacagtagcgcgcatctagccggctcagcatcgtggatctaaccagaggaggccacggctgttgctcctccctcggcaatggcgagggttcgagacaggacgaagcacttcaaaggggtcgcaatgctctcacatggatacatcgagaaaatgggaaccactcgaaaacgtcgctcactctggctgagagattgcagaggagcacgatggtttagagagtgttttagtgcctatgcaggggattgtggttaatgggaaaagtacttcagagctattgagtggctctgtatcattgaggtcagctgaggtggttggaacacctgttggacgaattgtgaagtgtgaggagtttctgaaggctgcaggacctgttatgctggttggcccttctagctaagttcaccatcttcaactttggtactcagaaggatgtctccaactggggcttgttcttctgtgttgcaattggtccatgggctggtctgattattggttttgtcacagaatactacactagcaatgcatacaagttcaaagcctacaagtctcttatgttttttcttctcatcgtttctttgtgatggtgttttaataatcctaacatgtttattctatggtagtcctgtgcaagacgttgcagattcctgcagaactggtgctgtcactaatgtcattttgggtcttgctcttggatacaagtcggttatcatcccgattttcgctatcgctgttatcatctatgttagtttctccattgctgcaatgtacgacatcgcagttgccgctcttggtatgctgagcacaatcgcaactggtcttgctattgatgcttatgctcccatcagtgacaatgctggtggtattgctgagaactgatgctgttgatgctgctggcaacaccactgccgctattggaaagggatttgccattggttcagctgctcttgtgtctctggcgctttttggtgcctttgtcagcagagctggagtcaaggttgtcgatgtcctctcccccaaggttttcattggtttgattgttggagccatgcttccctattggttctctgccatgaccgtgaagagtgttggaagtgctgccctaaagatggtggaggaggtccgcagacagttcaacaccattcctgggttgatggagggaactgccaagcctgactatgcaacctattggaagatctccactgatgcttccatcaaggagatgattcctcctggtgctctggtcatgctcactcccctcattgttggaaccctcttcggtgttgagactctctatggtgttcttgctggtgccctggtttctggagtgcaaccgtcgttttctcttaacagaaaagaactataaaaacgtcgccgctgtcaaaacccagaaattacgaggcgcgaaatggaaagcttccagcagattaacgatcggctagatttgattcattccgcccgcccactacctctcacggtcacggccaatccggccaacccagagatcacgtgtcagtgctattttgtgtacaagtactacttaatatatgtttgaaaacttttttaagtgatttccaaacttgaacgggaatcattcttattcttttaaatgtctgatagtagttattgtttgtgtgacattgtactgttttgtttcttaaacaaacaccattctacaaattttgcatcgtccctgtagtgcgcccgtaagggcgccg

SEQ ID NO: 50914 - DNA, 1543 bp, Zea Mays
gcgtagtgatgacgcctcactaatgaaaatgggaaccactcgaaaacgtcgctcactctggctgaggggattgtggttaatgggaaaagtacttcagagctattgagtggctctgtatcattgaggtcagctgaggtggttggaacacctgttggacgaattgtgaagtgtgaggagtttctgaaggctgcaggacctgttatgctggttggcccttctagctaagttcaccatcttcaactttggtactcagaaggatgtctccaactggggcttgttcttctgtgttgcaattggtccatgggctggtctgattattggttttgtcacagaatactacactagcaatgcatacaagttcaaagcctacaagtctcttatgttttttcttctcatcgtttctttgtgatggtgttttaataatcctaacatgtttattctatggtagtcctgtgcaagacgttgcagattcctgcagaactggtgctgtcactaatgtcattttgggtcttgctcttggatacaagtcggttatcatcccgattttcgctatcgctgttatcatctatgttagtttctccattgctgcaatgtacgacatcgcagttgccgctcttggtatgctgagcacaatcgcaactggtcttgctattgatgcttatgctcccatcagtgacaatgctggtggtattgctgagaactgatgctgttgatgctgctggcaacaccactgccgctattggaaagggatttgccattggttcagctgctcttgtgtctctggcgctttttggtgcctttgtcagcagagctggagtcaaggttgtcgatgtcctctcccccaaggttttcattggtttgattgttggagccatgcttccctattggttctctgccatgaccgtgaagagtgttggaagtgctgccctaaagatggtggaggaggtccgcagacagttcaacaccattcctgggttgatggagggaactgccaagcctgactatgcaacctattggaagatctccactgatgcttccatcaaggagatgattcctcctggtgctctggtcatgctcactcccctcattgttggaaccctcttcggtgttgagactctctatggtgttcttgctggtgccctggtttctggagtgcaaccgtcgttttctcttaacagaaaagaactataaaaacgtcgccgctgtcaaaacccagaaattacgaggcgcgaaatggaaagcttccagcagattaacgatcggctagatttgattcattccgcccgcccactacctctcacggtcacggccaatccggccaacccagagatcacgtgtcagtgctattttgtgtacaagtactacttaatatatgtttgaaaacttttttaagtgatttccaaacttgaacgggaatcattcttattcttttaaatgtctgatagtagttattgtttgtgtgacattgtactgttttgtttcttaaacaaacaccattctacaaattttgcatcgtccctgtagtgcgcccgtaagggcgccg

SEQ ID NO: 50915 - DNA, 2312 bp, Zea Mays
atgaaccaagcacgagtggaaggaaagatctgcaccccgttgccatttcgtataataataactaggatgcaaacagcaaaagaaagaaaaatggagactagagcagaaatttcatcttcttcccccgagcgagccttttcccccacgtcggtctcaactcaacaacgcttccgttggctgcaaccttttcttgcatcttactacgcatcagccggcgcggacgagaagatgaggctcatcaggagccccaccatgagacctattagcccagcaaacgcggcgaacgtcagggagaaacctgcatcgcctttgcggctcctgcgcctccgaagcacatcctgaacacagtaggagggtttgttatggtatctacagaattcaacaaacaataaagaaaaggagcgtgcttttttttcttcctaaaaactaacctaaaatgcaaagggatacattcaacaatgggtaggcgatgaaccttttcacgcacatcaagtttaggccatgctcaacaaagcatgtatatgagcgtgtaaaaaacactgtctgtttacgtagtgaagttagggaggagataggaaagctctggagacagcatgaacaacctacacggctacacccagttcccctaaatctgtttataggagattgagaaaacaagtttatggagaataggggagatggatttgcagcagagcttgagaaaaacatcatcccattcaactctttttgacctcgtttttctatatgacaggttggtggagatgctctaacaacttcgattttctttaaactactttactcatgttgcagttctcatcaggccaatatcgaattgctcataaaaaaaccgagccaaagtccaaatgtcaatatgatcaagtcaaatacaggaacaaaacgaatagaaagaagtttgatatactgtaccaattcacgttgcatttgctgattttgctgaagcatgttgtctctttcttctttcaaccgctgaattgtctggatctgagtaagataaaaggggacaacttcgtgagaaaaaaatgaccaagttgtcccaaaggatgtttactcgttcatacagtcttgatcagtgctaatgcacaaacttcctgttgcaatgagattccttcatgaaacaatacctttggataacccacgattgttctctgaattttcagttagaaacctggaacatgtccatcggtttaaagggagctaggtactctggttggaatggacaataggaaggggagaaaaagatccaaattttgtccgcagagcataactaaaggaaacatgctcatgggcttctgggcatccctccctccctcaattatgacctcccaattataggtacctttcccccatgatcaactttatgacttttcaactgtcaaatcatgttgcttcaacatcttcctatttctttagacttgcacttgacacgctccacataatcaatgccaccatgacattatcccaatatagctttaagaatccaacgtgaaagaagtagctgttctctcaatgcacaatcaatgtgtaaagaaacagattgttcatgtgccacacgatgttaaatcatgataaaaagcttcaagcatataacattcaagttagcaaaactattcgttctatgaattcgtcagagaaaagtgatgaattcacttgttttcagtgaagtcccaaagtaaaaaaaatggtaagaattgttggcatagagcgtattacctcttcaaggcttgcattcttcagcatctgaaaagtacggccaaagatacgatcaacagtaagagttacaactgaaaatttataagtgaatcacaagttccatacatatcagaagagagctgccacagtctcaccatcagatcgtcagacgctgctttgaagctccggcttcctaaagatgatacgctagagtcatctgaacctccgcagctaggtaatgtgtagacaaccttgagcttcatttcctcgattaccttatcagcttccttgttgaactgcgcacatgtaatgtaaccgtgtatagcagcgtgtggctgtggacatcatttcactatagggataatgcaacgctaataaaccttacaaatttgttctgcacttcttgctcaccgtatcaggggggatctcatccatgtcggtactggcggccaccttcgtgctctgaatcaagaatttatccttgcattgcatgtctggtgggtaatctttctgtgcctgcagcgtaactgtaccccccagatgggagagaaggcagggagacacaaacactcacacatcgaaatccaaacggaggatgctaa

SEQ ID NO: 50916 - DNA, 2711 bp, Zea Mays
cccgccacgtcctctctcttcccccatcattccggccttccacacggccccaccggccattgtccctccggccctcgcgagtcgcgacctccactgcaaccgcaccgccatgatgaaaccgccggcaccggcggttccgtcgcctgagccgccgcgcctcgccggcggtgggcgtgggccgcgcggcctccgatccctgcccgcgctctcctacaacacccaccgcgccctcgtcctggggctcaccttcctggcctacgcgctctaccacgcctcccgtaaaccgcccagcatcgtcaagcgcgagctcgcccggtcgtggccgcccttcgccgacccggcgctcctcggcgccacggacgtcgccttcctcacctcctattccctcggcatgttcgtcgccggccacctcggcgactgcctcgacctccgccgcttccttgccttcggcatggtcaccagcggcgccgcggtggcgctcttcggcgccgggtacttcctaggccagcattcgctcgcgttctacgtcgtcgcccaggtgattgcgggcctgctccagtccacgggctggccctccgtcgtcgccatcgtgggcaactggttcagcggccggaggcgtggcctcatcatgggcatatggaacgcgcacacctcggtggggaacatcaccggatcgcttgtcgccgcagccatgcttgggtacgggtggggatggtcgttcgtggtccccggtggtctcattgcgctcggtggcgtcctcgtgctgttcttcctcgcgccatacccccagtacgtcggcttcggcccgtcgccgattgaagaacctgtcactgatgagagcaccgacggggaggacattagtgccgcagggaaggacagacgggatgccgtcggaatttttaaggcactggccattcccggtgtcgtcatcttcgcgctctgtctcttcttcgccaaactagttgcgtacacttttctgtactggctcccattctacttgagccagactggtaagcccatgttttttttctgtcaatgagtttgttccttattgattagaattggccacagcggttatcatattagattatattggtacgaattgttagcttcctgctctgcatttggttagattgatatggttcttgatggaagctatcagatttgcttgtgattgaatttcgattggggtggacatgaacttacattgtagatgcatgttgctatgctaatgctgcagctgtagtattatgctctgaagtatatcaggcgttcaagaaatatatggcacataaaaagggaaaatggaaagaatttatgttctgctagataacgagtttatccttgcccagcgtatccagtgtgcgtctctgtataggttttgtcagaggttcaaagctgatcgtttcttttactgaaattaggaatggactaacaataacgtgacttgcatctttatttgaatataccatgactcacatttacctgctgttctgtttatctgaatacaacttggtgttttcaagtcaaatgcatctgtattatccacactgcattgtagtgtctccagatgacttgcgtggttgccttgtaaaatgtaacctcttctttttgtggaattactgatactgtgcaggacatctgaactttattagcagttaaacttcatatttcgatttgacatttaaaatggcacttcttttaacattgtttttttcccagctattggagacgagcatatgtcagctgcatctgcaggatatctatcagttttgtttgatgtaggtggaatagttgggggagttctggccggcttcatatctgaccagcttaatgctagggcaaccactgctgccgttttcatgtacttggcgattccatctcttttcctctttcatgcatatggtagtacctcaaaagcgacaaacattggcttgatgatgatcagtggcctgtttgttaatggaccctatgctctgataacaaccgctgtttctgctgatttgggaactcacaaatctcttaaaggagattctcgcgcattggccacggtaaccgcaattatagatgggacaggatctcttggtgctgcactaggaccattcataacgggcttcatttcaagaaaaggatgggatttagtattcacaatgcttgcactctgtgcactggttgctgctgtgctgttgtcaagtcatgtgaaaacagaaattcctcagatcatccagaagtggagagatcgctcgactaacgcgcagaatggaaatgcagatcctggtgttcagccacttctagtggacgaaagttgacggggagatctttcggtgcggctcctagtgcgacacagttttgtagtgttgttgtgaggcagtgtgatggttctggagaaaagacaaatcagacgatgacgaggaaacggtttctgtccctaatgcttattgatctgagcaaacaaacatgagcgggatacaatctattttctcaaaaatgatggtatagtccattgtagatttgcagtagaatctttagatacaccaatatgttgtgtaagaatatactgtgtatctttacgcatatcagctgtacttcaggggtttagatgaacctaggaagatggaacaatgacttgacagtgaaattgttatggtcgctagatcattgagagattatagaggtgtatcgatgggtaggaacgttggccggggtctctg

SEQ ID NO: 50917 - DNA, 1936 bp, Zea Mays
cccgccacgtcctctctcttcccccatcattccggccttccacacggccccaccggccattgtccctccggccctcgcgagtcgcgacctccactgcaaccgcaccgccatgatgaaaccgccggcaccggcggttccgtcgcctgagccgccgcgcctcgccggcggtgggcgtgggccgcgcggcctccgatccctgcccgcgctctcctacaacacccaccgcgccctcgtcctggggctcaccttcctggcctacgcgctctaccacgcctcccgtaaaccgcccagcatcgtcaagcgcgagctcgcccggtcgtggccgcccttcgccgacccggcgctcctcggcgccacggacgtcgccttcctcacctcctattccctcggcatgttcgtcgccggccacctcggcgactgcctcgacctccgccgcttccttgccttcggcatggtcaccagcggcgccgcggtggcgctcttcggcgccgggtacttcctaggccagcattcgctcgcgttctacgtcgtcgcccaggtgattgcgggcctgctccagtccacgggctggccctccgtcgtcgccatcgtgggcaactggttcagcggccggaggcgtggcctcatcatgggcatatggaacgcgcacacctcggtggggaacatcaccggatcgcttgtcgccgcagccatgcttgggtacgggtggggatggtcgttcgtggtccccggtggtctcattgcgctcggtggcgtcctcgtgctgttcttcctcgcgccatacccccagtacgtcggcttcggcccgtcgccgattgaagaacctgtcactgatgagagcaccgacggggaggacattagtgccgcagggaaggacagacgggatgccgtcggaatttttaaggcactggccattcccggtgtcgtcatcttcgcgctctgtctcttcttcgccaaactagttgcgtacacttttctgtactggctcccattctacttgagccagactggtggaatagttgggggagttctggccggcttcatatctgaccagcttaatgctagggcaaccactgctgccgttttcatgtacttggcgattccatctcttttcctctttcatgcatatggtagtacctcaaaagcgacaaacattggcttgatgatgatcagtggcctgtttgttaatggaccctatgctctgataacaaccgctgtttctgctgatttgggaactcacaaatctcttaaaggagattctcgcgcattggccacggtaaccgcaattatagatgggacaggatctcttggtgctgcactaggaccattcataacgggcttcatttcaagaaaaggatgggatttagtattcacaatgcttgcactctgtgcactggttgctgctgtgctgttgtcaagtcatgtgaaaacagaaattcctcagatcatccagaagtggagagatcgctcgactaacgcgcagaatggaaatgcagatcctggtgttcagccacttctagtggacgaaagttgacggggagatctttcggtgcggctcctagtgcgacacagttttgtagtgttgttgtgaggcagtgtgatggttctggagaaaagacaaatcagacgatgacgaggaaacggtttctgtccctaatgcttattgatctgagcaaacaaacatgagcgggatacaatctattttctcaaaaatgatggtatagtccattgtagatttgcagtagaatctttagatacaccaatatgttgtgtaagaatatactgtgtatctttacgcatatcagctgtacttcaggggtttagatgaacctaggaagatggaacaatgacttgacagtgaaattgttatggtcgctagatcattgagagattatagaggtgtatcgatgggtaggaacgttggccggggtctctg

SEQ ID NO: 50918 - DNA, 1107 bp, Zea Mays
actgctcgagctcagctcaaggaaccacagaaaatggcgtcacttctccgccctctcgtcctcgtgctcctgatcgcctcctgcgcagcgcagcagtcaccgccggcgcagcccccgccaacgccgaacgcgccaccggccaactcgccgccccaggcgcctccagccggcaacccgccacccgcgcccaccgccactccacctccggccccgaccactccgcccccggccccgaccactcctcccccggctcccacaacgccgcccccggcgccgacaactccacctccggcccccaccacgccgcctccgtccccaccggcgtcgccaccgcccgctcccaccactccgccaccgtctcccccggcaagcccgccgcccgctcccgccaccccgccaccgtctccgcccatggcgacaccggctgcgtcccccaagagccccaagacgccgagccccgccgccgcgacgtccccggcgccctcgctctcgcccgcgggcacgccgacgaacgaagactcgggtgcaagcgcgcgcgcggtcggcttcgccacggtggtggcgttggcgggcgcgggcctcgccgtcttgctttgagtagtagactccgactcttcttcctgtcctcactagtcacgccgatgttgtcaccccctccgcgtgcctcgacgttgctgctcgctccatttcagtttcatcttttttttttcctttggtgttgttatttaattttaccggccctacgatcgattcttgatgtacgacgacgacgatgatgatgcattggttgctttggatccgcgggcggcggggcgggtggtggttagtgttctgcccgcgggtgtcgactcgccacgccatgtacttttaccgcactacattttggttctatagagagaggatttgtgtacattctcgtgcattatttctatggccgttgaataaaatctctgtgcagattcactcgatctcgacgaccttactagtaccggggtgctgaaatatttcgcagtcctttgtaccgtgtttggactagatcggtcccatatgcgaggatttcaacgtgtaatgtactgtatatacattggtacattgttggcaatttgg

SEQ ID NO: 50919 - DNA, 351 bp, Zea Mays
gatggatgaagtataatataaagtcggtaggggttacctaagtattttatcgttccaccccaaacctccgacgttttgcatctccaagcagcatcgtctcctccccagatccatcaattcgttcggaccgcccttctcgtgtccccgttccaaagcgcggcaggctgagcggttccgtcagatttgagtcgtcatgaatcccgagtatgattaccttttcaaacttctgcttatcggtgattctggtgttggaaaatcatgcttgcttctcagatttgcagatgattcatatctggacagctacatcagcacaattggagttgactttttaatctgttttgccattttttt

SEQ ID NO: 50920 - DNA, 1117 bp, Zea Mays
attacaaatcatttcttactcctgaaaattaggacagtagagcaagacgggaagaccataaagcttcaaatttgggatactgctggacaagagcgcttcaggacaatcactagcagctactaccgcggagctcacggaatcattattgtatatgacgtgacagaccaagaaagcttcaataatgtgaagcaatggttaaacgagattgaccgttatgcaagtgacaatgttaacaagctccttgttgggaacaagagcgatctaactgctaacaaagttgtggcaaccgagacagcaaaggcgtttgctgatgagatgggcatcccattcatggagacgagtgccaaaaacgccatcaatgtggagcaggccttcatggctatggctgcatccatcaaggacaggatggccagccaaccagctgcggctaacgcaaggccagcgaccgtgcagatccgcggtcaacccgtcaaccagaagacgtcttgctgctcatcctaaggttgcctgatttttttttgtactttgtgtaaactcaaacacacaactactaccttttgtgtgcgcttgcaaatgtatttgcattattttcagaagacgctgctgatagcatctattcattgatcggacgattagggctagcttgtcgaactccatttttccaagggatttctatttttctaagagaaattatttttattttttcttaaaaaaataagattttttttggaaaaatggagttaccaaactagctattagggagctgcaaatatgtaagcaggtacttggtgcactctcgactttccattcctttctaccctatcatacagcttcaccgtttataagccacgaattgcatttgtgaacaaccctctgatttggttttggtgattcaggataatatgatgtgacttttgcagtatgtttgtttggctttaatcggtacttgtttctttgtttttgtctttatggaatatagctgcaacagttcgatcaactggctttctttgtttttgtctttatggaatatagctgcaacagttcgatcaactggctttaatccgaagaatagtctataagctttgtttgtttgttcgaaaagctagaagaccaaaaa

SEQ ID NO: 50921 - DNA, 1392 bp, Zea Mays
ctcgtctccaccgtcgtgaacacatcctcgttcgactgccacagtgccactacactacagtctacagctcctcctcgtcattgcatccacagcggctctccttcacctcgagggcctacaagaatcgaccttgcctccgtcaccttgcagcgaaggaacacgcacatgtaccgtgtggtcaaagaaagcctccagcgactaccttttcaaacttctgcttattggtgattctggtgttgggaaatcatgcttgcttctcagatttgcggatgattcatatttggacagctacatcagcacaattggggttgattttaaaattcggacagtagagcaagatgggaagaccataaaacttcaaatttgggatactgctgggcaagagcgcttcaggaccatcactagcagctactaccgtggagctcatggaatcattattgtatatgacgtgacagaccaagaaagcttcaataatgtgaagcaatggttaaatgaaattgatcgttatgcaagtgacaatgttaacaagctccttgttgggaacaagagcgacctaactgccaacaaagttgtggcaactgagacagcaaaggcatttgctgatgagatgggcatcccgttcatggagacgagtgccaaaaacgccaccaacgtggagcaggccttcatggctatggctgcatccatcaaggacaggatggccagccaaccagccgcggccaacgcaaggccagcgacggtgcagatccgcgggcaacccgtcaaccagaagacgtcttgctgctcgtcttaagcttgcctgatttctctggttccttgtgactattactaccgtttgtgcgagcatgcaaatgtatttgttgcattattgctgatagcatctgttcgttggccagatgagtagagagctgaaaaaatgttaagaacaccatagagagaagtctatccgtgctctctcaacttaaggagcaaacagcaagacttcattttttttctactttactgtttattagtcgcgttacatttgtgaacagttattgtaatgtctttttttttaactctgtattcgtagtgagatgaaatgcgtgtgtgggcaacaaatttcctttttggctagttgagtggtcttatcattgtgcccggtgacggtgacggtgcctctgtcctgtggccttgcaatggtctgtgggcttcgagtgggtgtgatactgatacgccctctagtgcgtttttgacatggagaagaacgccgcttggcccaccaccaccgccaattgctgtgtcctctgtggtgtgtcagcgcgagataacgtttgacaggcgaagcgatgttggggcacatgcgcaccaccgctgatcgtgaggcactgaaaatttcaaaaaaaaaaaaaa

SEQ ID NO: 50922 - DNA, 1330 bp, Zea Mays
ggctcaaagacgtcctttcgcagttggcacacatcagagtcctaccaagtggcaccaaagctcgttctcccgaccccgactgtccccaatgcgcagtccgcgaggcctcctcaccgcctccggctaccttgcgggccggcacgctccgtcgccctccgtgtccaccactggccacaactccctactcgctcgcaccttccaaatcctagcccagccggagtccgtccgtctgcagaagcacccggcacccaactccgagctgaggctggagcggccggaagtcaagaacgccattaattgggatatgatgaggatgctgcggagcgccatagagaagattcaggccgacacgacggcgaaggtcgtccttgttgcgagctccgtgccgggggctttctctgcaggcgccgatctcaaggaaaggaggctaatgagttcttctgacgttggggggtatgctagatccttgaggtctacattttcgtcttttgaggcacttcctattccaacaattgctgtcattgaaggagctgcccttggtggtgggctagaactggctttggcgtgcgatcttcgaatatgtggagaaaatgctgaacttggactgccagaaacaagccttgctattatacctggagctggtggtacgcaacgccttcctaggatcatagggaggtccagagcaaaggaactgatattcactggccgcagatgtggtgcagctgaagctgtaacgatggggttagcaaactattgtgttccagcaggagaggcttaccagaaggctcttgacattgcctgtgagataacccagaagggtcccatggggataagaatggcaaagaaggcgatcaatgagggggcagaggttgccgacatgtcctcggcgctggctatcgaaggggagtgctacgagcagctgctttacacgcaggatcgcgttgaggccctagctgcatttgctgagaagaggaagcctgtgtacacaggaaagtagtagtgtcagaaaggatgataatcgtcttgagagtctgctacaagcagagatggtggcaatggataccccaaatccatacatccaatagccgggtgtggaataaattctttatcatagatacgttaatgggtacaatattatacccatcagtagacgggtgcaagatggatgcgggtatagatatatattagctatctatgggtaatttttacccacctcatctatatatataatctactcaattaagtacatataaatatatattagctaaaaataaaatcaacttacatatctctacaacactaattgttttcttcttttattctctcatat

SEQ ID NO: 50923 - DNA, 1447 bp, Zea Mays
ctcaaagacgtcctttcgcagttggcacacatcagagtcctaccaagtggcaccaaagctcgttctcccgaccccgactgtccccaatgcgcagtccgcgaggcctcctcaccgcctccggctaccttgcgggccggcacgctccgtcgccctccgtgtccaccactggccacaactccctactcgctcgcaccttccaaatcctagcccagccggagtccgtccgtctgcagaagcacccggcacccaactccgggatcttagagctgaggctggagcggccggaagtcaagaacgccattaattgggatatgatgaggatgctgcggagcgccatagagaagattcaggccgacacgacggcgaaggtcgtccttgttgcgagctccgtgccgggggctttctctgcaggcgccgatctcaagattcaattgttaaaaggaaaaggaatggttggagtgctgtgaagtggagtgcggaaaagaaagactcgtggctaaaaaagccagcacatagaagagtcaggtatcttgaggaaaggaggctaatgagttcttctgacgttggggggtatgctagatccttgaggtctacattttcgtcttttgaggcacttcctattccaacaattgctgtcattgaaggagctgcccttggtggtgggctagaactggctttggcgtgcgatcttcgaatatgtggagaaaatgctgaacttggactgccagaaacaagccttgctattatacctggagctggtggtacgcaacgccttcctaggatcatagggaggtccagagcaaaggaactgatattcactggccgcagatgtggtgcagctgaagctgtaacgatggggttagcaaactattgtgttccagcaggagaggcttaccagaaggctcttgacattgcctgtgagataacccagaagggtcccatggggataagaatggcaaagaaggcgatcaatgagggggcagaggttgccgacatgtcctcggcgctggctatcgaaggggagtgctacgagcagctgctttacacgcaggatcgcgttgaggccctagctgcatttgctgagaagaggaagcctgtgtacacaggaaagtagtagtgtcagaaaggatgataatcgtcttgagagtctgctacaagcagagatggtggcaatggataccccaaatccatacatccaatagccgggtgtggaataaattctttatcatagatacgttaatgggtacaatattatacccatcagtagacgggtgcaagatggatgcgggtatagatatatattagctatctatgggtaatttttacccacctcatctatatatataatctactcaattaagtacatataaatatatattagctaaaaataaaatcaacttacatatctctacaacactaattgttttcttcttttattctctcatat

SEQ ID NO: 50924 - DNA, 1425 bp, Zea Mays
ctcaaagacgtcctttcgcagttggcacacatcagagtcctaccaagtggcaccaaagctcgttctcccgaccccgactgtccccaatgcgcagtccgcgaggcctcctcaccgcctccggctaccttgcgggccggcacgctccgtcgccctccgtgtccaccactggccacaactccctactcgctcgcaccttccaaatcctagcccagccggagtccgtccgtctgcagaagcacccggcacccaactccgggatcttagagctgaggctggagcggccggaagtcaagaacgccattaattgggatatgatgaggatgctgcggagcgccatagagaagattcaggccgacacgacggcgaaggtcgtccttgttgcgagctccgtgccgggggctttctctgcaggcgccgatctcaaggaaaggaggctaatgagttcttctgacgttggggggtatgctagatccttgaggtctacattttcgtcttttgaggcacttcctattccaacaattgctgtcattgaaggagctgcccttggtggtgggctagaactggctttggcgtgcgatcttcgaatatgtggagaaaatgctgaacttggactgccagaaacaagccttgctattatacctggagctggtggtacgcaacgccttcctaggatcatagggaggtccagagcaaaggaactgatattcactggccgcagatgtggtgcagctgaagctgtaacgatggggttagcaaactattgtgttccagcaggagaggcttaccagaaggctcttgacattgcctgtgagataacccagaaggattgttgaggaatgtcggctttggaggtgggctggggcctccaaattgcaagacttcctggtctgggtacgagctacgaatgtgtagggtcccatggggataagaatggcaaagaaggcgatcaatgagggggcagaggttgccgacatgtcctcggcgctggctatcgaaggggagtgctacgagcagctgctttacacgcaggatcgcgttgaggccctagctgcatttgctgagaagaggaagcctgtgtacacaggaaagtagtagtgtcagaaaggatgataatcgtcttgagagtctgctacaagcagagatggtggcaatggataccccaaatccatacatccaatagccgggtgtggaataaattctttatcatagatacgttaatgggtacaatattatacccatcagtagacgggtgcaagatggatgcgggtatagatatatattagctatctatgggtaatttttacccacctcatctatatatataatctactcaattaagtacatataaatatatattagctaaaaataaaatcaacttacatatctctacaacactaattgttttcttcttttattctctcatat

SEQ ID NO: 50925 - DNA, 936 bp, Zea Mays
gtcccacagtcccaccaaactcaggaaaggaggctaatgagttcttctgacgttggggggtatgctagatccttgaggtctacattttcgtcttttgaggcacttcctattccaacaattgctgtcattgaaggagctgcccttggtggtgggctagaactggctttggcgtgcgatcttcgaatatgtggagaaaatgctgaacttggactgccagaaacaagccttgctattatacctggagctggtggtacgcaacgccttcctaggatcatagggaggtccagagcaaaggaactgatattcactggccgcagatgtggtgcagctgaagctgtaacgatggggttagcaaactattgtgttccagcaggagaggcttaccagaaggctcttgacattgcctgtgagataacccagaagggtcccatggggataagaatggcaaagaaggcgatcaatgagggggcagaggttgccgacatgtcctcggcgctggctatcgaaggggagtgctacgagcagctgctttacacgcaggatcgcgttgaggccctagctgcatttgctgagaagaggaagcctgtgtacacaggaaagtagtagtgtcagaaaggatgataatcgtcttgagagtctgctacaagcagagatggtggcaatggataccccaaatccatacatccaatagccgggtgtggaataaattctttatcatagatacgttaatgggtacaatattatacccatcagtagacgggtgcaagatggatgcgggtatagatatatattagctatctatgggtaatttttacccacctcatctatatatataatctactcaattaagtacatataaatatatattagctaaaaataaaatcaacttacatatctctacaacactaattgttttcttcttttattctctcatat

SEQ ID NO: 50926 - DNA, 1495 bp, Zea Mays
gtgtcaatccatacgatcgtatctaaagatgccagttgcgtctgtctccctccattcttgcccatctctacctgacacggcgacagatcgtcagttcgtcaccgcccaatcagtctcccagcatttaccggctcctccgcacctgctgctccagttccagctctcccaacaccaacatgctcggcctccggcgcctccccgctgtctccggccgcctcgcgccggaggtcacctccgtctctgcggcctcctcccacagcgccgtcttctttcgcaccctccaaatcctcgtccagcaggggcccgtccgcctccaaaagctctctgctccggacaccgggatcgtggagctgaggctggagcggccggaggccaagaatgccatagggaaggagatgctccaggggctgcggagcgcgatccaggaggtggaggccgacacggctgcaaacgtcgtcttggtgacgagctcggtgcccaaggttttctgcgcgggcgctgatctcaaggaaaggaggttgatgggtcctagtgaagttcgggacttcgttaattccttaaggtctacattttcatcctttgaggcactgtctattcctacaattgctgttgtcgaaggggttgcttttggtggcgggttagaattggctctgtcatgtgatcttcgcatatgtggcaaggatgcaaaattcagtttgccagagactggccttgctattatcccaggtgctggaggaacacagcgccttcctaggattgttggaaggtcaagagcaaaagaactaatattcactggtcgtagattcgatgcggtggaggctgtaactatggggtcatgtatgctcacattgcaggagtagtaaactactgtgttcctgccggcgacgcttatcaaaaggctcttgaacttgcgcgggagataaaccagaaaggcccgttagcagtaaaaatggctaagaaggccatcgatcaaggggcagaggtagacttgccctcagcattggccgttgaagaagaatgctaccagcaagtcctgcacactgaggatcgtcttgagggtctagccgcattcgccgagaaaagaaagcctatatataaagggaagtagggccgtgtatggtcttagattcataataatagaaagtcgcattaacatgccatccaataatagtggcatgattgcatgacattgatatgtgcaaattcatgtctctctgtaactttcaggaaataagataagatgtatcagcgctgctacctatgtgttctgaacgaggtgaatttggctgcggctttagacttaagatagacagattagacagctgggctgattggagtccatttcccttacgaatgtgagatttgagttggacctcaataatcattactgataaaagtaagcccaaataccgctgtgagattgttaaaattagcatcgagacagtgtttaagggcatgcacaatcacattgattctatccatagctcattgattc

SEQ ID NO: 50927 - DNA, 1470 bp, Zea Mays
gtgtcaatccatacgatcgtatctaaagatgccagttgcgtctgtctccctccattcttgcccatctctacctgacacggcgacagatcgtcagttcgtcaccgcccaatcagtctcccagcatttaccggctcctccgcacctgctgctccagttccagctctcccaacaccaacatgctcggcctccggcgcctccccgctgtctccggccgcctcgcgccggaggtcacctccgtctctgcggcctcctcccacagcgccgtcttctttcgcaccctccaaatcctcgtccagcaggggcccgtccgcctccaaaagctctctgctccggacaccggtctggatcgtggagctgaggctggagcggccggaggccaagaatgccatagggaaggagatgctccaggggctgcggagcgcgatccaggaggtggaggccgacacggctgcaaacgtcgtcttggtgacgagctcggtgcccaaggttttctgcgcgggcgctgatctcaaggaaaggaggttgatgggtcctagtgaagttcgggacttcgttaattccttaaggtctacattttcatcctttgaggcactgtctattcctacaattgctgttgtcgaaggggttgcttttggtggcgggttagaattggctctgtcatgtgatcttcgcatatgtggcaaggatgcaaaattcagtttgccagagactggccttgctattatcccaggtgctggaggaacacagcgccttcctaggattgttggaaggtcaagagcaaaagaactaatattcactggtcgtagattcgatgcggtggaggctgtaactatggtaaactactgtgttcctgccggcgacgcttatcaaaaggctcttgaacttgcgcgggagataaaccagaaaggcccgttagcagtaaaaatggctaagaaggccatcgatcaaggggcagaggtagacttgccctcagcattggccgttgaagaagaatgctaccagcaagtcctgcacactgaggatcgtcttgagggtctagccgcattcgccgagaaaagaaagcctatatataaagggaagtagggccgtgtatggtcttagattcataataatagaaagtcgcattaacatgccatccaataatagtggcatgattgcatgacattgatatgtgcaaattcatgtctctctgtaactttcaggaaataagataagatgtatcagcgctgctacctatgtgttctgaacgaggtgaatttggctgcggctttagacttaagatagacagattagacagctgggctgattggagtccatttcccttacgaatgtgagatttgagttggacctcaataatcattactgataaaagtaagcccaaataccgctgtgagattgttaaaattagcatcgagacagtgtttaagggcatgcacaatcacattgattctatccatagctcattgattc

SEQ ID NO: 50928 - DNA, 1685 bp, Zea Mays
gtgtcaatccatacgatcgtatctaaagatgccagttgcgtctgtctccctccattcttgcccatctctacctgacacggcgacagatcgtcagttcgtcaccgcccaatcagtctcccagcatttaccggctcctccgcacctgctgctccagttccagctctcccaacaccaacatgctcggcctccggcgcctccccgctgtctccggccgcctcgcgccggaggtcacctccgtctctgcggcctcctcccacagcgccgtcttctttcgcaccctccaaatcctcgtccagcaggggcccgtccgcctccaaaagctctctgctccggacaccgggatcgtggagctgaggctggagcggccggaggccaagaatgccatagggaaggagatgctccaggggctgcggagcgcgatccaggaggtggaggccgacacggctgcaaacgtcgtcttggtgacgagctcggtgcccaaggttttctgcgcgggcgctgatctcaaggaaaggaggttgatgggtcctagtgaagttcgggacttcgttaattccttaaggtctacattttcatcctttgaggtttgttgcaaaataacaatatattcttctgtttctgtacagttgctctcagatttttggaaatttaggaaatccatggtgatgaaaagtgaaactctagataaagctatccagaccaatgttcatttcgtatgcattctcaattgcattttaactgacaagtgttgcataaactctccaatagatgtaaatttttgtatcatgtttaagcaggcactgtctattcctacaattgctgttgtcgaaggggttgcttttggtggcgggttagaattggctctgtcatgtgatcttcgcatatgtggcaaggatgcaaaattcagtttgccagagactggccttgctattatcccaggtgctggaggaacacagcgccttcctaggattgttggaaggtcaagagcaaaagaactaatattcactggtcgtagattcgatgcggtggaggctgtaactatgggagtagtaaactactgtgttcctgccggcgacgcttatcaaaaggctcttgaacttgcgcgggagataaaccagaaaggcccgttagcagtaaaaatggctaagaaggccatcgatcaaggggcagaggtagacttgccctcagcattggccgttgaagaagaatgctaccagcaagtcctgcacactgaggatcgtcttgagggtctagccgcattcgccgagaaaagaaagcctatatataaagggaagtagggccgtgtatggtcttagattcataataatagaaagtcgcattaacatgccatccaataatagtggcatgattgcatgacattgatatgtgcaaattcatgtctctctgtaactttcaggaaataagataagatgtatcagcgctgctacctatgtgttctgaacgaggtgaatttggctgcggctttagacttaagatagacagattagacagctgggctgattggagtccatttcccttacgaatgtgagatttgagttggacctcaataatcattactgataaaagtaagcccaaataccgctgtgagattgttaaaattagcatcgagacagtgtttaagggcatgcacaatcacattgattctatccatagctcattgattc

SEQ ID NO: 50929 - DNA, 2215 bp, Zea Mays
gtgtcaatccatacgatcgtatctaaagatgccagttgcgtctgtctccctccattcttgcccatctctacctgacacggcgacagatcgtcagttcgtcaccgcccaatcagtctcccagcatttaccggctcctccgcacctgctgctccagttccagctctcccaacaccaacatgctcggcctccggcgcctccccgctgtctccggccgcctcgcgccggaggtcacctccgtctctgcggcctcctcccacagcgccgtcttctttcgcaccctccaaatcctcgtccagcaggggcccgtccgcctccaaaagctctctgctccggacaccgggatcgtggagctgaggctggagcggccggaggccaagaatgccatagggaaggagatgctccaggggctgcggagcgcgatccaggaggtggaggccgacacggctgcaaacgtcgtcttggtgacgagctcggtgcccaaggttttctgcgcgggcgctgatctcaaggaaaggaggttgatgggtcctagtgaagttcgggacttcgttaattccttaaggtctacattttcatcctttgaggtttgttgcaaaataacaatatattcttctgtttctgtacagttgctctcagatttttggaaatttaggaaatccatggtgatgaaaagtgaaactctagataaagctatccagaccaatgttcatttcgtatgcattctcaattgcattttaactgacaagtgttgcataaactctccaatagatgtaaatttttgtatcatgtttaagcaggcactgtctattcctacaattgctgttgtcgaaggggttgcttttggtggcgggttagaattggctctgtcatgtgatcttcgcatatgtggtagtgattttaatctgcatcaatcttatgcttacgggaatagatttggttcgtttctttcaccaaatgaatcatttttattttcaaaatgattcaaggcaaggatgcaaaattcagtttgccagagactggccttgctattatcccagggtatgtcaccaagcctgttctttactttgcaagttctttatacatacttatgatgttttgtctcaaataaagctggaactgcagtagccatgtgaatttatttataactacaagtcaaacctgttcctgctatacaatttccttgccttagtgcatgcattccacccttcataacaatgtttaaaatttcagccttgattctgactttattgaaacataaaggatgttgtatcaatctttatatctgagtggcatatcacggtgaaattaccttgtgaattatttggaggtctagattcaaatgacattttcagcccttgacatccatttgatacaatatacagtgctggaggaacacagcgccttcctaggattgttggaaggtcaagagcaaaagaactaatattcactggtcgtagattcgatgcggtggaggctgtaactatgggtcagtttaacgtcctgagatctgcttcctgctgttacgacttcttcctcaagggcaacttttatcgattctttgaagggtcatgtatgctcacattgcaggagtagtaaactactgtgttcctgccggcgacgcttatcaaaaggctcttgaacttgcgcgggagataaaccagaaataaaaatggctaagaaggccatcgatcaaggggcagaggtagacttgccctcagcattggccgttgaagaagaatgctaccagcaagtcctgcacactgaggatcgtcttgagggtctagccgcattcgccgagaaaagaaagcctatatataaagggaagtagggccgtgtatggtcttagattcataataatagaaagtcgcattaacatgccatccaataatagtggcatgattgcatgacattgatatgtgcaaattcatgtctctctgtaactttcaggaaataagataagatgtatcagcgctgctacctatgtgttctgaacgaggtgaatttggctgcggctttagacttaagatagacagattagacagctgggctgattggagtccatttcccttacgaatgtgagatttgagttggacctcaataatcattactgataaaagtaagcccaaataccgctgtgagattgttaaaattagcatcgagacagtgtttaagggcatgcacaatcacattgattctatccatagctcattgattc

SEQ ID NO: 50930 - DNA, 932 bp, Zea Mays
gtgcgtactgtcttcaggttcaggcccaaccgcccaggtaggcttccaggccgtgcgccgcgtgggcggcatgccggcatggcaaatcggttccgaaccgaatcttaaaaaaatgaatgcccagtctctactcagcctgcgttcgcgccttttccattttcaccccccgattccgatcgcttttcaccgccgcctctgttccttcgctagtcgacaggccccgcttccgctctcctcttccaccggccaccgccgcgcgccgagaagatggggaagcggtggatcccactggaggccaacccggacgtcatgaaccagttcatatggggtctgggagtctccgagagggctgtgcagttctgcgacgtctacggcctggacgacgagctgatcgccttggtgccccatcccgttctcgcagtcctcttcctctacccgttcacctccctggacgaggagaataaagaagaatcaagtgtttctgccaaatcgaccgcagggggcaaggatttgagcaagaaggtatactttacaaagcagactattggcaatgcttgtggaacaattggtgttattcatgcaataggaaatgcaacatctcaaatcaagctagttgagggttcctattttggaaagttctataagcaaacagctgatatggatccagtccagcgtgctgccttccttgaggaagatgatgagatggaggatgcacattctattgctgcatctgctggtgacactaatattaatcttgatgttaatgtacactttgtatgtttctcttgtgttgacggtgaactttacgagcttgatggactaaaatcacaacccacaccccatggcccatcatcacctgaaaccttgttgcagtgtgcgatgtagatggatgaactcaagttatggtgatttggacgtcaagtttttttttg

SEQ ID NO: 50931 - DNA, 1835 bp, Zea Mays
gtgcgtactgtcttcaggttcaggcccaaccgcccaggtaggcttccaggccgtgcgccgcgtgggcggcatgccggcatggcaaatcggttccgaaccgaatcttaaaaaaatgaatgcccagtctctactcagcctgcgttcgcgccttttccattttcaccccccgattccgatcgcttttcaccgccgcctctgttccttcgctagtcgacaggccccgcttccgctctcctcttccaccggccaccgccgcgcgccgagaagatggggaagcggtggatcccactggaggccaacccggacgtcatgaaccagttcatatggggtctgggagtctccgagagggctgtgcagttctgcgacgtctacggcctggacgacgagctgatcgccttggtgccccatcccgttctcgcagtcctcttcctctacccgttcacctccctggacgaggagaataaagaagaatcaagtgtttctgccaaatcgaccgcagggggcaaggatttgagcaagaaggtatactttacaaagcagactattggcaatgcttgtggaacaattggtgttattcatgcaataggaaatgcaacatctcaaatcaagctaggtacttctcttatttgcagttgagggttcctattttggaaagttctataagcaaacagctgatatggatccagtccagcgtgctgccttccttgaggaagatgatgagatggaggatgcacattctattgctgcatctgctggtgacactaatattaatcttgatgttaatgtacactttgtatgtttctcttgtgttgacggtgaactttacgagcttgatggactaaaatcacaacccacaccccatggcccatcatcacctgaaaccttgttgcaggatgctgcagaagtcatcaaagctagaattgcggagaaccctaactcgatgaacttcaatgtcatggccctttcaaagaagtgaagtatactgtgatgggtggatttcatttggcagaatacgggtcccttttcttttcagttctgctgagtactgcaccgagtggaaggtttgcacagggaaacaaagatagggaaaaatgttgactcgatgtattatcgtgccttcttgatggatagagaaatggtggttcacgatttcacctttttcctgcttacttatagctattcaccatgctaagtttcatgatggtttcatgcacatttaataatgtgttatatcatcattttagacgacatggcatagtatttaagataaataagtttcatagataaaattagttttatagggatgaaatcatgtcaactcgtttaaaggtattgaaaatcgtgtgtaatctccattgagattgatttgttttatctttacatattttactttttctattgattatttagttgcagcatttaattggtatgttggtctatgaaatagtgaaatgaaattttgtattgagagacattgtttcattcttaatttcatgacactacactccttgatgatgttacaatgttagaaagagagttatgaaatgcccattgggattagcctcagtggttgtcgaatgaagacttttgcataggatgagtttctctttgttttatctgaacgattgcagcttcctccgcaaattctatgttttccgtgcaaatgtatgcagttttgtatgcattgacaaaggctaacaacacagccaaaaacactacgacaagtcgataatgttgtcttgtgccttattctacgttctctatttgtattttgtattgtatgtataggtcctgaaaacaagaaaaacaaattgcaaacgcaaggaagaacgagc

SEQ ID NO: 50932 - DNA, 1682 bp, Zea Mays
gtgcgtactgtcttcaggttcaggcccaaccgcccaggtaggcttccaggccgtgcgccgcgtgggcggcatgccggcatggcaaatcggttccgaaccgaatcttaaaaaaatgaatgcccagtctctactcagcctgcgttcgcgccttttccattttcaccccccgattccgatcgcttttcaccgccgcctctgttccttcgctagtcgacaggccccgcttccgctctcctcttccaccggccaccgccgcgcgccgagaagatggggaagcggtggatcccactggaggccaacccggacgtcatgaaccagttcatatggggtctgggagtctccgagagggctgtgcagttctgcgacgtctacggcctggacgacgagctgatcgccttggtgccccatcccgttctcgcagtcctcttcctctacccgttcacctccctggacgaggagaataaagaagaatcaagtgtttctgccaaatcgaccgcagggggcaaggatttgagcaagaaggtatactttacaaagcagactattggcaatgcttgtggaacaattggtgttattcatgcaataggaaatgcaacatctcaaatcaagctagattaatcttgatgttaatgtacactttgtatgtttctcttgtgttgacggtgaactttacgagcttgatggactaaaatcacaacccacaccccatggcccatcatcacctgaaaccttgttgcaggatgctgcagaagtcatcaaagctagaattgcggagaaccctaactcgatgaacttcaatgtcatggccctttcaaagaagtgaagtatactgtgatgggtggatttcatttggcagaatacgggtcccttttcttttcagttctgctgagtactgcaccgagtggaaggtttgcacagggaaacaaagatagggaaaaatgttgactcgatgtattatcgtgccttcttgatggatagagaaatggtggttcacgatttcacctttttcctgcttacttatagctattcaccatgctaagtttcatgatggtttcatgcacatttaataatgtgttatatcatcattttagacgacatggcatagtatttaagataaataagtttcatagataaaattagttttatagggatgaaatcatgtcaactcgtttaaaggtattgaaaatcgtgtgtaatctccattgagattgatttgttttatctttacatattttactttttctattgattatttagttgcagcatttaattggtatgttggtctatgaaatagtgaaatgaaattttgtattgagagacattgtttcattcttaatttcatgacactacactccttgatgatgttacaatgttagaaagagagttatgaaatgcccattgggattagcctcagtggttgtcgaatgaagacttttgcataggatgagtttctctttgttttatctgaacgattgcagcttcctccgcaaattctatgttttccgtgcaaatgtatgcagttttgtatgcattgacaaaggctaacaacacagccaaaaacactacgacaagtcgataatgttgtcttgtgccttattctacgttctctatttgtattttgtattgtatgtataggtcctgaaaacaagaaaaacaaattgcaaacgcaaggaagaacgagc

SEQ ID NO: 50933 - DNA, 2055 bp, Zea Mays
gtgcgtactgtcttcaggttcaggcccaaccgcccaggtaggcttccaggccgtgcgccgcgtgggcggcatgccggcatggcaaatcggttccgaaccgaatcttaaaaaaatgaatgcccagtctctactcagcctgcgttcgcgccttttccattttcaccccccgattccgatcgcttttcaccgccgcctctgttccttcgctagtcgacaggccccgcttccgctctcctcttccaccggccaccgccgcgcgccgagaagatggggaagcggtggatcccactggaggccaacccggacgtcatgaaccagttcatatggggtctgggagtctccgagagggctgtgcagttctgcgacgtctacggcctggacgacgagctgatcgccttggtgccccatcccgttctcgcagtcctcttcctctacccgttcacctccctggacgaggagaataaagaagaatcaagtgtttctgccaaatcgaccgcagggggcaaggatttgagcaagaaggtatactttacaaagcagactattggcaatgcttgtggaacaattggtgttattcatgcaataggaaatgcaacatctcaaatcaagctagttgagggttcctattttggaaagttctataagcaaacagctgatatggatccagtccagcgtgctgccttccttgaggaagatgatgagatggaggatgcacattctattgctgcatctgctggtgacactaatgtgaactttacgagcttgatggactaaaatcacaacccacaccccatggcccatcatcacctgaaaccttgttgcaggatgctgcagaagtcatcaaagctagaattgcggagaaccctaactcgatgaacttcaatgtcatggccctttcaaagaagtgaagtatactgtgatgggtggatttcatttggcagaatacgggtcccttttcttttcagttctgctgagtactgcaccgagtggaaggtttgcacagggaaacaaagatagggaaaaatgttgactcgatgtattatcgtgccttcttgatggatagagaaatggtggttcacgatttcacctttttcctgcttacttatagcatctccaagagactagctaaatagtttgtcaagctaaattttagctacttaataacataataactctccaacagagtagctatttaactcgctaagctatctggctctctaaattaactccctcactagtcaaatttggctagcaactctcgctagccaagctaaattgtattttggaaagtctgttggaatgagatgttatatatatagtttaatatttatggagagacaaataaagagttaaatagaaagtcaaaaataaagagtctcttggagatgttcttaggctattcaccatgctaagtttcatgatggtttcatgcacatttaataatgtgttatatcatcattttagacgacatggcatagtatttaagataaataagtttcatagataaaattagttttatagggatgaaatcatgtcaactcgtttaaaggtattgaaaatcgtgtgtaatctccattgagattgatttgttttatctttacatattttactttttctattgattatttagttgcagcatttaattggtatgttggtctatgaaatagtgaaatgaaattttgtattgagagacattgtttcattcttaatttcatgacactacactccttgatgatgttacaatgttagaaagagagttatgaaatgcccattgggattagcctcagtggttgtcgaatgaagacttttgcataggatgagtttctctttgttttatctgaacgattgcagcttcctccgcaaattctatgttttccgtgcaaatgtatgcagttttgtatgcattgacaaaggctaacaacacagccaaaaacactacgacaagtcgataatgttgtcttgtgccttattctacgttctctatttgtattttgtattgtatgtataggtcctgaaaacaagaaaaacaaattgcaaacgcaaggaagaacgagc

SEQ ID NO: 50934 - DNA, 2123 bp, Zea Mays
gtgcgtactgtcttcaggttcaggcccaaccgcccaggtaggcttccaggccgtgcgccgcgtgggcggcatgccggcatggcaaatcggttccgaaccgaatcttaaaaaaatgaatgcccagtctctactcagcctgcgttcgcgccttttccattttcaccccccgattccgatcgcttttcaccgccgcctctgttccttcgctagtcgacaggccccgcttccgctctcctcttccaccggccaccgccgcgcgccgagaagatggggaagcggtggatcccactggaggccaacccggacgtcatgaaccagttcatatggggtctgggagtctccgagagggctgtgcagttctgcgacgtctacggcctggacgacgagctgatcgccttggtgccccatcccgttctcgcagtcctcttcctctacccgttcacctccctggacgaggagaataaagaagaatcaagtgtttctgccaaatcgaccgcagggggcaaggatttgagcaagaaggtatactttacaaagcagactattggcaatgcttgtggaacaattggtgttattcatgcaataggaaatgcaacatctcaaatcaagctaggtacttctcttatttgcagttgagggttcctattttggaaagttctataagcaaacagctgatatggatccagtccagcgtgctgccttccttgaggaagatgatgagatggaggatgcacattctattgctgcatctgctggtgacactaatattaatcttgatgttaatgtacactttgtatgtttctcttgtgttgacggtgaactttacgagcttgatggactaaaatcacaacccacaccccatggcccatcatcacctgaaaccttgttgcaggatgctgcagaagtcatcaaagctagaattgcggagaaccctaactcgatgaacttcaatgtcatggccctttcaaagaagtgaagtatactgtgatgggtggatttcatttggcagaatacgggtcccttttcttttcagttctgctgagtactgcaccgagtggaaggtttgcacagggaaacaaagatagggaaaaatgttgactcgatgtattatcgtgccttcttgatggatagagaaatggtggttcacgatttcacctttttcctgcttacttatagcatctccaagagactagctaaatagtttgtcaagctaaattttagctacttaataacataataactctccaacagagtagctatttaactcgctaagctatctggctctctaaattaactccctcactagtcaaatttggctagcaactctcgctagccaagctaaattgtattttggaaagtctgttggaatgagatgttatatatatagtttaatatttatggagagacaaataaagagttaaatagaaagtcaaaaataaagagtctcttggagatgttcttaggctattcaccatgctaagtttcatgatggtttcatgcacatttaataatgtgttatatcatcattttagacgacatggcatagtatttaagataaataagtttcatagataaaattagttttatagggatgaaatcatgtcaactcgtttaaaggtattgaaaatcgtgtgtaatctccattgagattgatttgttttatctttacatattttactttttctattgattatttagttgcagcatttaattggtatgttggtctatgaaatagtgaaatgaaattttgtattgagagacattgtttcattcttaatttcatgacactacactccttgatgatgttacaatgttagaaagagagttatgaaatgcccattgggattagcctcagtggttgtcgaatgaagacttttgcataggatgagtttctctttgttttatctgaacgattgcagcttcctccgcaaattctatgttttccgtgcaaatgtatgcagttttgtatgcattgacaaaggctaacaacacagccaaaaacactacgacaagtcgataatgttgtcttgtgccttattctacgttctctatttgtattttgtattgtatgtataggtcctgaaaacaagaaaaacaaattgcaaacgcaaggaagaacgagc

SEQ ID NO: 50935 - DNA, 2104 bp, Zea Mays
gtgcgtactgtcttcaggttcaggcccaaccgcccaggtaggcttccaggccgtgcgccgcgtgggcggcatgccggcatggcaaatcggttccgaaccgaatcttaaaaaaatgaatgcccagtctctactcagcctgcgttcgcgccttttccattttcaccccccgattccgatcgcttttcaccgccgcctctgttccttcgctagtcgacaggccccgcttccgctctcctcttccaccggccaccgccgcgcgccgagaagatggggaagcggtggatcccactggaggccaacccggacgtcatgaaccagttcatatggggtctgggagtctccgagagggctgtgcagttctgcgacgtctacggcctggacgacgagctgatcgccttggtgccccatcccgttctcgcagtcctcttcctctacccgttcacctccctggacgaggagaataaagaagaatcaagtgtttctgccaaatcgaccgcagggggcaaggatttgagcaagaaggtatactttacaaagcagactattggcaatgcttgtggaacaattggtgttattcatgcaataggaaatgcaacatctcaaatcaagctagttgagggttcctattttggaaagttctataagcaaacagctgatatggatccagtccagcgtgctgccttccttgaggaagatgatgagatggaggatgcacattctattgctgcatctgctggtgacactaatattaatcttgatgttaatgtacactttgtatgtttctcttgtgttgacggtgaactttacgagcttgatggactaaaatcacaacccacaccccatggcccatcatcacctgaaaccttgttgcaggatgctgcagaagtcatcaaagctagaattgcggagaaccctaactcgatgaacttcaatgtcatggccctttcaaagaagtgaagtatactgtgatgggtggatttcatttggcagaatacgggtcccttttcttttcagttctgctgagtactgcaccgagtggaaggtttgcacagggaaacaaagatagggaaaaatgttgactcgatgtattatcgtgccttcttgatggatagagaaatggtggttcacgatttcacctttttcctgcttacttatagcatctccaagagactagctaaatagtttgtcaagctaaattttagctacttaataacataataactctccaacagagtagctatttaactcgctaagctatctggctctctaaattaactccctcactagtcaaatttggctagcaactctcgctagccaagctaaattgtattttggaaagtctgttggaatgagatgttatatatatagtttaatatttatggagagacaaataaagagttaaatagaaagtcaaaaataaagagtctcttggagatgttcttaggctattcaccatgctaagtttcatgatggtttcatgcacatttaataatgtgttatatcatcattttagacgacatggcatagtatttaagataaataagtttcatagataaaattagttttatagggatgaaatcatgtcaactcgtttaaaggtattgaaaatcgtgtgtaatctccattgagattgatttgttttatctttacatattttactttttctattgattatttagttgcagcatttaattggtatgttggtctatgaaatagtgaaatgaaattttgtattgagagacattgtttcattcttaatttcatgacactacactccttgatgatgttacaatgttagaaagagagttatgaaatgcccattgggattagcctcagtggttgtcgaatgaagacttttgcataggatgagtttctctttgttttatctgaacgattgcagcttcctccgcaaattctatgttttccgtgcaaatgtatgcagttttgtatgcattgacaaaggctaacaacacagccaaaaacactacgacaagtcgataatgttgtcttgtgccttattctacgttctctatttgtattttgtattgtatgtataggtcctgaaaacaagaaaaacaaattgcaaacgcaaggaagaacgagc

SEQ ID NO: 50936 - DNA, 1318 bp, Zea Mays
ataaatataaatggagttctttgtgtcaaatgaacgctagctgaaccctagccggcggatctccgcgggcggcagtcaggagtggaggcgtggtcgcacgggcgaggtcgcaataggagaggctcagagagatggggcggccttacgcggtgaaggggcggaagaagaagcgcaagctcgaggaggcggcggcggcctcggacgctgccccgcccgtcgaagaagcggaggagctgccaccgccagaggtgagaagcggcgaggaaaagagcagcgaggaggatgaggcagcagcgggggaggaggagcacgcggcggcggacgggctcccaatcctacccaggacggttgatgggaagcggcgacccggcgccatcttcgtactcgagagggcctgcctcgaggtcggcaaagtcggcaagactatgcaaattttgaactctgatgatcatgcgaattatttgaggaagcagaatcgcaatcctgcagattataggcctgatatcattcatcaggctctactagcaatatttgatagccctctaactaaggctggaaggttacaggctgtttatgtgagaactgaaaagggcgtattgtttgaaatcaaacctcatgtccgcatgccaagaacctttaaacgtttctgtggtttaatgtcacaattgttgcaaaaactgagcattacggcagttggaaagcgtgagaagcttctcaacgttgttaaaaatcctgtcactcgttatctacctgttggtgcacgcctttcatttagtgctgagaagtcagtcaacttgtttgactatgttgccaaatccaatgacgacgaacctcttgtgtttgtggttggtgccatggcccatggaaagatcgacaaggaatatacagatgattacatacaaatttgcaactaccctctcagtgctgcctgctgtttaaatcggatatgcagtgccctggagcagaagtggaacatccaatgaggaacttttgacaagcatgggaatcttgttttattatatacatcttacatgtacttccctctgcttatgtacaatgtttgaaagttaaaaccaaatgtttcagtgtggcattatgacgtgttttagacatcaattcatggctttaaactggtttgttcagagtcattttagcaaaaactgagtgttctgcatgccaaacttcggttaactcaaacattggtgtcagatcttattcctggtcatctcatgatcggtgccgtagtttaccacgccgatgttagttagctggcctaccccccacccaatgctggctcgttacaatatctttctcataa

SEQ ID NO: 50937 - DNA, 931 bp, Zea Mays
gttagagcacatctagaattgcggtgactatgcaaattttgaactctgatgatcatgcgaattatttgaggaagcagaatcgcaatcctgcagattataggcctgatatcattcatcaggctctactagcaatatttgatagccctctaactaaggctggaaggttacaggctgtttatgtgagaactgaaaagggcgtattgtttgaaatcaaacctcatgtccgcatgccaagaacctttaaacgtttctgtggtttaatgtcacaattgttgcaaaaactgagcattacggcagttggaaagcgtgagaagcttctcaacgttgttaaaaatcctgtcactcgttatctacctgttggtgcacgtaagattggcctttcatttagtgctgagaagtcagtcaacttgtttgactatgttgccaaatccaatgacgacgaacctcttgtgtttgtggttggtgccatggcccatggaaagatcgacaaggaatatacagatgattacatacaaatttgcaactaccctctcagtgctgcctgctgtttaaatcggatatgcagtgccctggagcagaagtggaacatccaatgaggaacttttgacaagcatgggaatcttgttttattatatacatcttacatgtacttccctctgcttatgtacaatgtttgaaagttaaaaccaaatgtttcagtgtggcattatgacgtgttttagacatcaattcatggctttaaactggtttgttcagagtcattttagcaaaaactgagtgttctgcatgccaaacttcggttaactcaaacattggtgtcagatcttattcctggtcatctcatgatcggtgccgtagtttaccacgccgatgttagttagctggcctaccccccacccaatgctggctcgttacaatatctttctcataa

SEQ ID NO: 50938 - DNA, 1935 bp, Zea Mays
cggcgctgcagtctgcacgactctttctccagctgcccattttatggtcgctcgtcaaaaggacggcaagtcggcatacgaatacccgttgaatgaaaccaggtgtcacgatcagttttgttcttgctggagctgcgtgcgtgctcaatgccctgtgctatgctgaactggcgtctcggttgcctgctgtggttgggggagcatacttgtacacgtacgcagcgttcaatgagatcaccgccttcttggtcttcactcagttgatggtggattaccatatcggcgcagcaagcattgctcgcagcttagcaagctactttatcgagttcttggagctaatcccgctcttgaagggccaaattccaagctgggtaggccatggggaggagttttttggtggtgttgtatcaattaacatactggcccccgttcttctcatcatcttaactgcgattctctgctatggtgtcaaagaatcatcagcagtgaacacgtttatgacaacattgaagataatcattgttatagtcattgtatttgctggtgtgtttgaggtggatgtatcaaactggtctccgtttatgccaaatggtttcaaatctgtagtgactggagccacagtagtcttttttgcatatgttggatttgatgcggttgctaattctgctgaggaagccaaaaggccacagagagacctacccattggtatactaggaagccttatagcatgtgtgttgttatacgttgctgtatgcttggtcattactggaatggttccatatacattactcggtgaagatgctcctttggctgaggcttttgctgctaagggcctgaaatttattactgtattgattagtattggagctgttgctggacttacaacaacacttcttgttggcttgtatgttcagtcacgtttgtactttggacttggaagggatgggcttttaccttcagtatttgctgaagtacacccaacaaggcatactcctgtacagtctcagatttgggtcggttgtgttgcagcagtcatggcaggcctctttaatgtgcgtatgctctcacatattctttccgttggcactctgaccggttattcagttgtatcagcttgtgtgatcacactaagatggaatgacaaaggaactagtcgtcgctcccttggaagtatgtcaatttggcaagagggtgttctaagtcttgtcatagttgctctttgtggttttatagtgggactttgctatcgctttaactatgctatagcctttatggttgtagcttttctgatagctgttgctgccagtttcgctctccagtttcgtcaggtctatgtggatccacctggcttttcttgtcctggggtaccgttggttcccattatttctgttttcttcaacatggtcctgtttgctcagctacatgaagaagcgtggtatagatttgtcattcttagtctcatcgctgtgggagtttatgccggctatggtcagtacaatgctgttccttccagctcagaacactctactattggttaccatggcattccttctgaagccgcatgagctatgttcatccccggagttcttcgaacatactgtatggtaccaacatacaccatcgtcaccgaagtttgaacctgttgcttttttttttgatgttttgcacagtgcatactcttgtagttacgcttagtactcctatacctatatctagacagtgaatttcacagcctgtgttgtgcccaccacaccattcgtcaggaagcttgccaagtgcatagaccttgtaaaaatgcaaatgaaaataaagaactgcagctgcattgtttgtaggaactcattgtcatgcactatgtataattctgtgtatattgtgaagagttcatatcaaattgcactgcggccgtcttttgccgttgccctacattcctcg

SEQ ID NO: 50939 - DNA, 2205 bp, Zea Mays
ttttccttccctctgaccgaccgacgcccggccggcggcggggccacgcgcccacgcctctccgcatgacgcaagagccgacgtcactcctcccgatctgggcgcggacgccaacgacgcgacggcccaagtcgcgacgccaccagctccccatcccctcggacgccatggaggaagctcgcgaccacaggctctcctccaccgccggccgccccttcctctctggcttctgcgccgcggcgctccgacgtaagcccctcggcgcccgcgcctccgccgccgccgccgccaccggcgagggccttgtgcggcagctcggcgtcctcgacctcgtgctgctcgggatcggtgcgtccatcggcgccggcatattcgtcgtcactggcaccgtcgcccgcgacgccggcccaggtgtcacgatcagttttgttcttgctggagctgcgtgcgtgctcaatgccctgtgctatgctgaactggcgtctcggttgcctgctgtggttgggggagcatacttgtacacgtacgcagcgttcaatgagatcaccgccttcttggtcttcactcagttgatggtggattaccatatcggcgcagcaagcattgctcgcagcttagcaagctactttatcgagttcttggagctaatcccgctcttgaagggccaaattccaagctgggtaggccatggggaggagttttttggtggtgttgtatcaattaacatactggcccccgttcttctcatcatcttaactgcgattctctgctatggtgtcaaagaatcatcagcagtgaacacgtttatgacaacattgaagataatcattgttatagtcattgtatttgctggtgtgtttgaggtggatgtatcaaactggtctccgtttatgccaaatggtttcaaatctgtagtgactggagccacagtagtcttttttgcatatgttggatttgatgcggttgctaattctgctgaggaagccaaaaggccacagagagacctacccattggtatactaggaagccttatagcatgtgtgttgttatacgttgctgtatgcttggtcattactggaatggttccatatacattactcggtgaagatgctcctttggctgaggcttttgctgctaagggcctgaaatttattactgtattgattagtattggagctgttgctggacttacaacaacacttcttgttggcttgtatgttcagtcacgtttgtactttggacttggaagggatgggcttttaccttcagtatttgctgaagtacacccaacaaggcatactcctgtacagtctcagatttgggtcggttgtgttgcagcagtcatggcaggcctctttaataccggttattcagttgtatcagcttgtgtgatcacactaagatggaatgacaaaggaactagtcgtcgctcccttggaagtatgtcaatttggcaagagggtgttctaagtcttgtcatagttgctctttgtggttttatagtgggactttgctatcgctttaactatgctatagcctttatggttgtagcttttctgatagctgttgctgccagtttcgctctccagtttcgtcaggtctatgtggatccacctggcttttcttgtcctggggtaccgttggttcccattatttctgttttcttcaacatggtcctgtttgctcagctacatgaagaagcgtggtatagatttgtcattcttagtctcatcgctgtgggagtttatgccggctatggtcagtacaatgctgttccttccagctcagaacactctactattggttaccatggcattccttctgaagccgcatgagctatgttcatccccggagttcttcgaacatactgtatggtaccaacatacaccatcgtcaccgaagtttgaacctgttgcttttttttttgatgttttgcacagtgcatactcttgtagttacgcttagtactcctatacctatatctagacagtgaatttcacagcctgtgttgtgcccaccacaccattcgtcaggaagcttgccaagtgcatagaccttgtaaaaatgcaaatgaaaataaagaactgcagctgcattgtttgtaggaactcattgtcatgcactatgtataattctgtgtatattgtgaagagttcatatcaaattgcactgcggccgtcttttgccgttgccctacattcctcg

SEQ ID NO: 50940 - DNA, 1335 bp, Zea Mays
tcttcatgtaacatcattgttagataatcattgttatagtcattgtatttgctggtgtgtttgaggtggatgtatcaaactggtctccgtttatgccaaatggtttcaaatctgtagtgactggagccacagtagtcttttttgcatatgttggatttgatgcggttgctaattctgctgaggaagccaaaaggccacagagagacctacccattggtatactaggaagccttatagcatgtgtgttgttatacgttgctgtatgcttggtcattactggaatggttccatatacattactcggtgaagatgctcctttggctgaggcttttgctgctaagggcctgaaatttattactgtattgattagtattggagctgttgctggacttacaacaacacttcttgttggcttgtatgttcagtcacgtttgtactttggacttggaagggatgggcttttaccttcagtatttgctgaagtacacccaacaaggcatactcctgtacagtctcagatttgggtcggttgtgttgcagcagtcatggcaggcctctttaatgtgcgtatgctctcacatattctttccgttggcactctgaccggttattcagttgtatcagcttgtgtgatcacactaagatggaatgacaaaggaactagtcgtcgctcccttggaacttttctgatagctgttgctgccagtttcgctctccagtttcgtcaggtctatgtggatccacctggcttttcttgtcctggggtaccgttggttcccattatttctgttttcttcaacatggtcctgtttgctcagctacatgaagaagcgtggtatagatttgtcattcttagtctcatcgctgtgggagtttatgccggctatggtcagtacaatgctgttccttccagctcagaacactctactattggttaccatggcattccttctgaagccgcatgagctatgttcatccccggagttcttcgaacatactgtatggtaccaacatacaccatcgtcaccgaagtttgaacctgttgcttttttttttgatgttttgcacagtgcatactcttgtagttacgcttagtactcctatacctatatctagacagtgaatttcacagcctgtgttgtgcccaccacaccattcgtcaggaagcttgccaagtgcatagaccttgtaaaaatgcaaatgaaaataaagaactgcagctgcattgtttgtaggaactcattgtcatgcactatgtataattctgtgtatattgtgaagagttcatatcaaattgcactgcggccgtcttttgccgttgccctacattcctcg

SEQ ID NO: 50941 - DNA, 1795 bp, Zea Mays
ccggtctacgcgccgtacacgcctctacagatccaggcgctcttctgctgcagcgccgcctctcgtcctcccggcgtcatcgtcgccgccctgatctccgcaggccggcgtgtggcggagatccatccgtgcttgaactgactccttccttagctattttccgttcatagcaagtacctattatcaaccatgtttggacgcatgccaaggaagagtagtaacaataccaagtattacgaggttcttggtgtgtctaagaccgcaagtcaggatgagcttaagaaagcatacagaaaagctgccataaaaaaccatcctgataagggtggagaccctgagaagtttaaagagctgtctcaagcttatgatgttcttagtgacccggagaagagggagatctatgaccagtatggagaagatgcccttaaggaaggaatgggaggaggcagcagcagtgatttccatagccctttcgacatttttgagcaactttttccgggttctagcacctttgggggtggtagctcaagaggacgcagacaaaagcgtggtgaagatgtggtgcatactatgaaggtttccttagacgatctgtacaatgggacaaccaagaaactatctttatcgcggagtgctttgtgctccaagtgcaaggggaaaggatccaagagtggggcatcaggaacatgccatggttgtcgtggtgctggaatgagaacaatcacaagacagataggccttggcatgatccaacagatgaacactgtttgccctgaatgcaaaggatcaggtgagatcataagtgacaaggacaaatgcccaagctgtaaaggaaacaaggtagtccaggagaagaaggtgttagaggttcatgtggagaaaggaatgcaacataaccaaaagattgtattccagggtcaagctgatgaagctcctgatacggttacaggagacattgtttttgtcttgcaacttaaagaccatccaaaatttaagaggatgtacgatgacttatatgttgagcacacaatctctctcaccgaagcattgtgtggcttccagtttgttcttactcatcttgatgggcgacagcttctgatcaaatctgaccccggggaggttattaaaccaggtcaacacaaggccattaacgatgaaggtatgcctcagcatggccgtcctttcatgaagggccgtctgtttgttgaattcaacgtggtgtttcccgagcctggtgcgctctcccctgcccagtgccgatcgttggagaagatccttccgccgaaaccagggagccaactgtcggacatggagctggaccagtgcgaggagaccacccttcacgatgtcaacattgaagaggagatgaggcgcaggcagcagcagaagaagcaggaagcctacgatgaagacgaggaggaggatgctcaaccaagggtgcaatgtgcccagcagtaaaatccgtgttcgttggaactgttctccaaaagtttcagcaggattttttatccatctgatcatctcgattctttttggcaaaaatataatcgttttataaactttaaactgttagttccatcctagtgtcagggaaaaaatgagagcccggaatggcatgttccttgtttgaactgcaatgcgtgattggtgttagttaagctctgctccatgttattttgttgtacccgtgaaaaaggtatcatgttcatggtgtgctactatttttgatgtgtaagaaacattgagcttgctggtagtgatgatttgtgatgcaccctggggtgctggctcaaaa

SEQ ID NO: 50942 - DNA, 1730 bp, Zea Mays
acacgcctctacagatccaggcgctcttctgctgcagcgccgcctctcgtcctcccggcgtcatcgtcgccgccctgatctccgcaggccggcgtgtggcggagatccatccgtgcttgaactgactccttccttagctacaagtacctattatcaaccatgtttggacgcatgccaaggaagagtagtaacaataccaagtattacgaggttcttggtgtgtctaagaccgcaagtcaggatgagcttaagaaagcatacagaaaagctgccataaaaaaccatcctgataagggtggagaccctgagaagtgacccggagaagagggagatctatgaccagtatggagaagatgcccttaaggaaggaatgggaggaggcagcagcagtgatttccatagccctttcgacatttttgagcaactttttccgggttctagcacctttgggggtggtagctcaagaggacgcagacaaaagcgtggtgaagatgtggtgcatactatgaaggtttccttagacgatctgtacaatgggacaaccaagaaactatctttatcgcggagtgctttgtgctccaagtgcaaggggaaaggatccaagagtggggcatcaggaacatgccatggttgtcgtggtgctggaatgagaacaatcacaagacagataggccttggcatgatccaacagatgaacactgtttgccctgaatgcaaaggatcaggtgagatcataagtgacaaggacaaatgcccaagctgtaaaggaaacaaggtagtccaggagaagaaggtgttagaggttcatgtggagaaaggaatgcaacataaccaaaagattgtattccagggtcaagctgatgaagctcctgatacggttacaggagacattgtttttgtcttgcaacttaaagaccatccaaaatttaagaggatgtacgatgacttatatgttgagcacacaatctctctcaccgaagcattgtgtggcttccagtttgttcttactcatcttgatgggcgacagcttctgatcaaatctgaccccggggaggttattaaaccaggtcaacacaaggccattaacgatgaaggtatgcctcagcatggccgtcctttcatgaagggccgtctgtttgttgaattcaacgtggtgtttcccgagcctggtgcgctctcccctgcccagtgccgatcgttggagaagatccttccgccgaaaccagggagccaactgtcggacatggagctggaccagtgcgaggagaccacccttcacgatgtcaacattgaagaggagatgaggcgcaggcagcagcagaagaagcaggaagcctacgatgaagacgaggaggaggatgctcaaccaagggtgcaatgtgcccagcagtaaaatccgtgttcgttggaactgttctccaaaagtttcagcaggattttttatccatctgatcatctcgattctttttggcaaaaatataatcgttttataaactttaaactgttagttccatcctagtgtcagggaaaaaatgagagcccggaatggcatgttccttgtttgaactgcaatgcgtgattggtgttagttaagctctgctccatgttattttgttgtacccgtgaaaaaggtatcatgttcatggtgtgctactatttttgatgtgtaagaaacattgagcttgctggtagtgatgatttgtgatgcaccctggggtgctggctcaaaa

SEQ ID NO: 50943 - DNA, 1761 bp, Zea Mays
acacgcctctacagatccaggcgctcttctgctgcagcgccgcctctcgtcctcccggcgtcatcgtcgccgccctgatctccgcaggccggcgtgtggcggagatccatccgtgcttgaactgactccttccttagctatacctattatcaaccatgtttggacgcatgccaaggaagagtagtaacaataccaagtattacgaggttcttggtgtgtctaagaccgcaagtcaggatgagcttaagaaagcatacagaaaagctgccataaaaaaccatcctgataagggtggagaccctgagaagtttaaagagctgtctcaagcttatgatgttcttagtgacccggagaagagggagatctatgaccagtatggagaagatgcccttaaggaaggaatgggaggaggcagcagcagtgatttccatagccctttcgacatttttgagcaactttttccgggttctagcacctttgggggtggtagctcaagaggacgcagacaaaagcgtggtgaagatgtggtgcatactatgaaggtttccttagacgatctgtacaatgggacaaccaagaaactatctttatcgcggagtgctttgtgctccaagtgcaaggggaaaggatccaagagtggggcatcaggaacatgccatggttgtcgtggtgctggaatgagaacaatcacaagacagataggccttggcatgatccaacagatgaacactgtttgccctgaatgcaaaggatcaggtgagatcataagtgacaaggacaaatgcccaagctgtaaaggaaacaaggtagtccaggagaagaaggtgttagaggttcatgtggagaaaggaatgcaacataaccaaaagattgtattccagggtcaagctgatgaagctcctgatacggttacaggagacattgtttttgtcttgcaacttaaagaccatccaaaatttaagaggatgtacgatgacttatatgttgagcacacaatctctctcaccgaagcattgtgtggcttccagtttgttcttactcatcttgatgggcgacagcttctgatcaaatctgaccccggggaggttattaaaccaggtcaacacaaggccattaacgatgaaggtatgcctcagcatggccgtcctttcatgaagggccgtctgtttgttgaattcaacgtggtgtttcccgagcctggtgcgctctcccctgcccagtgccgatcgttggagaagatccttccgccgaaaccagggagccaactgtcggacatggagctggaccagtgcgaggagaccacccttcacgatgtcaacattgaagaggagatgaggcgcaggcagcagcagaagaagcaggaagcctacgatgaagacgaggaggaggatgctcaaccaagggtgcaatgtgcccagcagtaaaatccgtgttcgttggaactgttctccaaaagtttcagcaggattttttatccatctgatcatctcgattctttttggcaaaaatataatcgttttataaactttaaactgttagttccatcctagtgtcagggaaaaaatgagagcccggaatggcatgttccttgtttgaactgcaatgcgtgattggtgttagttaagctctgctccatgttattttgttgtacccgtgaaaaaggtatcatgttcatggtgtgctactatttttgatgtgtaagaaacattgagcttgctggtagtgatgatttgtgatgcaccctggggtgctggctcaaaa

SEQ ID NO: 50944 - DNA, 1662 bp, Zea Mays
cttttggttcgttctgtggaatgatcctttgtttgatcaagtacctattatcaaccatgtttggacgcatgccaaggaagagtagtaacaataccaagtattacgaggttcttggtgtgtctaagaccgcaagtcaggatgagcttaagaaagcatacagaaaagctgccataaaaaaccatcctgataagggtggagaccctgagaagtttaaagagctgtctcaagcttatgatgttcttagtgacccggagaagagggagatctatgaccagtatggagaagatgcccttaaggaaggaatgggaggaggcagcagcagtgatttccatagccctttcgacatttttgagcaactttttccgggttctagcacctttgggggtggtagctcaagaggacgcagacaaaagcgtggtgaagatgtggtgcatactatgaaggtttccttagacgatctgtacaatgggacaaccaagaaactatctttatcgcggagtgctttgtgctccaagtgcaaggggaaaggatccaagagtggggcatcaggaacatgccatggttgtcgtggtgctggaatgagaacaatcacaagacagataggccttggcatgatccaacagatgaacactgtttgccctgaatgcaaaggatcaggtgagatcataagtgacaaggacaaatgcccaagctgtaaaggaaacaaggtagtccaggagaagaaggtgttagaggttcatgtggagaaaggaatgcaacataaccaaaagattgtattccagggtcaagctgatgaagctcctgatacggttacaggagacattgtttttgtcttgcaacttaaagaccatccaaaatttaagaggatgtacgatgacttatatgttgagcacacaatctctctcaccgaagcattgtgtggcttccagtttgttcttactcatcttgatgggcgacagcttctgatcaaatctgaccccggggaggttattaaaccaggtcaacacaaggccattaacgatgaaggtatgcctcagcatggccgtcctttcatgaagggccgtctgtttgttgaattcaacgtggtgtttcccgagcctggtgcgctctcccctgcccagtgccgatcgttggagaagatccttccgccgaaaccagggagccaactgtcggacatggagctggaccagtgcgaggagaccacccttcacgatgtcaacattgaagaggagatgaggcgcaggcagcagcagaagaagcaggaagcctacgatgaagacgaggaggaggatgctcaaccaagggtgcaatgtgcccagcagtaaaatccgtgttcgttggaactgttctccaaaagtttcagcaggattttttatccatctgatcatctcgattctttttggcaaaaatataatcgttttataaactttaaactgttagttccatcctagtgtcagggaaaaaatgagagcccggaatggcatgttccttgtttgaactgcaatgcgtgattggtgttagttaagctctgctccatgttattttgttgtacccgtgaaaaaggtatcatgttcatggtgtgctactatttttgatgtgtaagaaacattgagcttgctggtagtgatgatttgtgatgcaccctggggtgctggctcaaaa

SEQ ID NO: 50945 - DNA, 1663 bp, Zea Mays
aacaaacacaccttagttccttgttttttgtaagtctgcaagtacctattatcaaccatgtttggacgcatgccaaggaagagtagtaacaataccaagtattacgaggttcttggtgtgtctaagaccgcaagtcaggatgagcttaagaaagcatacagaaaagctgccataaaaaaccatcctgataagggtggagaccctgagaagtttaaagagctgtctcaagcttatgatgttcttagtgacccggagaagagggagatctatgaccagtatggagaagatgcccttaaggaaggaatgggaggaggcagcagcagtgatttccatagccctttcgacatttttgagcaactttttccgggttctagcacctttgggggtggtagctcaagaggacgcagacaaaagcgtggtgaagatgtggtgcatactatgaaggtttccttagacgatctgtacaatgggacaaccaagaaactatctttatcgcggagtgctttgtgctccaagtgcaaggggaaaggatccaagagtggggcatcaggaacatgccatggttgtcgtggtgctggaatgagaacaatcacaagacagataggccttggcatgatccaacagatgaacactgtttgccctgaatgcaaaggatcaggtgagatcataagtgacaaggacaaatgcccaagctgtaaaggaaacaaggtagtccaggagaagaaggtgttagaggttcatgtggagaaaggaatgcaacataaccaaaagattgtattccagggtcaagctgatgaagctcctgatacggttacaggagacattgtttttgtcttgcaacttaaagaccatccaaaatttaagaggatgtacgatgacttatatgttgagcacacaatctctctcaccgaagcattgtgtggcttccagtttgttcttactcatcttgatgggcgacagcttctgatcaaatctgaccccggggaggttattaaaccaggtcaacacaaggccattaacgatgaaggtatgcctcagcatggccgtcctttcatgaagggccgtctgtttgttgaattcaacgtggtgtttcccgagcctggtgcgctctcccctgcccagtgccgatcgttggagaagatccttccgccgaaaccagggagccaactgtcggacatggagctggaccagtgcgaggagaccacccttcacgatgtcaacattgaagaggagatgaggcgcaggcagcagcagaagaagcaggaagcctacgatgaagacgaggaggaggatgctcaaccaagggtgcaatgtgcccagcagtaaaatccgtgttcgttggaactgttctccaaaagtttcagcaggattttttatccatctgatcatctcgattctttttggcaaaaatataatcgttttataaactttaaactgttagttccatcctagtgtcagggaaaaaatgagagcccggaatggcatgttccttgtttgaactgcaatgcgtgattggtgttagttaagctctgctccatgttattttgttgtacccgtgaaaaaggtatcatgttcatggtgtgctactatttttgatgtgtaagaaacattgagcttgctggtagtgatgatttgtgatgcaccctggggtgctggctcaaaa

SEQ ID NO: 50946 - DNA, 1172 bp, Zea Mays
gtcaaacccaaaagcttaagctgttacgagaaggaaaggatccaagagtggggcatcaggaacatgccatggttgtcgtggtgctggaatgagaacaatcacaagacagataggccttggcatgatccaacagatgaacactgtttgccctgaatgcaaaggatcaggtgagatcataagtgacaaggacaaatgcccaagctgtaaaggaaacaaggtagtccaggagaagaaggtgttagaggttcatgtggagaaaggaatgcaacataaccaaaagattgtattccagggtcaagctgatgaagctcctgatacggttacaggagacattgtttttgtcttgcaacttaaagaccatccaaaatttaagaggatgtacgatgacttatatgttgagcacacaatctctctcaccgaagcattgtgtggcttccagtttgttcttactcatcttgatgggcgacagcttctgatcaaatctgaccccggggaggttattaaaccaggtcaacacaaggccattaacgatgaaggtatgcctcagcatggccgtcctttcatgaagggccgtctgtttgttgaattcaacgtggtgtttcccgagcctggtgcgctctcccctgcccagtgccgatcgttggagaagatccttccgccgaaaccagggagccaactgtcggacatggagctggaccagtgcgaggagaccacccttcacgatgtcaacattgaagaggagatgaggcgcaggcagcagcagaagaagcaggaagcctacgatgaagacgaggaggaggatgctcaaccaagggtgcaatgtgcccagcagtaaaatccgtgttcgttggaactgttctccaaaagtttcagcaggattttttatccatctgatcatctcgattctttttggcaaaaatataatcgttttataaactttaaactgttagttccatcctagtgtcagggaaaaaatgagagcccggaatggcatgttccttgtttgaactgcaatgcgtgattggtgttagttaagctctgctccatgttattttgttgtacccgtgaaaaaggtatcatgttcatggtgtgctactatttttgatgtgtaagaaacattgagcttgctggtagtgatgatttgtgatgcaccctggggtgctggctcaaaa

SEQ ID NO: 50947 - DNA, 1629 bp, Zea Mays
ataaaatcccctcgctcccgcactctcagctcccacctcaccacaccacgccacactcgcctcgtgccctcgtcctcacacagtcacagtcctcccccggcagcggctctccgctgccaaccaactccaccaacaccccccacaacagcaggagaaaaaaagggacgagccatggccatggactcttcctcctccggctccgagcccacgtcctcgtcctctgctgaggctcctgcgtccccaaccgcgtcgtcctccgaatcctccgccgcgggcagcaagaagcggcggcgcagcaaggacgggcaccacccgacgtaccgcggcgtgcgcatgcgggcctggggcaagtgggtgtcggagatccgggagccgcgcaagaagtcgcgcatctggctcggcaccttcgccaccgccgagatggcggcgcgcgcccacgacgtagccgcgctggcgatcaagggccgcgccgcgcacctcaacttcccggagctcgcgaacgatctgccccgcccggccaccgccgcgcccaaggacgtccaggccgccgccgcgctcgccgcggccgcggacttccaggcgcccgccaatgcagccgccgccacggaccccgacgacggcccggccgccgccgccgactccgcgtccgcctcgccgccgccgccgccgccacagctggacaaccccgacgacgctctgttcgacctccccgacctcctcctcgacctcagacacggggcctcgtcgtgccagctctcgtgcgcgccgtcgtggtacgacgacgcgtgcttctccggcgccggcgccggcgccggcgcgttgttccgcctggaggagccgctgctgtgggagtactgagtgcagtgaaatagactgttttgctcagtcgacgagaatcaagcgcggcttcgagctgctgctgcttggtgtgtggccatctacggcctagctatgggctgtaattgcggcggtggaccagagcgcaatcgatgtaaaccatggagcagcgttggagttggaccagctggaatggaaccaaattagagccatttctcctttgcgtctgctcctacagatttagaaagcaaaccacatgtataaaagaaaaatcattcgtcgaccccggccagcacgttcctttcgctccctccagtctggtcgtctgtctttgcttggattgtgggacaagaatatggtgcagcggcaagactagccgcgcatctagctcctttcattctccgttgctcaaaggggttatactgaatctttttttttttgtagttgtagcaggcacactagtgctatatatttaaaggcgttctagtccgattcggactaatgccacacgagacgctttagcgaaagatgatgcaccttttaaattacggccggattcgtccaccgatcatctccagcccagcacgaaataaaaagcgcgcgcacccatcgtcagcgaaagaagcgaagaaattcacccgagcaggccttttcacgtacgcaacaacgacggccccatgcaatgcaatgcaacctgcaccctaaaccaaaagccgtgggtgggatggcgaccggccggagcaaggcgcgcgcgcgcggtcgagagcggcggcgacacggcgcggaaagcgg

SEQ ID NO: 50948 - DNA, 1261 bp, Zea Mays
cgtctgtcttgcttctagtattgattgtgatgtaccagcaccttcatcttctctcctttcaccaaaccatggtatagtgctacttttcatgtaaagtggaaataaagagagtcatgttaaatagaagtttggatttacaggatttagcttatcataaacaacaattgtatcttctgatatgtactcatcatcaggcatagaaaaaattttagtaccagcatcattactccaactgttccccatcgtagttcccctatcatactcaagttgcaatccaacttttaggtatacaacatcctccttaggtattttttgtgttccttactcttctcatctactttcaattgaaccaggggagacatcctaccccttagattcttcatagtagtagagatgttatcccaatcaatttctcttgtagtagagtatatttgacagaagttgagccattgctgggtagctcatcttattatcattgtgttcatagaactgaaaaggtgaaaatgcaaaaaagcatcacaaacctatactaatatggttcaaggtgacacaacacttactcacattattctagctagctatattatcaatgtagtcatgatcaaaactaaataatacatagctattgaaaacaccatttaggaaatggtggtccttgaataatacatagctatgccaacagatcctagtgacttgcagatgaggaagtatggtcttgaaataacagtctgtcagtgtttatatacgtatggtaatgggacctttgccgacagtaacaattacaagagaacaaaatacactatttgtttggtttggctccagtagtacttcctcattacattacattacactgtttggtttgaatcagacaaacataatcaacaaagccaacaaaaatacattacattgtttggtccgcaggcatgaataatacaagttactaaaaatgtcatttaggtcaagtgaattatgtattcatgacccacatacaaggaatcattaaatataagaacgtattctttacaaatatcaatcatgatcccatcacacattttactatgcttttaaatgactcggatgaaatgattaactgaagtctagaaaaaccataacagaaatatgcatcatccattgcaaaagcacaatatttacatactaattaccatttgaagcctcccaaaaatgatttgatgaagaaacttaagctcaacaagtattttatttgatattctctttgcaactgcaaacattttcaggtctg

SEQ ID NO: 50949 - DNA, 459 bp, Zea Mays
cctctggttctcaaggcggagggagggcgtggatgaagaaggagcttgccacctgcggagctcgaacctttggttcttgggggccgattggcggccgcggcggcagttgcaaggggacgattagcgggcgggggtggagcgcatcccgggcggcggcaattgcgttgagggacggtggagacatcaagcaggaggcttaggaaataacgctcagtggttttcctctccctcggtgacgcacgctcgacctcggcgccgcacgctcgacctcgacgccacacgctcttctatgcgctgaatcaggcgaggttgaggtcgtgcgtgcgtaagtggcggagctggcagagcggttgaggtcgtggtcatgggggaggaggtcgaggtcgtgggcagagtgcggcgcgccgtcgtggagtggagggcaccgcccacatcgaagaagatgacaggcgcggtagg

SEQ ID NO: 50950 - DNA, 738 bp, Zea Mays
cgccactgccacccatctgcccggtcgccgaaacctagctcctctcaaagtctcgattctcctcgctcctcggccctcgcccacctctcgctagtcgctccccacttcccagtctctgtggccggacgccgcggcgagatggcctcgacctgcttccgcgccgccgcccgcgtggcctccgccgccagtcgctcggcggcggcctaccgctccgctccctccgcggcacgcgccggtgccggtggagctcgggtgctgcgcgggattgtcactgctgccgctgcacagtgcggtggcgtcagccaggctgacgtcgcggctgagcacggcgtcgagctgccgtgctctctctcagcatgaaaatgatggtacgtgaaacatttgcccagtgccttaagagatgggtcaatccgttcgaaggtgataaatggtcaaatggatggacgacctgctcatgtcatgctatcggactgaaatgatttatgtagagtagttatcgaattgaacatctggagcatgacttttcattacccgatctacaatcatggattttttttttcaaggtttgagttcgtgcctcctggtatccatgaaaaaaaaaacatgaagcacggtttgccgacgtctgggttatattcgtccagtgcaaatccgaatgctatctgtgataataacagcgaggaacaatttaaggtcaccatgtgattttgaaagttgtcgatatgattacgttagtac

SEQ ID NO: 50951 - DNA, 1134 bp, Zea Mays
gccacccatctgcccggtcgccgaaacctagctcctctcaaagtctcgattctcctcgctcctcggccctcgcccacctctcgctagtcgctccccacttcccagtctctgtggccggacgccgcggcgagatggcctcgacctgcttccgcgccgccgcccgcgtggcctccgccgccagtcgctcggcggcggcctaccgctccgctccctccgcggcacgcgccggtgccggtggagctcgggtgctgcgcgggattgtcactgctgccgctgcacagtgcggtggcgtcagccaggctgacgtcgcggctgagcacggcgtcgagctgccgtgctctctctcagcgcgctgctgcaggcacatgactttgatagttcttgaaagatattactgggagcttgctgttttgcctcatacaatcatgaagaatgagtactttaacactgaaattgtactggaagactagagttatgttatttacctagaatggctagctacctctgttgaggaataccttgatgcaataatgtggcatcctttttcaacgttttccacattaattgattgtttacttgactcaatatgtctgtttacagtgcttaaattattatttatgcaagtctgctctctctctctcttgcattttttagactcccggttgcatcttggtgcgtgctttctttaatttttgtattcagcagagtttttgccgttgtagtttaccatatgattactcttcttttctcagatgaaaatgatggtacgtgaaacatttgcccagtgccttaagagatgggtcaatccgttcgaaggtgataaatggtcaaatggatggacgacctgctcatgtcatgctatcggactgaaatgatttatgtagagtagttatcgaattgaacatctggagcatgacttttcattacccgatctacaatcatggattttttttttcaaggtttgagttcgtgcctcctggtatccatgaaaaaaaaaacatgaagcacggtttgccgacgtctgggttatattcgtccagtgcaaatccgaatgctatctgtgataataacagcgaggaacaatttaaggtcaccatgtgattttgaaagttgtcgatatgattacgttagtac

SEQ ID NO: 50952 - DNA, 687 bp, Zea Mays
cacccatctgcccggtcgccgaaacctagctcctctcaaagtctcgattctcctcgctcctcggccctcgcccacctctcgctagtcgctccccacttcccagtctctgtggccggacgccgcggcgagatggcctcgacctgcttccgcgccgccgcccgcgtggcctccgccgccagtcgctcggcggcggcctaccgctccgctccctccgcggcacgcgccggtgccggtggagctcgggtgctgcgcgggattgtcactgctgccgctgcacagtgcggtggcgtcagccaggctgacgtcgcggctgagcacggcgtcgagctgccgtgctctctctcagcagatgggtcaatccgttcgaaggtgataaatggtcaaatggatggacgacctgctcatgtcatgctatcggactgaaatgatttatgtagagtagttatcgaattgaacatctggagcatgacttttcattacccgatctacaatcatggattttttttttcaaggtttgagttcgtgcctcctggtatccatgaaaaaaaaaacatgaagcacggtttgccgacgtctgggttatattcgtccagtgcaaatccgaatgctatctgtgataataacagcgaggaacaatttaaggtcaccatgtgattttgaaagttgtcgatatgattacgttagtac

SEQ ID NO: 50953 - DNA, 708 bp, Zea Mays
acccatctgcccggtcgccgaaacctagctcctctcaaagtctcgattctcctcgctcctcggccctcgcccacctctcgctagtcgctccccacttcccagtctctgtggccggacgccgcggcgagatggcctcgacctgcttccgcgccgccgcccgcgtggcctccgccgccagtcgctcggcggcggcctaccgctccgctccctccgcggcacgcgccgtggcaactgccgcccaccgcatatcgtgcttctccagggtgccggtggagctcgggtgctgcgcgggattgtcactgctgccgctgcacagtgcggtggcgtcagccaggctgacgtcgcggctgagcacggcgtcgagctgccgtgctctctctcagcgcgctgctgcaggcacatgactttgatagttcttgaaagatattactgggagcttgctgttttgcctcatacaatcatgaagaatgagtactttaacactgaaattgtactggaagactagagttatgttatttacctagaatggctagctacctctgttgaggaataccttgatgcaataatgtggcatcctttttcaacgttttccacattaattgattgtttacttgactcaatatgtctgtttacagtgcttaaattattatttatgcaagtctgctctctctctctcttgcattttttagactcccggttgcatcttgg

SEQ ID NO: 50954 - DNA, 766 bp, Zea Mays
acccatctgcccggtcgccgaaacctagctcctctcaaagtctcgattctcctcgctcctcggccctcgcccacctctcgctagtcgctccccacttcccagtctctgtggccggacgccgcggcgagatggcctcgacctgcttccgcgccgccgcccgcgtggcctccgccgccagtcgctcggcggcggcctaccgctccgctccctccgcggcacgcgccgtggcaactgccgcccaccgcatatcgtgcttctccagggtgccggtggagctcgggtgctgcgcgggattgtcactgctgccgctgcacagtgcggtggcgtcagccaggctgacgtcgcggctgagcacggcgtcgagctgccgtgctctctctcagcatgaaaatgatggtacgtgaaacatttgcccagtgccttaagagatgggtcaatccgttcgaaggtgataaatggtcaaatggatggacgacctgctcatgtcatgctatcggactgaaatgatttatgtagagtagttatcgaattgaacatctggagcatgacttttcattacccgatctacaatcatggattttttttttcaaggtttgagttcgtgcctcctggtatccatgaaaaaaaaaacatgaagcacggtttgccgacgtctgggttatattcgtccagtgcaaatccgaatgctatctgtgataataacagcgaggaacaatttaaggtcaccatgtgattttgaaagttgtcgatatgattacgttagtac

SEQ ID NO: 50955 - DNA, 1660 bp, Zea Mays
ggaagatttaaatcttgaaggaaactttggccgtgtacatgaatgggtacatctacgggcagcagactcgaaccagacaattacgaactcactgccgtgcaccggcccacctacctcgtagtgatctgcaggctataagtagacggcacaggggcacactttgatagcacacaccagtaccactgcacaaaagcacactctgttcggcttgccttgtcctttttccttgccatatggctaccaagatggtcctgtgtcgctttgtagccctcgcggctgtcgcctgcctcctccgccctggcgcgcccgtcgagctccaccgcaagctctccgggtggtccgacgacgcgggcgcgacgtggtacggcgcagccaccggcgctgggagcgacggtggtgcatgcgggtaccagaacgccgtcgaccagccgccgttctcgtccatgatcgccgccggcagtccatccatcttccagaacggcaagggctgcggcgcctgctatcaggtgaaatgcaccgggcacgcgtcgtgctccggcagcccggtgaccgtggtcctcaccgacgagtgccccggcggcgcgtgcctggacgagcccgtgcacttcgacctgagcggcacggcgttcggagccatggcgaaggacggccaggcggaccagctccgcggcgccggacacctcaagatccagtacactcggtaagctagctagcagcgccgccgcgcccgtaccgcgcgcgcgcgctcagatgcttctaagcagcaggactgtcgtactacggtacgactacctgtgttttgtgtcgtacgcgtgcatctaatcgctttcggcggtgtaccgtcatgtatgccgttggagtattagcttgcctccaaccaacgcacgtagaaaccgtgtgtgacgcatgcagggtgcacgtacgtacaaacattcctgtgtagcaaactaggctttccccgtgcgtctgtactgtacttcttcgcgcttgtccttttgtgccgcccaccacatgtgcatgcgtgcgtgcgtgcagggtgccgtgcaactggcgagggctggacatcgcgttcaaggtggacgccggctcgaacccgaactacttcgcggtgctcatcgagtacgagtccggggacggcgagctggagtccgtggagctcatgcagcgcggcggcggcggcgggggggcgtgggcgccgatgcagcagtcgtggggcgcggtgtggcggtacaactccggcgacaccctgcaggcgcccttctccgtccgcctcacctccggctccggcaggacggtcgtcgccagcaacgtcatccccgcggggtggacgcccggcgccacgtaccgctcggtcgtcaacttcgacaactaacgaggacggacggacggaccgaaataacggcacgcccgcccgcccgcccgccggccggccgccgggatggccgtgaaaggcgtggcgctatagcttttagtttatgattcgagctgtgcgcgggtgcctactatgccgacgacgctactgtactgttgcgtgcgtgacatgtgcaaatccgcgcagtcaccgtgtaccgccggaatggcgtgtgtttctttgaataaaataaaggctggaccggaagcgaacaatggcttgatttttcgctaccagaccaggcgtgcg

SEQ ID NO: 50956 - DNA, 257 bp, Zea Mays
atgaaatctgaaggaaaccctaatctcgtaccttttatctcccccgatccacacgacgacgcatccagacagccgctatgggccgagcgagacgcagaaacccctgaggaccagccgatccagctcgcgcgagaaggagaggcgacgctagcctcgtggcaagcgagaggatgcggcccatggagagcggacgcggcaacgctggccgacggggaacatgaggaagacgacaaaggggacatgaacgctttgtcggg

SEQ ID NO: 50957 - DNA, 886 bp, Zea Mays
atgaaatctgaaggaaaccctaatctcgtaccttttatctcccccgatccacacgacgacgcatccagacagccgctatgggccgagcgagacgcagaaacccctgaggaccagccgatccagctcgcgcgagaaggagaggcgacgctagcctcgtggcaagcgagaggatgcggcccatggagagcggacgcggcaacgctggccgacggggaacatgaggaagacgacaaaggtgtggaggcagttcatcaacggcggagtacctgagaactgatcggagaagaggccggagatagtgtcagtgcaaagtgcatcggctatatatgatgagaaagaagtttaggtggccgcttaggatttgttgtcaaccttttcatgttcagaacaaggaaacatctatatcaggaacccggagaggccttcatagggatggccataaaagtggagctctatgccactttgatattcagaaagtttcgctgcacaaattaagcagaaactgagcaaaacacttgcaaaattaaaacatgtggtcatggctgagtgcagttagcgacttagcctaagcatgcactctctcctgctttgttctttattttggacattagcacggcacgtgtagtagtgcacacttttgacacagtttaggggggtgaaatatatgctggaaaatcgtggtgtcataggaaacatgttacattcattggttgaagtttcaaaaaaagggttgactatagatacagttttacagcaatagagaaagggattagcataattacatgttcccctaatcactgtggccatgtgtgcttgggcccatggctagcttattaatgtattgatgatgagtgttctgacctagctagagttatggtaggtaaac

SEQ ID NO: 50958 - DNA, 4268 bp, Zea Mays
cgccgtaaccaatcattcctcggcctcccaaaccttcatcctttttatgccaaccaaaactccaccctcctctcgagcccgagcccatctgatcctccgattcagttcttctccccctaccaaaaggccgagcccccctcaggcctcagctccgcctccgcgctgccaaccatactcgtcaagccgtcacactttgtctctctcgtgccccgatactctttttctttttttttcttttcttttttttttttttttgcttccgggagcagcaaccgtcgccgtggccccgccttggatattccatcagttttcgggttcttggataggagaaagcggggcgctcaattccccccctcctgatccttgttccttgatcgccgccatgagcaacacgctgcttcgagtctacccttccgacctgaagatgccattcgagctcaggaagcagaactcagcgtgtcttgagctcgtcaacaagaccgaccggtgggtggctttcaaggtcaagacgacgaaccctaggaagtactcggtgcgctctgcctccggtgtcgtgccgcccaggggatcctgtggcatcacaataacgatgcaagcgcccaaggagatgcccccggactaccactgcaaggacaagtttcttgttcagagcattgctgtggaggaggggacgacgcagaaggacattgtccctgacatgttcagtaaagcaccaggtaagttagttgaggagttcaagctgagggtggtctatgtccctgccaatcctccctcaccagtgcctgaggaaacagaggaagaggatggatctcttgattcagatgtggaccatgaagtatccacgtccaactctgcaacaggacaagggaatacatgtagatcacaaacatcagatgatgaggatgattctacatccaagttggaactggaaagaagatatgcagaggaaaacaagaagattcagaaagagctggatctcctccggaaaacaaaggcgtctcctcggggcttctctgcgtttgtgctgcttgtcttcttgttatcctcacttcttggatacctgatgttcggaagcagagcttagcaagttagcagctaatggctgcacatcatttgcggcaccggcagcggcacggctcttttagtacagtcctttaattggcactcaaagttcaagatagcttgctgtagaccatcggctgcacagatgattgatgatgaggtcaactttggtaatatctttgatgcctcagaagaagttcaggttactgcaaagtttggtcccaagcaacggcccaaaacccgaaaaacagctctatcatccagatctgcagcgcctaatcctactgaagaaaccggagataggaaagtaggaaccttcagtcaagtcaattcttctaaagagcttaccagccaagaaaggacatccttgatgtgccctagtactgagtcagttgatattatcgctggttctcatagtattctcgatacaccattggaagatgcattgacagttccccagggttctctgtctggtgcttctgctgcagataggacttctcaatatggtgagcacaatgatgatccttctaagttagctacacaccaagaaaacttggtggtttcagatatcaacgtcccacctaacagttcatgtagcaaggctattgatgatatagttgaatttggggacatgtgtgatgtgcaaattgaagaggaaagagttacaaagttccaaccaaaggtgcaaacgaagctccttaaggaaatagccaaatctcggaagactaaccaaaaggtggaaacttccactgtagatgtggttacacaaaatggaaagggcaataatattcagacaaggctccatggcgatccggtacaggatcctaaaagtcatgaaagtgtgcagatcccagattctgaaggattattagcaactgataatagtaaaggttgcaatttagctaacctcaacaatctccttgaggagtcagtccaagaggaaacaatagctaagtttcgttctgatttgcaaccaaatctcgggaaggcttcatcccaggttgctgcgattaaaattaatgttgttgctgttgctccaatagttggagtttgtgacagcaacaatgacatgtacaaagaacctaaagatcaagaaaccatcactggtccagtggcttggtcaccacaggctgtgcatgctgatgttgatttagacaatcacaatgaaccaattaatcctcctattgatggtactcaatcaatgtttggcgaagtcccaggaagagaaaagggaaaatcaaaatctgtatcttttgctctatcggatgtttctgggatagctagccctatagataccaattctgagatgggtaacatcggcgattcctgtagtgacaaattgactgatgaaaatttaagtaactcatctcgtcatatcgctgaaaagcattctattaccaaggaccaatattcaaatgagcaggaccatgagcgggagccactagatcatgctgttcaacagcaaccaaaatcggatgttggagaaagagcatcatctatgaaacgacgttgcaggaaaaaggtgcaaaaagttgggacacctaatcacactgttgatgattattttggtgaagactgtgtcgaaccttcattagctgaagaagataacgatactggtgatcattacactactggtaataagcataaggctaggaaaaagtcaaggggtggtgtagaagagtcacagcagcagaaagctcaaaaaaataaaagcaaggtgtcttcacggggccgcaaacggaccttgaaggatgaatcgacagagaagcctgagaagaagctaacccacagaatacgtcagaggataccaaaagaggttaaggctttactggaaacacctcgtgagcagataaaacccatgaagctttgtgcatcacatctcaggttgttacaagaagctagagagcgtgttgatccaaaagggattccatccgggccatcctctaatacaagaaactttcaactagatgatatggatgatttgggctacagagatgaggaagctaggttctttgacaacgatataacagaggagcatgtacaaaatgcaacaaaattgaactaccattcctacatgaacaaaccagcccggggaaaatggtcaaaatcagataccgacttgttttatgagggtcttcgacaatttggtagcgattttgcaatgatacaacaattattccctgataagactcgccatcaggtgcggcagaaatttaaatctgaggagagaaaaaatccattgctagtccatgatgctatagttcatcgctcaggagatagtttgtatttcaaaaaggtaattaagcagctgaacattgaagatgttgtgctgccagatattaaaagtacacaaaacaagatggtgcatcaagtgaaagaggccctggaaatgagaatgtactggatgatttaaacgaggaggaaaatagttcaaattggttgaacgaagagcatgacgtacagatggccgatgtggaagaagagcatggcgaacagatggatgatgtggaagaagagcgtgatcttggaaatgatggtggtgatgatgatcttggggatgtttttgattggtactagtttatgttaaacacggatgcgagcgtgaatatgagttggtctagctctgcataacaggggtagtttttaggaaaaaaattctttgcatccggaatgcaaagaatcccttttatgactgatttggtgactaggtatcacagagagattggagtggattgagagcctctaatctctccgtgatcctcttacagcctctaacatccaccacctcgtggtccatataagggcttattcggttattcttgtcccatgtggatttgatgagattggaaaaaatatgaaggattttaacttgttcgagatttaaatctatcaaatctcatcaaatccatatggattgagaggaaagcaaacaagccctaaatagaagaaaaacaaattactattggattaagttataaattttgatctgtttttgtggaccttcaagtggtgtatgtgagtggctgtaaaagagtgtgtttgcatctgggatatacagattttttaccctagtttttagatgttgccacagttgtacggttagaattgttcggctggactatcgcttggacgatcaagatactaggtttcctccaaaaacactgcaatactcgaagagcgatgagtcactagacaacatatccaat

SEQ ID NO: 50959 - DNA, 5153 bp, Zea Mays
gtaaccaatcattcctcggcctcccaaaccttcatcctttttatgccaaccaaaactccaccctcctctcgagcccgagcccatctgatcctccgattcagttcttctccccctaccaaaaggccgagcccccctcaggcctcagctccgcctccgcgctgccaaccatactcgtcaagccgtcacactttgtctctctcgtgccccgatactctttttctttttttttcttttcttttttttttttttttgcttccgggagcagcaaccgtcgccgtggccccgccttggatattccatcagttttcgggttcttggataggagaaagcggggcgctcaattccccccctcctgatccttgttccttgatcgccgccatgagcaacacgctgcttcgagtctacccttccgacctgaagatgccattcgagctcaggaagcagaactcagcgtgtcttgagctcgtcaacaagaccgaccggtgggtggctttcaaggtcaagacgacgaaccctaggaagtactcggtgcgctctgcctccggtgtcgtgccgcccaggggatcctgtggcatcacaataacgatgcaagcgcccaaggagatgcccccggactaccactgcaaggacaagtttcttgttcagagcattgctgtggaggaggggacgacgcagaaggacattgtccctgacatgttcagtaaagcaccaggtaagttagttgaggagttcaagctgagggtggtctatgtccctgccaatcctccctcaccagtgcctgaggaaacagaggaagaggatggatctcttgattcagatgtggaccatgaagtatccacgtccaactctgcaacaggacaagggaatacatgtagatcacaaacatcagatgatgaggatgattctacatccaagttggaactggaaagaagatatgcagaggaaaacaagaagattcagaaagagctggatctcctccggaaaacaaaggcgtctcctcggggcttctctgcgtttgtgctgcttgtcttcttgttatcctcacttcttggatacctgatgttcggaagcagagcttagcaagttagcagctaatggctgcacatcatttgcggcaccggcagcggcacggctcttttagtacagtgtacagatatatacattaatagcgaagtagtcagtacataacagatatatagggctttcttgggtttcaagtgtccataggaatatatcttcagttttgaaatatgtgtgagtaaccgttcatgtttatactctatcatccaaatatatgatgtttactatataataaagctataaaagtgagacaaatcagtgttggagaaagacaaattatggccttgaaactcatggagaaagacaaattatcacgttatttaagttaacacgccaaatttcctctacctaataacattgctattactgtagctgtatgcagaaagtataaacacctaggtgctaggctgagcctcatcgcctagcatttaaaaaaacattgagtatttgctgactgaggtatactttgagagttgggcttagatatgttacagatgatgctaatatatgactttctttgaggggtcctcgtaaaccaatcgggcattgccccaactatccttgattttatttgtctgttctgctgtagccatgtatccattgttgtcgttgagtacctttgccacggtttagttagttatctcactgcgagttgtcctccatcttgaactgtcgttactcacatgtgatgttgtatcatatttttcttcatctatcgctttcgatccttgtaaattattggttccattaaaggctctttgcattggggcattcatttggtagtcatgtatttagttcaaatttatattaagttccagtacgttctggttgaataccccatcttaactctacatgtttaatgatttttatttccttttttgctggtctgattctatgtttgcccccattgctgcttcctaaacctgcaatattcatttcagcctttaattggcactcaaagttcaagatagcttgctgtagaccatcggctgcacagatgattgatgatgaggtcaactttggtaatatctttgatgcctcagaagaagttcaggttactgcaaagtttggtcccaagcaacggcccaaaacccgaaaaacagctctatcatccagatctgcagcgcctaatcctactgaagaaaccggagataggaaagtaggaaccttcagtcaagtcaattcttctaaagagcttaccagccaagaaaggacatccttgatgtgccctagtactgagtcagttgatattatcgctggttctcatagtattctcgatacaccattggaagatgcattgacagttccccagggttctctgtctggtgcttctgctgcagataggacttctcaatatggtgagcacaatgatgatccttctaagttagctacacaccaagaaaacttggtggtttcagatatcaacgtcccacctaacagttcatgtagcaaggctattgatgatatagttgaatttggggacatgtgtgatgtgcaaattgaagaggaaagagttacaaagttccaaccaaaggtgcaaacgaagctccttaaggaaatagccaaatctcggaagactaaccaaaaggtggaaacttccactgtagatgtggttacacaaaatggaaagggcaataatattcagacaaggctccatggcgatccggtacaggatcctaaaagtcatgaaagtgtgcagatcccagattctgaaggattattagcaactgataatagtaaaggttgcaatttagctaacctcaacaatctccttgaggagtcagtccaagaggaaacaatagctaagtttcgttctgatttgcaaccaaatctcgggaaggcttcatcccaggttgctgcgattaaaattaatgttgttgctgttgctccaatagttggagtttgtgacagcaacaatgacatgtacaaagaacctaaagatcaagaaaccatcactggtccagtggcttggtcaccacaggctgtgcatgctgatgttgatttagacaatcacaatgaaccaattaatcctcctattgatggtactcaatcaatgtttggcgaagtcccaggtacagcttttacaggaagagaaaagggaaaatcaaaatctgtatcttttgctctatcggatgtttctgggatagctagccctatagataccaattctgagatgggtaacatcggcgattcctgtagtgacaaattgactgatgaaaatttaagtaactcatctcgtcatatcgctgaaaagcattctattaccaaggaccaatattcaaatgagcaggaccatgagcgggagccactagatcatgctgttcaacagcaaccaaaatcggatgttggagaaagagcatcatctatgaaacgacgttgcaggaaaaaggtgcaaaaagttgggacacctaatcacactgttgatgattattttggtgaagactgtgtcgaaccttcattagctgaagaagataacgatactggtgatcattacactactggtaataagcataaggctaggaaaaagtcaaggggtggtgtagaagagtcacagcagcagaaagctcaaaaaaataaaagcaaggtgtcttcacggggccgcaaacggaccttgaaggatgaatcgacagagaagcctgagaagaagctaacccacagaatacgtcagaggataccaaaagaggttaaggctttactggaaacacctcgtgagcagataaaacccatgaagctttgtgcatcacatctcaggttgttacaagaagctagagagcgtgttgatccaaaagggattccatccgggccatcctctaatacaagaaactttcaactagatgatatggatgatttgggctacagagatgaggaagctaggttctttgacaacgatataacagaggagcatgtacaaaatgcaacaaaattgaactaccattcctacatgaacaaaccagcccggggaaaatggtcaaaatcagataccgacttgttttatgagggtcttcgacaatttggtagcgattttgcaatgatacaacaattattccctgataagactcgccatcaggtgcggcagaaatttaaatctgaggagagaaaaaatccattgctagtccatgatgctatagttcatcgctcaggagatagtttgtatttcaaaaaggtaattaagcagctgaacattgaagatgttgtgctgccagatattaaaagtacacaaaacaagatggtgcatcaagtgaaagaggccctggaaatgagaatgtactggatgatttaaacgaggaggaaaatagttcaaattggttgaacgaagagcatgacgtacagatggccgatgtggaagaagagcatggcgaacagatggatgatgtggaagaagagcgtgatcttggaaatgatggtggtgatgatgatcttggggatgtttttgattggtactagtttatgttaaacacggatgcgagcgtgaatatgagttggtctagctctgcataacaggggtagtttttaggaaaaaaattctttgcatccggaatgcaaagaatcccttttatgactgatttggtgactaggtatcacagagagattggagtggattgagagcctctaatctctccgtgatcctcttacagcctctaacatccaccacctcgtggtccatataagggcttattcggttattcttgtcccatgtggatttgatgagattggaaaaaatatgaaggattttaacttgttcgagatttaaatctatcaaatctcatcaaatccatatggattgagaggaaagcaaacaagccctaaatagaagaaaaacaaattactattggattaagttataaattttgatctgtttttgtggaccttcaagtggtgtatgtgagtggctgtaaaagagtgtgtttgcatctgggatatacagattttttaccctagtttttagatgttgccacagttgtacggttagaattgttcggctggactatcgcttggacgatcaagatactaggtttcctccaaaaacactgcaatactcgaagagcgatgagtcactagacaacatatccaat

SEQ ID NO: 50960 - DNA, 7318 bp, Zea Mays
gtaaccaatcattcctcggcctcccaaaccttcatcctttttatgccaaccaaaactccaccctcctctcgagcccgagcccatctgatcctccgattcagttcttctccccctaccaaaaggccgagcccccctcaggcctcagctccgcctccgcgctgccaaccatactcgtcaagccgtcacactttgtctctctcgtgccccgatactctttttctttttttttcttttcttttttttttttttttgcttccgggagcagcaaccgtcgccgtggccccgccttggatattccatcagttttcgggttcttggataggagaaagcggggcgctcaattccccccctcctgatccttgttccttgatcgccgccatgagcaacacgctgcttcgagtctacccttccgacctgaagatgccattcgagctcaggaagcagaactcagcgtgtcttgagctcgtcaacaagaccgaccggtgggtggctttcaaggtcaagacgacgaaccctaggaagtactcggtgcgctctgcctccggtgtcgtgccgcccaggggatcctgtggcatcacaataacgatgcaagcgcccaaggagatgcccccggactaccactgcaaggacaagtttcttgttcagagcattgctgtggaggaggggacgacgcagaaggacattgtccctgacatgttcagtaaagcaccaggtaagttagttgaggagttcaagctgagggtggtctatgtccctgccaatcctccctcaccagtgcctgaggaaacagaggaagaggatggatctcttgattcagatgtggaccatgaagtatccacgtccaactctgcaacaggacaagggaatacatgtagatcacaaacatcagatgatgaggtgtccctagttccacctaaatatcatttgtctttgtgttccctcagattcataaatatggatcttgtgctgatcacctgctgcatagcatattatcttaaaaggacggatttaacttcggtgttcatggaaatactgtgctctaaaaattcgcagtagtagcctaatttctttcctgctctgacgtcatcctcctctgggcgacacgggcggctccccatcgaccgcacccaccgccgccggtcttcacccccgccgtcgccggagcagctcgccggaagttcgacgagcagcgaggagggcggcggcgggactgctctctcactcatttccctcccttcttccacccactccactcctccctcttcctggaggtggccggcgacctgatccgccgctgggaaggccggatcggcgggctgactggccggatctaggggctggtcgccgtccgccgctcctccctgctggcatgggcaggtggccttgtggccgcaaccatggtggctcgtgcggctagcccgtggcggtagtgcccgcgctcgcgtggccatggccgtggctggccggcgacgttggcgcccacgcacgcggccggcccgctgcggcggcggcgtggctcgcttgtgcttgtagcgtggtgcttggatcgggggcgttggtggatctgcggctgccagcggtgccttctgcaggtggtgggtcatggtcgtggggctgggggccggatcttgagcctctccggctagatttatctctccgcctctcgtttcggcctgtggtgtgggcagggccggctggctccgtgcgttgcggcgtgtggtgggaggtcctgcgacgaaagccatgctcgcttgcaggcggacagcggtgacgcccgcgggcgccacccctaccctatcgagggtgccgtctttggacctctcgccccatgcgggaaccctcgccttggccttcttaggtctctcgctggtgctcgaccggcgttggggctctgagggttggggctggtgggttggtgcgtcggtggacggcagaaggtgacaacacgcgatggcttggcggggtgacatcggcgtggctgacctttcagctttcttcttggtgctggcgatctacactgctctgctaggtcttcagaggaaactttgcttggtttgtaccaggcgggcggcgacgacttttcgacgtcgtttctccttcttgaaggtgcggcccagaagacctgcagtttgtgtgttcgttcgtgttgtggaggctcttcgtcgctccgcttggctcaatggtgtccgtgttgtggaggctcttcgtcactccgcttggctcgatggtgtccgggcctttgtcgctttaggcgtctgctcgctcccggagttcgacgttgtggatctttgctcgtggtgaagaatcggagctgcctcgtgtgggtgtgttgaggcttggcaacgatggcgcgccgcggtcttattccttgcgtcggtgtctgaatgtaagcgtcgtcgagttgctttggcagtgtgcggctcgtcttgggaagtcggagctgctcgtctcttgtgtttgagtttggcaacgatgactctagatgtgtttgtgtgtggggactgtcattgtctaagttgtttgttaggtcgttcgccggtttttctactgtgcgttctgtgtaggttttaggcccgattttccaaaaaactgggtcaattccattcttcttaattgagaggcagagctcctaccatcacgttaaaaaaaatcgcggtagttctttcttcttttttgatgctattgattacactgaatagtttagttttcatgaaattttatcataatacctgcacccctcctcgctcaaccagaaaacacacacaaaaaagaggacagaaaaaacctatcattagaagaaacatgctcctggataactgtaatgtgaacacctttctctttacaagttattgtatcagaatgacatttgacaattgacagatttgattccttacattatttctaccatgattgtcggcaccattagcctaagacgttagaatttcaaatatttgtctatgtctgccctgaatgttatccttgacatgccactgattgttttgtgactcttcaggatgattctacatccaagttggaactggaaagaagatatgcagaggaaaacaagaagattcagaaagagctggatctcctccggaaaacaaaggcgtctcctcggggcttctctgcgtttgtgctgcttgtcttcttgttatcctcacttcttggatacctgatgttcggaagcagagcttagcaagttagcagctaatggctgcacatcatttgcggcaccggcagcggcacggctcttttagtacagtgtacagatatatacattaatagcgaagtagtcagtacataacagatatatagggctttcttgggtttcaagtgtccataggaatatatcttcagttttgaaatatgtgtgagtaaccgttcatgtttatactctatcatccaaatatatgatgtttactatataataaagctataaaagtgagacaaatcagtgttggagaaagacaaattatggccttgaaactcatggagaaagacaaattatcacgttatttaagttaacacgccaaatttcctctacctaataacattgctattactgtagctgtatgcagaaagtataaacacctaggtgctaggctgagcctcatcgcctagcatttaaaaaaacattgagtatttgctgactgaggtatactttgagagttgggcttagatatgttacagatgatgctaatatatgactttctttgaggggtcctcgtaaaccaatcgggcattgccccaactatccttgattttatttgtctgttctgctgtagccatgtatccattgttgtcgttgagtacctttgccacggtttagttagttatctcactgcgagttgtcctccatcttgaactgtcgttactcacatgtgatgttgtatcatatttttcttcatctatcgctttcgatccttgtaaattattggttccattaaaggctctttgcattggggcattcatttggtagtcatgtatttagttcaaatttatattaagttccagtacgttctggttgaataccccatcttaactctacatgtttaatgatttttatttccttttttgctggtctgattctatgtttgcccccattgctgcttcctaaacctgcaatattcatttcagcctttaattggcactcaaagttcaagatagcttgctgtagaccatcggctgcacagatgattgatgatgaggtcaactttggtaatatctttgatgcctcagaagaagttcaggttactgcaaagtttggtcccaagcaacggcccaaaacccgaaaaacagctctatcatccagatctgcagcgcctaatcctactgaagaaaccggagataggaaagtaggaaccttcagtcaagtcaattcttctaaagagcttaccagccaagaaaggacatccttgatgtgccctagtactgagtcagttgatattatcgctggttctcatagtattctcgatacaccattggaagatgcattgacagttccccagggttctctgtctggtgcttctgctgcagataggacttctcaatatggtgagcacaatgatgatccttctaagttagctacacaccaagaaaacttggtggtttcagatatcaacgtcccacctaacagttcatgtagcaaggctattgatgatatagttgaatttggggacatgtgtgatgtgcaaattgaagaggaaagagttacaaagttccaaccaaaggtgcaaacgaagctccttaaggaaatagccaaatctcggaagactaaccaaaaggtggaaacttccactgtagatgtggttacacaaaatggaaagggcaataatattcagacaaggctccatggcgatccggtacaggatcctaaaagtcatgaaagtgtgcagatcccagattctgaaggattattagcaactgataatagtaaaggttgcaatttagctaacctcaacaatctccttgaggagtcagtccaagaggaaacaatagctaagtttcgttctgatttgcaaccaaatctcgggaaggcttcatcccaggttgctgcgattaaaattaatgttgttgctgttgctccaatagttggagtttgtgacagcaacaatgacatgtacaaagaacctaaagatcaagaaaccatcactggtccagtggcttggtcaccacaggctgtgcatgctgatgttgatttagacaatcacaatgaaccaattaatcctcctattgatggtactcaatcaatgtttggcgaagtcccaggaagagaaaagggaaaatcaaaatctgtatcttttgctctatcggatgtttctgggatagctagccctatagataccaattctgagatgggtaacatcggcgattcctgtagtgacaaattgactgatgaaaatttaagtaactcatctcgtcatatcgctgaaaaggtcagtataattctgcttagaagatgtaatgatctatatttacatggctactacaaggtttctccttaatctctttcttttcccctttctttcagcattctattaccaaggaccaatattcaaatgagcaggaccatgagcgggagccactagatcatgctgttcaacagcaaccaaaatcggatgttggagaaagagcatcatctatgaaacgacgttgcaggaaaaaggtgcaaaaagttgggacacctaatcacactgttgatgattattttggtgaagactgtgtcgaaccttcattagctgaagaagataacgatactggtgatcattacactactggtaataagcataaggctaggaaaaagtcaaggggtggtgtagaagagtcacagcagcagaaagctcaaaaaaataaaagcaaggtgtcttcacggggccgcaaacggaccttgaaggatgaatcgacagagaagcctgagaagaagctaacccacagaatacgtcagaggataccaaaagaggttaaggctttactggaaacacctcgtgagcagataaaacccatgaagctttgtgcatcacatctcagccaaaagggattccatccgggccatcctctaatacaagaaactttcaactagatgatatggatgatttgggctacagagatgaggaagctaggttctttgacaacgatataacagaggagcatgtacaaaatgcaacaaaattgaactaccattcctacatgaacaaaccagcccggggaaaatggtcaaaatcagataccgacttgttttatgagggtcttcgacaatttggtagcgattttgcaatgatacaacaattattccctgataagactcgccatcaggtgcggcagaaatttaaatctgaggagagaaaaaatccattgctagtccatgatgctatagttcatcgctcaggagatagtttgtatttcaaaaaggtaattaagcagctgaacattgaagatgttgtgctgccagatattaaaagtacacaaaacaagatggtgcatcaagtgaaagaggccctggaaatgagaatgtactggatgatttaaacgaggaggaaaatagttcaaattggttgaacgaagagcatgacgtacagatggccgatgtggaagaagagcatggcgaacagatggatgatgtggaagaagagcgtgatcttggaaatgatggtggtgatgatgatcttggggatgtttttgattggtactagtttatgttaaacacggatgcgagcgtgaatatgagttggtctagctctgcataacaggggtagtttttaggaaaaaaattctttgcatccggaatgcaaagaatcccttttatgactgatttggtgactaggtatcacagagagattggagtggattgagagcctctaatctctccgtgatcctcttacagcctctaacatccaccacctcgtggtccatataagggcttattcggttattcttgtcccatgtggatttgatgagattggaaaaaatatgaaggattttaacttgttcgagatttaaatctatcaaatctcatcaaatccatatggattgagaggaaagcaaacaagccctaaatagaagaaaaacaaattactattggattaagttataaattttgatctgtttttgtggaccttcaagtggtgtatgtgagtggctgtaaaagagtgtgtttgcatctgggatatacagattttttaccctagtttttagatgttgccacagttgtacggttagaattgttcggctggactatcgcttggacgatcaagatactaggtttcctccaaaaacactgcaatactcgaagagcgatgagtcactagacaacatatccaat

SEQ ID NO: 50961 - DNA, 5143 bp, Zea Mays
caatcattcctcggcctcccaaaccttcatcctttttatgccaaccaaaactccaccctcctctcgagcccgagcccatctgatcctccgattcagttcttctccccctaccaaaaggccgagcccccctcaggcctcagctccgcctccgcgctgccaaccatactcgtcaagccgtcacactttgtctctctcgtgccccgatactctttttctttttttttcttttcttttttttttttttttgcttccgggagcagcaaccgtcgccgtggccccgccttggatattccatcagttttcgggttcttggataggagaaagcggggcgctcaattccccccctcctgatccttgttccttgatcgccgccatgagcaacacgctgcttcgagtctacccttccgacctgaagatgccattcgagctcaggaagcagaactcagcgtgtcttgagctcgtcaacaagaccgaccggtgggtggctttcaaggtcaagacgacgaaccctaggaagtactcggtgcgctctgcctccggtgtcgtgccgcccaggggatcctgtggcatcacaataacgatgcaagcgcccaaggagatgcccccggactaccactgcaaggacaagtttcttgttcagagcattgctgtggaggaggggacgacgcagaaggacattgtccctgacatgtaaagcaccaggtaagttagttgaggagttcaagctgagggtggtctatgtccctgccaatcctccctcaccagtgcctgaggaaacagaggaagaggatggatctcttgattcagatgtggaccatgaagtatccacgtccaactctgcaacaggacaagggaatacatgtagatcacaaacatcagatgatgaggatgattctacatccaagttggaactggaaagaagatatgcagaggaaaacaagaagattcagaaagagctggatctcctccggaaaacaaaggcgtctcctcggggcttctctgcgtttgtgctgcttgtcttcttgttatcctcacttcttggatacctgatgttcggaagcagagcttagcaagttagcagctaatggctgcacatcatttgcggcaccggcagcggcacggctcttttagtacagtgtacagatatatacattaatagcgaagtagtcagtacataacagatatatagggctttcttgggtttcaagtgtccataggaatatatcttcagttttgaaatatgtgtgagtaaccgttcatgtttatactctatcatccaaatatatgatgtttactatataataaagctataaaagtgagacaaatcagtgttggagaaagacaaattatggccttgaaactcatggagaaagacaaattatcacgttatttaagttaacacgccaaatttcctctacctaataacattgctattactgtagctgtatgcagaaagtataaacacctaggtgctaggctgagcctcatcgcctagcatttaaaaaaacattgagtatttgctgactgaggtatactttgagagttgggcttagatatgttacagatgatgctaatatatgactttctttgaggggtcctcgtaaaccaatcgggcattgccccaactatccttgattttatttgtctgttctgctgtagccatgtatccattgttgtcgttgagtacctttgccacggtttagttagttatctcactgcgagttgtcctccatcttgaactgtcgttactcacatgtgatgttgtatcatatttttcttcatctatcgctttcgatccttgtaaattattggttccattaaaggctctttgcattggggcattcatttggtagtcatgtatttagttcaaatttatattaagttccagtacgttctggttgaataccccatcttaactctacatgtttaatgatttttatttccttttttgctggtctgattctatgtttgcccccattgctgcttcctaaacctgcaatattcatttcagcctttaattggcactcaaagttcaagatagcttgctgtagaccatcggctgcacagatgattgatgatgaggtcaactttggtaatatctttgatgcctcagaagaagttcaggttactgcaaagtttggtcccaagcaacggcccaaaacccgaaaaacagctctatcatccagatctgcagcgcctaatcctactgaagaaaccggagataggaaagtaggaaccttcagtcaagtcaattcttctaaagagcttaccagccaagaaaggacatccttgatgtgccctagtactgagtcagttgatattatcgctggttctcatagtattctcgatacaccattggaagatgcattgacagttccccagggttctctgtctggtgcttctgctgcagataggacttctcaatatggtgagcacaatgatgatccttctaagttagctacacaccaagaaaacttggtggtttcagatatcaacgtcccacctaacagttcatgtagcaaggctattgatgatatagttgaatttggggacatgtgtgatgtgcaaattgaagaggaaagagttacaaagttccaaccaaaggtgcaaacgaagctccttaaggaaatagccaaatctcggaagactaaccaaaaggtggaaacttccactgtagatgtggttacacaaaatggaaagggcaataatattcagacaaggctccatggcgatccggtacaggatcctaaaagtcatgaaagtgtgcagatcccagattctgaaggattattagcaactgataatagtaaaggttgcaatttagctaacctcaacaatctccttgaggagtcagtccaagaggaaacaatagctaagtttcgttctgatttgcaaccaaatctcgggaaggcttcatcccaggttgctgcgattaaaattaatgttgttgctgttgctccaatagttggagtttgtgacagcaacaatgacatgtacaaagaacctaaagatcaagaaaccatcactggtccagtggcttggtcaccacaggctgtgcatgctgatgttgatttagacaatcacaatgaaccaattaatcctcctattgatggtactcaatcaatgtttggcgaagtcccaggtacagcttttacaggaagagaaaagggaaaatcaaaatctgtatcttttgctctatcggatgtttctgggatagctagccctatagataccaattctgagatgggtaacatcggcgattcctgtagtgacaaattgactgatgaaaatttaagtaactcatctcgtcatatcgctgaaaagcattctattaccaaggaccaatattcaaatgagcaggaccatgagcgggagccactagatcatgctgttcaacagcaaccaaaatcggatgttggagaaagagcatcatctatgaaacgacgttgcaggaaaaaggtgcaaaaagttgggacacctaatcacactgttgatgattattttggtgaagactgtgtcgaaccttcattagctgaagaagataacgatactggtgatcattacactactggtaataagcataaggctaggaaaaagtcaaggggtggtgtagaagagtcacagcagcagaaagctcaaaaaaataaaagcaaggtgtcttcacggggccgcaaacggaccttgaaggatgaatcgacagagaagcctgagaagaagctaacccacagaatacgtcagaggataccaaaagaggttaaggctttactggaaacacctcgtgagcagataaaacccatgaagctttgtgcatcacatctcaggttgttacaagaagctagagagcgtgttgatccaaaagggattccatccgggccatcctctaatacaagaaactttcaactagatgatatggatgatttgggctacagagatgaggaagctaggttctttgacaacgatataacagaggagcatgtacaaaatgcaacaaaattgaactaccattcctacatgaacaaaccagcccggggaaaatggtcaaaatcagataccgacttgttttatgagggtcttcgacaatttggtagcgattttgcaatgatacaacaattattccctgataagactcgccatcaggtgcggcagaaatttaaatctgaggagagaaaaaatccattgctagtccatgatgctatagttcatcgctcaggagatagtttgtatttcaaaaaggtaattaagcagctgaacattgaagatgttgtgctgccagatattaaaagtacacaaaacaagatggtgcatcaagtgaaagaggccctggaaatgagaatgtactggatgatttaaacgaggaggaaaatagttcaaattggttgaacgaagagcatgacgtacagatggccgatgtggaagaagagcatggcgaacagatggatgatgtggaagaagagcgtgatcttggaaatgatggtggtgatgatgatcttggggatgtttttgattggtactagtttatgttaaacacggatgcgagcgtgaatatgagttggtctagctctgcataacaggggtagtttttaggaaaaaaattctttgcatccggaatgcaaagaatcccttttatgactgatttggtgactaggtatcacagagagattggagtggattgagagcctctaatctctccgtgatcctcttacagcctctaacatccaccacctcgtggtccatataagggcttattcggttattcttgtcccatgtggatttgatgagattggaaaaaatatgaaggattttaacttgttcgagatttaaatctatcaaatctcatcaaatccatatggattgagaggaaagcaaacaagccctaaatagaagaaaaacaaattactattggattaagttataaattttgatctgtttttgtggaccttcaagtggtgtatgtgagtggctgtaaaagagtgtgtttgcatctgggatatacagattttttaccctagtttttagatgttgccacagttgtacggttagaattgttcggctggactatcgcttggacgatcaagatactaggtttcctccaaaaacactgcaatactcgaagagcgatgagtcactagacaacatatccaat

SEQ ID NO: 50962 - DNA, 4202 bp, Zea Mays
aaaccttcatcctttttatgccaaccaaaactccaccctcctctcgagcccgagcccatctgatcctccgattcagttcttctccccctaccaaaaggccgagcccccctcaggcctcagctccgcctccgcgctgccaaccatactcgtcaagccgtcacactttgtctctctcgtgccccgatactctttttctttttttttcttttcttttttttttttttttgcttccgggagcagcaaccgtcgccgtggccccgccttggatattccatcagttttcgggttcttggataggagaaagcggggcgctcaattccccccctcctgatccttgttccttgatcgccgccatgagcaacacgctgcttcgagtctacccttccgacctgaagatgccattcgagctcaggaagcagaactcagcgtgtcttgagctcgtcaacaagaccgaccggtcaagacgacgaaccctaggaagtactcggtgcgctctgcctccggtgtcgtgccgcccaggggatcctgtggcatcacaataacgatgcaagcgcccaaggagatgcccccggactaccactgcaaggacaagtttcttgttcagagcattgctgtggaggaggggacgacgcagaaggacattgtccctgacatgttcagtaaagcaccaggtaagttagttgaggagttcaagctgagggtggtctatgtccctgccaatcctccctcaccagtgcctgaggaaacagaggaagaggatggatctcttgattcagatgtggaccatgaagtatccacgtccaactctgcaacaggacaagggaatacatgtagatcacaaacatcagatgatgaggatgattctacatccaagttggaactggaaagaagatatgcagaggaaaacaagaagattcagaaagagctggatctcctccggaaaacaaaggcgtctcctcggggcttctctgcgtttgtgctgcttgtcttcttgttatcctcacttcttggatacctgatgttcggaagcagagcttagcaagttagcagctaatggctgcacatcatttgcggcaccggcagcgcctttaattggcactcaaagttcaagatagcttgctgtagaccatcggctgcacagatgattgatgatgaggtcaactttggtaatatctttgatgcctcagaagaagttcaggttactgcaaagtttggtcccaagcaacggcccaaaacccgaaaaacagctctatcatccagatctgcagcgcctaatcctactgaagaaaccggagataggaaagtaggaaccttcagtcaagtcaattcttctaaagagcttaccagccaagaaaggacatccttgatgtgccctagtactgagtcagttgatattatcgctggttctcatagtattctcgatacaccattggaagatgcattgacagttccccagggttctctgtctggtgcttctgctgcagataggacttctcaatatggtgagcacaatgatgatccttctaagttagctacacaccaagaaaacttggtggtttcagatatcaacgtcccacctaacagttcatgtagcaaggctattgatgatatagttgaatttggggacatgtgtgatgtgcaaattgaagaggaaagagttacaaagttccaaccaaaggtgcaaacgaagctccttaaggaaatagccaaatctcggaagactaaccaaaaggtggaaacttccactgtagatgtggttacacaaaatggaaagggcaataatattcagacaaggctccatggcgatccggtacaggatcctaaaagtcatgaaagtgtgcagatcccagattctgaaggattattagcaactgataatagtaaaggttgcaatttagctaacctcaacaatctccttgaggagtcagtccaagaggaaacaatagctaagtttcgttctgatttgcaaccaaatctcgggaaggcttcatcccaggttgctgcgattaaaattaatgttgttgctgttgctccaatagttggagtttgtgacagcaacaatgacatgtacaaagaacctaaagatcaagaaaccatcactggtccagtggcttggtcaccacaggctgtgcatgctgatgttgatttagacaatcacaatgaaccaattaatcctcctattgatggtactcaatcaatgtttggcgaagtcccaggaagagaaaagggaaaatcaaaatctgtatcttttgctctatcggatgtttctgggatagctagccctatagataccaattctgagatgggtaacatcggcgattcctgtagtgacaaattgactgatgaaaatttaagtaactcatctcgtcatatcgctgaaaagcattctattaccaaggaccaatattcaaatgagcaggaccatgagcgggagccactagatcatgctgttcaacagcaaccaaaatcggatgttggagaaagagcatcatctatgaaacgacgttgcaggaaaaaggtgcaaaaagttgggacacctaatcacactgttgatgattattttggtgaagactgtgtcgaaccttcattagctgaagaagataacgatactggtgatcattacactactggtaataagcataaggctaggaaaaagtcaaggggtggtgtagaagagtcacagcagcagaaagctcaaaaaaataaaagcaaggtgtcttcacggggccgcaaacggaccttgaaggatgaatcgacagagaagcctgagaagaagctaacccacagaatacgtcagaggataccaaaagaggttaaggctttactggaaacacctcgtgagcagataaaacccatgaagctttgtgcatcacatctcaggttgttacaagaagctagagagcgtgttgatccaaaagggattccatccgggccatcctctaatacaagaaactttcaactagatgatatggatgatttgggctacagagatgaggaagctaggttctttgacaacgatataacagaggagcatgtacaaaatgcaacaaaattgaactaccattcctacatgaacaaaccagcccggggaaaatggtcaaaatcagataccgacttgttttatgagggtcttcgacaatttggtagcgattttgcaatgatacaacaattattccctgataagactcgccatcaggtgcggcagaaatttaaatctgaggagagaaaaaatccattgctagtccatgatgctatagttcatcgctcaggagatagtttgtatttcaaaaaggtaattaagcagctgaacattgaagatgttgtgctgccagatattaaaagtacacaaaacaagatggtgcatcaagtgaaagaggccctggaaatgagaatgtactggatgatttaaacgaggaggaaaatagttcaaattggttgaacgaagagcatgacgtacagatggccgatgtggaagaagagcatggcgaacagatggatgatgtggaagaagagcgtgatcttggaaatgatggtggtgatgatgatcttggggatgtttttgattggtactagtttatgttaaacacggatgcgagcgtgaatatgagttggtctagctctgcataacaggggtagtttttaggaaaaaaattctttgcatccggaatgcaaagaatcccttttatgactgatttggtgactaggtatcacagagagattggagtggattgagagcctctaatctctccgtgatcctcttacagcctctaacatccaccacctcgtggtccatataagggcttattcggttattcttgtcccatgtggatttgatgagattggaaaaaatatgaaggattttaacttgttcgagatttaaatctatcaaatctcatcaaatccatatggattgagaggaaagcaaacaagccctaaatagaagaaaaacaaattactattggattaagttataaattttgatctgtttttgtggaccttcaagtggtgtatgtgagtggctgtaaaagagtgtgtttgcatctgggatatacagattttttaccctagtttttagatgttgccacagttgtacggttagaattgttcggctggactatcgcttggacgatcaagatactaggtttcctccaaaaacactgcaatactcgaagagcgatgagtcactagacaacatatccaat

SEQ ID NO: 50963 - DNA, 4347 bp, Zea Mays
tttatgccaaccaaaactccaccctcctctcgagcccgagcccatctgatcctccgattcagttcttctccccctaccaaaaggccgagcccccctcaggcctcagctccgcctccgcgctgccaaccatactcgtcaagccgtcacactttgtctctctcgtgccccgatactctttttctttttttttcttttcttttttttttttttttgcttccgggagcagcaaccgtcgccgtggccccgccttggatattccatcagttttcgggttcttggataggagaaagcggggcgctcaattccccccctcctgatccttgttccttgatcgccgccatgagcaacacgctgcttcgagtctacccttccgacctgaagatgccattcgagctcaggaagcagaactcagcgtgtcttgagctcgtcaacaagaccgaccggtgggtggctttcaaggtcaagacgacgaaccctaggaagtactcggtgcgctctgcctccggtgtcgtgccgcccaggggatcctgtggcatcacaataacgatgcaagcgcccaaggagatgcccccggactaccactgcaaggacaagtttcttgttcagagcattgctgtggaggaggggacgacgcagaaggacattgtccctgacatgttcagtaaagcaccaggtaagttagttgaggagttcaagctgagggtggtctatgtccctgccaatcctccctcaccagtgcctgaggaaacagaggaagaggatggatctcttgattcagatgtggaccatgaagtatccacgtccaactctgcaacaggacaagggaatacatgtagatcacaaacatcagatgatgaggatgattctacatccaagttggaactggaaagaagatatgcagaggaaaacaagaagattcagaaagagctggatctcctccggaaaacaaaggcgtctcctcggggcttctctgcgtttgtgctgcttgtcttcttgttatcctcacttcttggatacctgatgttcggaagcagagcttagcaagttagcagctaatggctgcacatcatttgcggcaccggcagcggcacggctcttttagtacagtgtacagatatatacattaatagcgaagtagtcagtacataacagatatatagggctttcttgggtttcaagtgtccataggaatatatcttcagttttgaaatatgtcctttaattggcactcaaagttcaagatagcttgctgtagaccatcggctgcacagatgattgatgatgaggtcaactttggtaatatctttgatgcctcagaagaagttcaggttactgcaaagtttggtcccaagcaacggcccaaaacccgaaaaacagctctatcatccagatctgcagcgcctaatcctactgaagaaaccggagataggaaagtaggaaccttcagtcaagtcaattcttctaaagagcttaccagccaagaaaggacatccttgatgtgccctagtactgagtcagttgatattatcgctggttctcatagtattctcgatacaccattggaagatgcattgacagttccccagggttctctgtctggtgcttctgctgcagataggacttctcaatatggtgagcacaatgatgatccttctaagttagctacacaccaagaaaacttggtggtttcagatatcaacgtcccacctaacagttcatgtagcaaggctattgatgatatagttgaatttggggacatgtgtgatgtgcaaattgaagaggaaagagttacaaagttccaaccaaaggtgcaaacgaagctccttaaggaaatagccaaatctcggaagactaaccaaaaggtggaaacttccactgtagatgtggttacacaaaatggaaagggcaataatattcagacaaggctccatggcgatccggtacaggatcctaaaagtcatgaaagtgtgcagatcccagattctgaaggattattagcaactgataatagtaaaggttgcaatttagctaacctcaacaatctccttgaggagtcagtccaagaggaaacaatagctaagtttcgttctgatttgcaaccaaatctcgggaaggcttcatcccaggttgctgcgattaaaattaatgttgttgctgttgctccaatagttggagtttgtgacagcaacaatgacatgtacaaagaacctaaagatcaagaaaccatcactggtccagtggcttggtcaccacaggctgtgcatgctgatgttgatttagacaatcacaatgaaccaattaatcctcctattgatggtactcaatcaatgtttggcgaagtcccaggtacagcttttacaggaagagaaaagggaaaatcaaaatctgtatcttttgctctatcggatgtttctgggatagctagccctatagataccaattctgagatgggtaacatcggcgattcctgtagtgacaaattgactgatgaaaatttaagtaactcatctcgtcatatcgctgaaaagcattctattaccaaggaccaatattcaaatgagcaggaccatgagcgggagccactagatcatgctgttcaacagcaaccaaaatcggatgttggagaaagagcatcatctatgaaacgacgttgcaggaaaaaggtgcaaaaagttgggacacctaatcacactgttgatgattattttggtgaagactgtgtcgaaccttcattagctgaagaagataacgatactggtgatcattacactactggtaataagcataaggctaggaaaaagtcaaggggtggtgtagaagagtcacagcagcagaaagctcaaaaaaataaaagcaaggtgtcttcacggggccgcaaacggaccttgaaggatgaatcgacagagaagcctgagaagaagctaacccacagaatacgtcagaggataccaaaagaggttaaggctttactggaaacacctcgtgagcagataaaacccatgaagctttgtgcatcacatctcaggttgttacaagaagctagagagcgtgttgatccaaaagggattccatccgggccatcctctaatacaagaaactttcaactagatgatatggatgatttgggctacagagatgaggaagctaggttctttgacaacgatataacagaggagcatgtacaaaatgcaacaaaattgaactaccattcctacatgaacaaaccagcccggggaaaatggtcaaaatcagataccgacttgttttatgagggtcttcgacaatttggtagcgattttgcaatgatacaacaattattccctgataagactcgccatcaggtgcggcagaaatttaaatctgaggagagaaaaaatccattgctagtccatgatgctatagttcatcgctcaggagatagtttgtatttcaaaaaggtaattaagcagctgaacattgaagatgttgtgctgccagatattaaaagtacacaaaacaagatggtgcatcaagtgaaagaggccctggaaatgagaatgtactggatgatttaaacgaggaggaaaatagttcaaattggttgaacgaagagcatgacgtacagatggccgatgtggaagaagagcatggcgaacagatggatgatgtggaagaagagcgtgatcttggaaatgatggtggtgatgatgatcttggggatgtttttgattggtactagtttatgttaaacacggatgcgagcgtgaatatgagttggtctagctctgcataacaggggtagtttttaggaaaaaaattctttgcatccggaatgcaaagaatcccttttatgactgatttggtgactaggtatcacagagagattggagtggattgagagcctctaatctctccgtgatcctcttacagcctctaacatccaccacctcgtggtccatataagggcttattcggttattcttgtcccatgtggatttgatgagattggaaaaaatatgaaggattttaacttgttcgagatttaaatctatcaaatctcatcaaatccatatggattgagaggaaagcaaacaagccctaaatagaagaaaaacaaattactattggattaagttataaattttgatctgtttttgtggaccttcaagtggtgtatgtgagtggctgtaaaagagtgtgtttgcatctgggatatacagattttttaccctagtttttagatgttgccacagttgtacggttagaattgttcggctggactatcgcttggacgatcaagatactaggtttcctccaaaaacactgcaatactcgaagagcgatgagtcactagacaacatatccaat
